United States Patent Application Publication US 2018/0126003 A1 - sequence listing, part 159

SEQ ID NO: 279070 - DNA, 2814 bp, Artificial Sequence
  derived and/or modified sequence
atgtacaacatgaggcggctgagcctgagccccaccttctccatgggcttccacctgctggtgacagtgtccctgctcttcagccacgtggaccacgtgattgctgagacagagatggagggggagggcaatgagaccggggagtgcaccggcagctactactgcaagaagggcgtcatcctgcccatctgggagccccaggaccccagctttggagacaagatcgcccgggccaccgtgtactttgtggccatggtgtacatgttcctgggcgtgtccatcatcgctgaccgcttcatgagcagcattgaagtcatcaccagccaggagaaggagatcaccatcaagaagcccaatggagagaccaccaagaccaccgtgcgcatctggaatgaaacagtgagcaacctgaccctgatggccctgggcagcagcgcccctgagatcctgctgagcgtcatcgaggtgtgtggccacaacttcaccgctggggacctgggccccagcaccatcgtgggcagcgctgccttcaacatgttcatcatcatcgccctgtgtgtgtatgtggtgcctgatggagagaccaggaagatcaagcacctgcgggtcttctttgtgacagctgcctggagcatctttgcctacacctggctgtacatcatcctgagcgtcatcagccctggggtggtggaggtgtgggagggcctgctgaccttcttcttcttccccatctgtgtggtgtttgcctgggtggccgaccggcggctgctcttctacaagtatgtgtacaagcgctaccgggccggcaagcagaggggcatgatcatcgagcacgagggggaccggcccagcagcaagacagaaattgagatggatggcaaggtggtgaacagccacgtggagaacttcctggatggagccctggtgctggaggtggatgagcgggaccaggatgatgaggaggcccggcgggagatggcccgcatcctgaaggagctgaagcagaagcacccagacaaggagattgagcagctgattgagctggccaactaccaggtgctgagccagcagcagaagagccgggccttctaccgcatccaggccacccggctgatgactggagctggcaacatcctgaagagacatgctgctgaccaggccaggaaggctgtgtccatgcatgaggtgaacacagaggtgacagaaaatgaccctgtgtccaagatcttctttgagcagggcacctaccagtgcctggagaactgtggcaccgtggccctgaccatcatcagaagaggaggagacctgaccaacacagtgtttgtggacttcagaacagaagatggaacagccaatgccggcagtgactatgagttcacagagggcaccgtggtgttcaagccaggggacacccagaaggagatccgggtgggcatcattgatgatgacatctttgaagaagatgagaacttcctggtgcacctgagcaatgtgaaggtgagcagcgaggcctctgaagatggcatcctggaggccaaccacgtgtccaccctggcctgcctgggcagccccagcacagccaccgtgaccatctttgatgatgaccatgctggcatcttcacctttgaggagcctgtgacccacgtgtctgagagcatcggcatcatggaggtgaaggtgctgcggaccagcggggcccggggaaatgtgattgtgccctacaagaccatcgagggcacagcccggggcggcggggaggactttgaggacacctgtggggagctggagttccagaatgatgagatcgtgaagatcatcaccatccgcatctttgaccgggaggagtatgagaaggaatgttccttcagcctggtgctggaggagcccaagtggatcagaagaggcatgaagggcggcttcaccatcacagatgaatatgatgacaagcagcccctgaccagcaaggaggaggaggagaggagaattgctgagatgggccggcccatcctgggggagcacaccaagctggaggtgatcatcgaggagagctatgagttcaagagcacagtggacaagctgatcaagaagaccaacctggccctggtggtgggcaccaacagctggagggagcagttcatcgaggccatcaccgtgtctgctggggaggatgatgatgatgatgaatgtggggaggagaagctgcccagctgctttgattatgtgatgcacttcctgaccgtcttctggaaggtgctgtttgcctttgtgcccccaacagagtactggaatggctgggcctgcttcatcgtgtccatcctgatgattggcctgctgacagccttcatcggggacctggccagccacttcggctgcaccatcggcctgaaggacagcgtgacagctgtggtgtttgtggccctgggcacctctgtgcctgacacctttgccagcaaggtggccgccacccaggaccagtatgcagatgccagcattggaaatgtgacaggcagcaatgctgtgaatgtgttcctgggcatcggcgtggcctggagcattgctgccatctaccacgccgccaacggggagcagttcaaggtgtccccaggcaccctggccttctctgtgaccctcttcaccatctttgccttcatcaacgtgggcgtgctgctgtacagaagaagacctgagattggaggagagctgggcggccccaggacagccaagctgctgaccagctgcctgtttgtgctgctgtggctgctgtacatcttcttcagcagcctggaggcctactgccacatcaagggcttctag

SEQ ID NO: 279071 - DNA, 2814 bp, Artificial Sequence
  derived and/or modified sequence
atgtacaacatgaggcggctgagcctgagccccaccttctccatgggcttccacctgctggtgacagtgtccctgctcttcagccacgtggaccacgtgattgctgagacagagatggagggggagggcaatgagaccggggagtgcaccggcagctactactgcaagaagggcgtcatcctgcccatctgggagccccaggaccccagctttggagacaagatcgcccgggccaccgtgtactttgtggccatggtgtacatgttcctgggcgtgtccatcatcgctgaccgcttcatgagcagcattgaagtcatcaccagccaggagaaggagatcaccatcaagaagcccaatggagagaccaccaagaccaccgtgcgcatctggaatgaaacagtgagcaacctgaccctgatggccctgggcagcagcgcccctgagatcctgctgagcgtcatcgaggtgtgtggccacaacttcaccgctggggacctgggccccagcaccatcgtgggcagcgctgccttcaacatgttcatcatcatcgccctgtgtgtgtatgtggtgcctgatggagagaccaggaagatcaagcacctgcgggtcttctttgtgacagctgcctggagcatctttgcctacacctggctgtacatcatcctgagcgtcatcagccctggggtggtggaggtgtgggagggcctgctgaccttcttcttcttccccatctgtgtggtgtttgcctgggtggccgaccggcggctgctcttctacaagtatgtgtacaagcgctaccgggccggcaagcagaggggcatgatcatcgagcacgagggggaccggcccagcagcaagacagaaattgagatggatggcaaggtggtgaacagccacgtggagaacttcctggatggagccctggtgctggaggtggatgagcgggaccaggatgatgaggaggcccggcgggagatggcccgcatcctgaaggagctgaagcagaagcacccagacaaggagattgagcagctgattgagctggccaactaccaggtgctgagccagcagcagaagagccgggccttctaccgcatccaggccacccggctgatgactggagctggcaacatcctgaagagacatgctgctgaccaggccaggaaggctgtgtccatgcatgaggtgaacacagaggtgacagaaaatgaccctgtgtccaagatcttctttgagcagggcacctaccagtgcctggagaactgtggcaccgtggccctgaccatcatcagaagaggaggagacctgaccaacacagtgtttgtggacttcagaacagaagatggaacagccaatgccggcagtgactatgagttcacagagggcaccgtggtgttcaagccaggggacacccagaaggagatccgggtgggcatcattgatgatgacatctttgaagaagatgagaacttcctggtgcacctgagcaatgtgaaggtgagcagcgaggcctctgaagatggcatcctggaggccaaccacgtgtccaccctggcctgcctgggcagccccagcacagccaccgtgaccatctttgatgatgaccatgctggcatcttcacctttgaggagcctgtgacccacgtgtctgagagcatcggcatcatggaggtgaaggtgctgcggaccagcggggcccggggaaatgtgattgtgccctacaagaccatcgagggcacagcccggggcggcggggaggactttgaggacacctgtggggagctggagttccagaatgatgagatcgtgaagatcatcaccatccgcatctttgaccgggaggagtatgagaaggaatgttccttcagcctggtgctggaggagcccaagtggatcagaagaggcatgaaggagggcttctgcttcacagatgaatatgatgacaagcagcccctgaccagcaaggaggaggaggagaggagaattgctgagatgggccggcccatcctgggggagcacaccaagctggaggtgatcatcgaggagagctatgagttcaagagcacagtggacaagctgatcaagaagaccaacctggccctggtggtgggcaccaacagctggagggagcagttcatcgaggccatcaccgtgtctgctggggaggatgatgatgatgatgaatgtggggaggagaagctgcccagctgctttgattatgtgatgcacttcctgaccgtcttctggaaggtgctgtttgcctttgtgcccccaacagagtactggaatggctgggcctgcttcatcgtgtccatcctgatgattggcctgctgacagccttcatcggggacctggccagccacttcggctgcaccatcggcctgaaggacagcgtgacagctgtggtgtttgtggccctgggcacctctgtgcctgacacctttgccagcaaggtggccgccacccaggaccagtatgcagatgccagcattggaaatgtgacaggcagcaatgctgtgaatgtgttcctgggcatcggcgtggcctggagcattgctgccatctaccacgccgccaacggggagcagttcaaggtgtccccaggcaccctggccttctctgtgaccctcttcaccatctttgccttcatcaacgtgggcgtgctgctgtacagaagaagacctgagattggaggagagctgggcggccccaggacagccaagctgctgaccagctgcctgtttgtgctgctgtggctgctgtacatcttcttcagcagcctggaggcctactgccacatcaagggcttctag

SEQ ID NO: 279072 - DNA, 2814 bp, Artificial Sequence
  derived and/or modified sequence
atgtacaacatgcggcggctgagcctgagccccaccttcagcatgggcttccatctgctggttaccgtcagcctcctgttttcccacgttgaccacgtcatagcagagacagagatggagggtgaagggaacgagaccggagagtgcaccggctcttactactgcaaaaagggtgtcatcttgccgatctgggaaccacaagatccatccttcggcgacaaaatcgccagagccaccgtctacttcgtggccatggtctacatgtttttaggtgtaagcattatagcagataggttcatgtcctctatagaggttatcactagccaggagaaggagatcaccataaaaaaacccaacggcgaaacaacaaaaactacggtaaggatctggaacgaaacggtgagcaatttaactctgatggcactgggttccagcgcacccgagatcctgctgtccgtcatagaggtgtgtggacataattttacagcaggcgatctaggcccctcaactattgttggatctgcggctttcaacatgtttattattattgctctgtgtgtctatgttgtgccagacggagagaccagaaagatcaagcacctcagagtgttctttgttaccgctgcctggagcatattcgcctacacttggttgtacatcatcctatctgtgatctcacctggggtggtagaggtgtgggaagggctgttaacttttttcttttttcctatctgtgtcgtcttcgcctgggtagccgaccggagattgctgttctacaaatacgtgtacaaacggtatcgcgccggcaaacagagaggcatgattatcgagcacgagggcgacaggccctcatctaaaactgaaatcgaaatggacggaaaggttgtcaatagccacgtggaaaatttcttggatggcgcacttgtgttggaggtggacgagcgtgaccaagacgacgaggaggctagaagagaaatggctcgcattctgaaagagttgaagcagaaacatccagataaggagatcgagcaattgatagagctcgcaaactatcaggtgcttagccagcagcagaagtcccgggctttctaccggattcaagctaccagactgatgaccggagccggaaatatcctgaagagacatgctgcggaccaggcccgcaaggcggtgagtatgcacgaagtgaataccgaggttaccgagaatgatcctgtttcaaaaatctttttcgaacagggtacataccagtgtctagagaattgtgggaccgtcgccctaacaataatacggcgcggaggcgacctaacgaacacagtgttcgtggactttcggaccgaggatggcaccgcaaatgccgggtccgactatgagttcactgagggcacggtcgtgtttaaacctggtgacacacaaaaagagatacgtgtaggcataatagacgacgatatctttgaggaagacgagaattttttggtgcacttgagtaatgtcaaggtctcgagcgaggctagtgaggatggcatcctggaagccaaccacgtctctacattggcatgtctgggcagcccctccacggccaccgtaaccatatttgatgatgatcacgccgggattttcacattcgaggagccggtgacgcatgtaagtgagagcattgggatcatggaagttaaggtcctgcgcaccagtggagcccgtggcaatgtaatagtgccttataagacaattgaggggacagcgcgaggcgggggcgaggatttcgaggatacttgcggggaactcgagtttcagaacgatgagatcgtaaaaatcattaccattaggatattcgatagggaggagtacgaaaaagagtgtagtttctcactggtgcttgaggagcctaagtggatcaggcgcggcatgaagggtggatttactatcaccgatgaatacgatgacaaacagccgcttacctctaaggaagaggaggaaaggcgaattgccgagatgggccgaccaatcctgggcgagcacacaaaactcgaggtgatcatagaggagtcgtatgagttcaaaagcaccgtcgataagttaataaagaagacgaatctcgccctagtcgtcggcaccaattcctggagggagcagttcatagaggcgatcacagtgagcgcgggagaggacgacgacgatgatgagtgcggcgaagagaagttgccatcctgtttcgactatgtgatgcatttcctcaccgtcttctggaaagtactcttcgccttcgtaccacccaccgaatactggaacgggtgggcatgctttatagtatcgattttgatgatcgggttactcactgcttttatcggcgacttggcatctcactttggctgtaccatcgggcttaaagattccgtgaccgcagtggtgttcgtagctttggggacttctgtcccggatactttcgcgtcaaaggtggccgcaacccaggatcagtatgccgacgcgagcatcggcaacgtgaccggatcaaatgcagtgaacgtgtttctgggaataggcgtggcttggtctattgcagctatttatcatgcagccaacggagaacagttcaaggtttcccctggcactttggccttttccgtgacgctgttcactatttttgccttcattaatgtgggagtactgctgtaccggagaagacctgagattggaggagaactcggaggcccacgaacagcgaaactgctcacttcctgtctgttcgtgctgctgtggttgctatacattttcttctccagcctggaagcctattgccatatcaaaggcttctag

SEQ ID NO: 279073 - DNA, 2814 bp, Artificial Sequence
  derived and/or modified sequence
atgtacaacatgcggcggctgagcctgagccccaccttcagcatgggatttcacctgctagtcaccgtcagtttgctgttttcccatgttgatcacgttatcgctgaaaccgaaatggaaggagagggaaacgaaactggtgagtgcacgggtagctattattgtaaaaagggtgtgatcctcccaatatgggaaccgcaggatccttccttcggggataaaatagcgagggccacagtttattttgtggctatggtctacatgtttctcggcgtgtccattatcgctgatagattcatgtcctcaatcgaagtgattacatcccaggagaaagagatcactatcaagaaaccaaacggcgagaccacaaaaactaccgtacggatttggaatgaaactgttagtaatttgaccctgatggccctgggcagttctgcaccagagattctgctgtccgtgatagaggtgtgcggtcacaacttcacagctggcgatctgggtcccagcacgattgttgggtcagcagctttcaacatgttcatcataattgcactgtgcgtgtatgttgtaccagacggggagacacggaagattaagcatcttagagtattcttcgtgacggccgcctggagcatattcgcgtacacctggctgtacattattctgagtgtaatcagccccggcgtggtggaggtgtgggagggtctgctgaccttttttttcttcccaatttgtgtggtatttgcatgggtggctgatcggcggctgctgttctataaatatgtgtacaagcgctatcgggctgggaagcagcgggggatgatcatcgagcatgagggtgaccgtcccagctccaagacagagatcgagatggacgggaaagtagtgaattctcacgtggaaaatttcctggacggcgccctcgtgctggaggtggatgagcgggatcaggacgatgaggaggcaagacgcgaaatggctaggatcctcaaggagctgaagcaaaaacatccggataaagagatcgaacagcttatcgagttggccaactaccaggtgcttagtcaacaacagaaatctcgtgccttttacaggatccaagccactcgcctaatgaccggtgccgggaatatactcaaaagacacgccgcggaccaggccagaaaagcagtttcaatgcacgaagtgaatactgaagtgaccgagaatgatcctgtaagtaagatattttttgagcagggaacttaccaatgtctggaaaactgcggaactgttgccctgacaatcattcgtcgaggaggcgatctaaccaatacagtctttgtagactttcggacggaagacggcacggcaaatgcaggatctgattatgagtttactgaaggcacagtggtcttcaaaccaggcgacacacagaaggagattcgtgtcggcattatcgacgacgatattttcgaggaggatgaaaattttctcgtgcacttaagtaatgtgaaggtttcttcagaggcctcagaagatggaatcctggaagccaatcatgtgagtactctggcctgtctgggaagccccagtacagccacagtgacaattttcgatgatgatcacgctgggatatttacgtttgaagagcccgtaactcatgtgagcgagtcaatcggaatcatggaggttaaagtccttaggacctcaggcgcacgcggcaacgttattgtcccatacaaaacgatcgagggaacggccaggggaggaggagaggacttcgaggacacatgtggagagctcgagttccagaacgacgagattgtgaaaatcatcaccatccggattttcgatagggaggagtatgagaaggaatgctcttttagcctggttctggaggagcctaagtggatacgccggggcatgaaaggggggttcaccattaccgacgagtacgatgataaacagccactaaccagtaaagaggaagaagaaagacgaatcgctgaaatgggacgtccaatactgggcgagcataccaagctagaagtcattatcgaggaaagctatgagttcaagagcaccgtggacaagctgataaagaaaacaaacctagccttagtagttggcacaaacagctggagggaacagttcattgaggccattacagtctccgcgggagaggacgatgatgatgacgaatgcggggaggagaaactgccctcctgttttgactacgtgatgcacttccttaccgtcttttggaaagttctgttcgccttcgtgcccccaacagaatactggaatggctgggcctgttttattgtatctattctgatgattgggttgctcacagctttcatcggtgatttagccagtcacttcggttgtaccatagggttgaaagacagtgtgaccgccgtcgtatttgttgcactgggaacctctgtgcccgacacttttgcaagcaaggtggccgctacccaagatcagtacgccgatgcctctattgggaacgtgaccggatctaacgccgtgaatgtgtttttgggcattggtgtggcatggagcattgccgcaatctaccatgccgcaaatggcgagcaatttaaggtgtccccggggacccttgccttcagtgtgactctcttcacaatcttcgcgtttattaacgtaggggtgctgttgtaccgccggaggcccgaaatcggtggcgagttagggggtcctcgaactgcaaagctgctcacatcatgcctttttgtgcttctgtggctcctgtatatattcttctcatccctcgaggcttactgtcacattaagggattctag

SEQ ID NO: 279074 - DNA, 2814 bp, Artificial Sequence
  derived and/or modified sequence
atgtacaacatgcggcggctgagcctgagccccaccttcagcatgggttttcacctgctagttactgtttccctgttgtttagtcacgttgaccacgtaattgccgagactgaaatggaaggtgaagggaacgaaaccggggaatgtaccggatcctattattgcaaaaaaggagtgatcctacccatctgggagccccaggaccctagcttcggagacaaaatagcccgcgccaccgtgtacttcgtcgcaatggtgtatatgttcttgggcgtttccataattgccgaccggttcatgtccagcattgaggtgatcacttcacaggagaaagagataacaatcaaaaagccaaacggggagactaccaagacaacggttcggatttggaatgaaacggtttctaacctaactctgatggccctgggctccagcgcccccgagatactcctgagtgtcatcgaggtgtgtggacacaacttcaccgctggcgacttagggccttcaaccattgtcgggagcgcagccttcaatatgttcattatcattgcattgtgcgtgtatgttgtgcccgacggtgaaaccaggaagataaagcacctccgagtcttcttcgttaccgcagcgtggtccatcttcgcttatacctggctatacatcatcctgtctgtcatctctccaggggtggtagaagtatgggagggactgctcacattctttttctttcctatctgtgttgtgttcgcttgggtggcagaccggaggctattattttacaaatatgtctataagcgctatcgtgcaggcaaacagcggggaatgatcatcgaacacgaaggagaccggccaagctccaaaacggagattgaaatggacggaaaggtagtaaactcacatgtcgaaaacttcctggatggagccctggtgttagaggtcgacgaacgggaccaagatgacgaggaggcaagaagagagatggccagaatcctgaaagagctaaaacagaagcacccagataaagagattgaacagcttattgagctcgcaaattatcaggttcttagccagcagcagaagagtagagccttctacagaatccaggcgacccgtttaatgactggcgccggcaatattctgaagagacatgccgcagaccaggctcggaaggcggtttctatgcatgaagtcaacaccgaggttaccgagaacgatccagtgagcaaaatcttcttcgagcagggtacatatcagtgtctcgaaaactgcggaacagtggccctcacgattatccggaggggaggcgacttaactaataccgttttcgtggatttccgtacagaggacggaactgcaaacgcaggctccgactacgaattcacagaagggaccgttgtttttaaacccggggatacacagaaagagatacgtgtcggcattattgatgacgatatattcgaagaggatgaaaatttcctggttcatctgtctaacgtaaaggtatctagtgaggcttctgaggacggaatcctggaagccaatcacgtgtcaacactggcttgcctaggaagtcctagcacagctaccgtgacgatatttgacgacgatcacgctggaatctttaccttcgaggaacccgtgacccacgtgtctgagtcgattggaatcatggaagtgaaagttctgcgtacctccggggcacggggcaatgtgattgtgccttataaaacaatcgagggcaccgctcgaggcggtggcgaggatttcgaggacacctgcggagagctagaatttcagaatgacgagatcgttaaaatcatcactatcagaatctttgatagagaggagtacgagaaagagtgtagtttctccttggtgctggaagagccgaagtggattcgtaggggcatgaagggaggattcactatcacagatgagtacgatgataagcaacctctgacaagcaaggaagaggaagaacgacgtattgcagagatgggccgacctatactcggtgagcataccaagctcgaggtcataattgaggaatcctatgagtttaaaagcaccgtcgataaacttattaagaagacgaacctagcccttgtcgttggaaccaactcttggcgcgaacagttcatcgaggcaattactgtgagcgccggcgaagacgacgatgacgatgagtgcggcgaagaaaagcttccatcttgctttgactatgttatgcactttctcacagtcttctggaaggttctgttcgctttcgtgcctccgacggagtactggaacgggtgggcatgtttcatcgtctcaatccttatgataggcctgctcaccgctttcataggtgacttagcctctcattttggttgcactattgggttaaaggactctgttacggctgtggtcttcgtggccctcggaacctctgtgcctgacacctttgctagtaaggtcgcagcaacacaggaccagtatgcagatgcttccatcggaaatgttactggatccaacgccgtgaacgtcttcctcggtatcggcgtggcatggagcattgccgctatctaccatgccgctaacggcgagcagttcaaagtcagcccgggcacgctggcctttagcgttacactgtttaccattttcgctttcatcaatgttggggtactgctctacagacgacgtcccgagatcggcggagagcttgggggtcccagaaccgccaaactgctgacgagctgcctgtttgtattactctggcttctgtacatcttcttctcatcactcgaggcctattgccacatcaaaggtttttag

SEQ ID NO: 279075 - DNA, 2814 bp, Artificial Sequence
  derived and/or modified sequence
atgtacaacatgcggcggctgagcctgagccccaccttcagcatgggcttccacttactggtcactgtctccctgcttttctcccacgtggaccacgtgattgcagagacagagatggaaggcgagggcaacgagactggggagtgcactggctcctattactgcaaaaaaggggtcattctgcccatctgggagccccaggatccctcgtttggagataaaatcgccagggcgacagtttattttgtcgcgatggtgtatatgtttctaggagtgtccattatagcggatagatttatgagctcaattgaagtcattacaagccaggaaaaggagataactattaagaaaccaaacggagaaaccaccaagacaaccgttcgaatctggaacgagaccgtgtcaaaccttacgctgatggcactgggctccagcgcgcctgagattttacttagtgttatcgaagtatgcggtcataatttcacggccggcgatctcggacccagtaccatagtcgggtctgccgctttcaacatgttcatcattattgctctttgtgtgtatgtcgtgccagatggggaaacgagaaagattaaacacctgcgggttttctttgtcaccgcagcttggagtattttcgcgtacacctggttatatatcatcctgtccgtaattagccccggcgtagtggaggtgtgggaaggcctgctgacgttctttttcttccctatatgcgttgtgttcgcctgggtggccgacaggcgactgctgttttacaagtacgtgtataagcgttatagagccgggaaacagcgggggatgatcatcgagcatgaaggagatagacctagcagcaagacagagatcgagatggacggaaaggtggtcaattctcatgtggagaacttcctcgatggagcactcgttctcgaagtggatgagagagaccaagacgacgaagaggctagaagagagatggccagaatcctgaaggagctgaaacagaagcatccagacaaagaaatagaacagctcatcgaactggctaactaccaagtcctgtcccagcaacaaaagtccagggcattctataggatccaggccactcgcctgatgaccggtgccgggaatatccttaagcggcacgctgctgatcaggcacgtaaagctgtgagcatgcatgaggtcaatacagaagttaccgagaacgacccagtcagcaagattttctttgagcaggggacttaccaatgtctggaaaactgcggcacagtggccctgacaattatccgtcgaggaggagatctcacaaatactgtgtttgttgactttcgaacagaggacggcacagccaatgcgggatctgattacgagttcaccgagggaactgtggtcttcaagccaggcgacacacagaaagaaataagggtcggaattatcgacgatgacatttttgaggaggacgaaaacttccttgtccacctgtctaatgtgaaagtctcgtctgaggctagcgaggatgggattctggaagctaatcacgtgagcacactggcttgcctggggtccccatctacagccaccgtgactatatttgatgatgatcacgcaggaatttttactttcgaggagccggttactcacgtgagcgagtccatcggtatcatggaagtgaaggtgttgagaacgagcggagctaggggtaacgtgatcgttccgtacaaaactatagagggcaccgctagaggcgggggagaagactttgaggatacttgtggggagctcgagttccaaaacgacgagatcgtaaaaatcattacaataaggatcttcgatcgggaagaatacgagaaggaatgttccttttctctggttttggaggagcccaagtggataagacgaggtatgaaaggtggatttaccattactgacgagtatgacgataaacagcctctaacttctaaggaagaggaagagagacgtatcgctgagatgggaaggcctattctgggagaacacaccaagttagaggtcatcatcgaggagagctacgagttcaagtcaaccgtcgacaagctgataaaaaaaacaaaccttgccttggtagtaggcactaatagctggcgcgagcagtttattgaagctattaccgtctctgcaggggaagacgatgacgatgatgagtgcggcgaagagaaattaccatcgtgttttgattacgtgatgcatttcttgactgtgttttggaaagtgttgttcgcctttgtgccgccgaccgaatattggaacggttgggcatgttttatcgtgagcattttgatgattggcctcctgaccgccttcatcggggatctcgcatctcatttcggttgtaccataggcctgaaggattccgtgacggccgttgtcttcgttgcactgggtacctccgtgcccgatacttttgcatccaaagtggccgccactcaggatcaatacgcagatgcttctattggaaacgtcactgggagcaatgcagtgaatgtctttttgggaataggagtcgcttggtctatcgcagccatttatcacgcagccaacggggagcagttcaaggtaagcccaggtactctcgccttctccgtgacgctgttcacgattttcgcgtttataaatgtaggtgttttactgtatcgaagaagaccggagattggcggcgaacttggaggcccacgcacggcaaaacttctcacctcttgtctgtttgtccttctgtggctcctttatatttttttcagttccttagaagcctactgtcacatcaaggggttttag

SEQ ID NO: 279076 - DNA, 2814 bp, Artificial Sequence
  derived and/or modified sequence
atgtacaacatgcggcggctgagcctgagccccaccttcagcatggggtttcacctgctggtaaccgtgtcactgctgttctcacacgtggatcatgtgatcgccgagaccgaaatggaaggggaaggcaacgagacaggagagtgtactggctcatactactgcaagaagggcgtgattctgccgatttgggagccacaggatcccagctttggagataaaattgcccgagcgactgtgtactttgtcgcgatggtttatatgttcttgggcgtctctataatcgctgaccggttcatgtcatcaatcgaagtgattacaagtcaagagaaggaaatcacgatcaagaagcccaatggtgagaccacaaagacaacagtgcgcatctggaatgaaacagtttcaaatctcacattgatggccctagggtctagcgctcctgagatattactgagtgtgattgaagtgtgtggacacaacttcaccgcgggggatctggggccttccacaatcgtaggctcggctgcttttaatatgttcataatcattgccttgtgtgtgtatgttgttccagatggagagacccgcaagatcaagcatctacgtgtattcttcgtcacagcagcttggagtattttcgcttatacctggctatatatcattctgtctgtgattagccccggagtcgtggaggtgtgggagggacttctaacctttttcttcttcccgatctgcgtcgtgtttgcgtgggttgccgatagacgccttttattttataagtacgtgtacaaacgctaccgagctgggaagcagcgaggcatgatcattgagcacgagggcgatcggcccagcagtaagactgagattgagatggacgggaaagtggtcaactcccatgtcgaaaatttcctggatggggccctcgttctggaagtagatgagcgggaccaggacgacgaagaggctcgcagagagatggcccgcatccttaaagaactgaaacagaagcacccggacaaagaaatagagcagctaatcgaactcgctaattatcaggtactctctcagcagcagaagtctcgcgcattctataggatccaggccacacgcctgatgactggggccgggaacattttaaaacggcatgctgccgaccaagcacgaaaagccgttagcatgcatgaagtcaatacggaggtgacggagaacgatcctgtcagcaaaatatttttcgagcagggcacctaccagtgtttggagaattgcggaacagtggcactgacgatcattagacggggcggcgatctgacaaacacagtctttgtcgactttcggaccgaagatggcacagccaatgcaggcagcgattacgaattcacagagggcactgtggttttcaagccaggcgacactcaaaaggaaatacgggtcggaattattgacgacgacatattcgaagaggacgaaaatttcctggttcatctttcgaacgtgaaagtgagctctgaggcatcagaggacggcattttagaagcaaaccatgttagcacattagcatgcctagggagcccatcgacggcaacagtgacgatttttgatgacgaccatgctgggatctttactttcgaggagcccgtgacgcacgtaagtgagagcatcggcatcatggaggttaaagtactgcgcaccagcggggcaagaggcaatgtgatcgttccctacaaaaccatagaaggtactgctcggggcggcggcgaggatttcgaggacacctgcggcgaactcgagttccaaaacgacgaaatcgttaagatcattactataagaattttcgacagagaagagtacgagaaggaatgttcttttagcttggtcctcgaggaacctaagtggatccgccgggggatgaaggaagggttctgctttacggatgaatatgatgataaacagcctctaactagcaaagaagaagaagagcggcgaatcgcggagatgggacgccccatcctgggagagcacaccaaactggaggtgatcatagaggaaagctacgaattcaagagcacagtagacaagctcatcaagaagaccaacctggccctggtcgtgggtactaatagctggcgagagcagttcattgaagcgatcactgtgtctgcaggcgaagacgacgatgatgacgagtgtggggaggagaaacttccaagctgcttcgactatgttatgcattttctgaccgtgttttggaaggtgctgtttgcatttgttcctcccactgaatactggaatggctgggcttgctttatcgtgagtattctgatgatcggcctgcttactgcttttattggcgacctcgccagtcatttcggatgtaccattgggttaaaagactccgttaccgcagtcgtgttcgtggcactggggacctccgtgccagataccttcgctagcaaggtcgcggcaacgcaagatcagtatgccgatgcttcgattggcaacgtaacgggctccaatgctgtaaatgtgtttctgggcataggcgtcgcttggtccattgctgccatttatcacgcagctaacggggagcagtttaaggtttcccctgggactctggctttttcagtgactctgtttacaatctttgccttcattaacgtgggggtcctcctgtatcggcggagacctgaaattggaggcgagctgggcggccccagaaccgccaaacttcttacgagctgtctgttcgtgctcctctggctgttatatattttctttagcagccttgaggcatactgtcatattaagggcttttag

SEQ ID NO: 279077 - DNA, 2814 bp, Artificial Sequence
  derived and/or modified sequence
atgtacaacatgcgacgtcttagcctgagcccaacatttagcatgggatttcacctgttagtcaccgtctccctgctgtttagccacgtggaccacgtgatagcggagactgagatggagggcgaggggaatgagaccggagaatgcacgggcagctattattgtaagaaaggagtgatcctacccatctgggaaccccaggaccccagcttcggggacaagattgccagggccacggtgtactttgtggccatggtgtatatgtttttaggtgtgtccatcatagctgacaggtttatgagttctatcgaagtgattacatcacaggagaaggaaattacaattaaaaagccgaacggggagactactaagacgacggtgagaatatggaacgagactgtttccaacttgaccctgatggcattaggcagcagtgctcccgaaatacttctttcggtcatcgaagtctgtggccacaactttactgctggagacttaggcccttcaactatagtggggtccgccgcatttaacatgtttataatcatcgcactgtgtgtgtatgtggtacccgatggggagactcggaaaataaaacacctgagggtgttcttcgtaacagccgcttggtctatttttgcttatacttggctttacataattctttctgtaatttccccaggcgtcgtggaggtgtgggaaggccttctcacgttttttttttttcccatttgcgtcgtgttcgcctgggtcgcagacagacgtctcctcttctacaaatatgtatacaaacggtatagggccggaaagcaacgtggcatgattatcgagcacgaaggcgacagaccttcatctaaaacagagatcgagatggacggtaaggttgtgaacagtcatgtggagaactttcttgacggcgcacttgtgctcgaagtagacgaacgtgaccaggacgatgaagaggccagacgcgaaatggcccgtattctaaaggagcttaagcagaagcaccccgacaaggagattgagcagttaattgagttagccaactaccaggtgctaagccagcagcaaaaatcaagggccttctacagaatccaggctacacgtctgatgacaggtgcgggaaatattttgaaaagacatgccgcagaccaggcaagaaaagctgtctcgatgcatgaagttaatactgaggttactgagaatgatcctgtatcaaagatattttttgagcaaggcacgtatcagtgcttagaaaactgcggtactgtggccttgacgataatcaggcgcggtggcgatctgactaacactgtgtttgttgactttaggacggaagatggtactgccaacgccggaagtgattatgaattcaccgaagggacagtggtattcaagcctggcgacacccaaaaggaaattcgggtgggaataatcgatgacgatatctttgaagaggatgagaactttttggtccatctgtcaaacgtgaaagttagtagtgaggcatctgaagatggcatcctggaggctaaccatgtgtctacgctcgcttgccttggcagtccaagtaccgctaccgtcaccattttcgacgacgaccatgccggtatctttaccttcgaggagcccgtgactcatgttagcgagtcaattgggatcatggaagtgaaggttctgagaacttccggcgctaggggcaatgttattgtgccctacaagactatcgaggggacggctcgcggaggcggagaggacttcgaggatacctgcggggagctcgagttccaaaacgacgaaattgtaaaaatcattacgatcaggatcttcgaccgggaggagtacgagaaggagtgctctttctctttggtacttgaggagcccaagtggatccgacggggtatgaaagggggtttcaccattacggacgagtacgatgacaagcaacccttgacctctaaagaggaggaggagcggagaattgctgagatgggtagacctattttgggcgaacataccaaactggaagttattattgaggagtcatatgaatttaaaagtaccgtagataagttaataaaaaaaacaaacctggctctggtcgtgggcaccaacagctggagggagcagtttatcgaggcaattacagtcagtgccggagaagacgatgatgacgatgagtgcggagaagaaaagctgcccagctgttttgattatgtgatgcattttttaaccgtcttctggaaggtgttgttcgcgttcgtgccccctacagagtactggaatggatgggcatgcttcatcgtgagcatcctgatgatcggactccttacagcatttattggagatctagccagccatttcggatgcaccatcggcctcaaagattccgttacagctgtggttttcgtggctcttggcacatcggtcccagacaccttcgcgtctaaagttgccgctacccaagatcagtacgccgatgccagtattggcaacgtgacaggctccaacgccgtcaatgtttttctgggaatcggcgtggcctggagcatcgcagcaatttaccatgccgcaaacggggaacagtttaaagtcagtcctggaaccttggccttcagcgtaacattattcaccatattcgcttttattaatgtaggtgttctcctctacaggagacgcccagaaattggcggagaactgggcggtccacggacagcaaagttgctgacgtcctgcctgttcgtcctgctgtggttgctatacatattttttagctcactcgaagcctattgtcatataaaaggcttctag

SEQ ID NO: 279078 - DNA, 2814 bp, Artificial Sequence
  derived and/or modified sequence
atgtacaacatgcgtagactatctttgagcccaacattctcaatgggattccatttgttagtgacggtatcactgttattttcccacgtggaccacgtgattgctgagacagagatggagggagaaggaaacgaaaccggtgaatgtacagggtcttactactgcaagaagggagtgatactgcctatttgggagccgcaggacccttctttcggggataagattgccagagccacagtctattttgtggcaatggtgtacatgttcttgggggtcagcatcattgccgatcgctttatgagtagcattgaagttatcacctcacaagagaaggagatcacgatcaagaaaccgaacggagaaacgaccaagactaccgtccgtatttggaacgagaccgtttcaaacctgacactcatggctctgggaagttcagcccctgaaatcctgctaagcgtcatcgaggtctgtggtcacaacttcacggccggagacctgggcccatcaacaattgtcggctcagccgcttttaatatgtttatcatcatcgccctctgcgtctacgtggttcccgatggggaaactagaaagattaagcaccttcgtgtgttcttcgtgacagcggcatggagcatttttgcgtacacctggctgtacatcatcttatcagttatcagtcccggagtggtggaagtgtgggagggtctcctcacctttttcttcttccctatatgcgtggtgttcgcctgggtcgcggacagacggcttttgttctataaatatgtgtacaagcggtatcgggctggcaaacagcggggtatgattattgagcacgagggagaccgaccatcatcaaaaacagaaatcgagatggacggcaaggtcgtcaacagtcatgtggagaactttctggatggtgcgctggtgctagaggtggatgagagagaccaagatgacgaagaggcacgccgagagatggctcgcattctgaaggaactcaagcagaaacatcccgataaggaaattgaacaactgatcgagctggccaattaccaggtgctgagccaacagcagaagagcagggcattctatagaattcaagccacacgcctgatgacaggggctggtaacatcctgaagaggcatgccgcagaccaggccagaaaagccgtctctatgcacgaagtgaatactgaggtgaccgaaaatgatccagtgtccaagatcttcttcgagcaggggacgtaccaatgcctcgaaaactgcggcaccgtcgcactcactataatacggaggggtggcgaccttaccaatactgtctttgtggattttcggaccgaagacggaaccgccaatgctggcagcgactacgaattcactgagggaacggtggtctttaagccgggagacactcagaaagaaattcgggtcggtatcattgacgatgatattttcgaagaggatgaaaattttctggtgcacctcagcaatgtcaaggtcagcagcgaggcatccgaggatgggattctggaggcgaaccacgtctcgactctggcctgtctgggctcacccagtacagctaccgtgaccatatttgatgatgatcacgccggtattttcacgttcgaggaacccgtgacacatgtcagcgagtctatcgggattatggaggtgaaagtcctacgcaccagtggagcacgcggtaatgtgattgtgccatataaaacaatcgaggggacggccaggggaggcggagaagactttgaagacacttgcggagagttagagtttcaaaacgatgaaattgtgaagatcattacgattaggatttttgaccgtgaagagtacgaaaaggagtgtagttttagcctggttctcgaggagcccaagtggattcgtcgaggcatgaagggagggttcacaatcacagatgagtatgatgacaaacaacctttaacatccaaagaagaggaagagcgcagaattgccgagatgggtcggccaatcctgggggagcacaccaaactcgaggtgattatcgaggaaagttatgaattcaagtccacagtggataagctgatcaagaaaaccaacctggccctagtcgtaggaacaaatagctggagagaacagttcatcgaggcaattactgtcagtgctggtgaggacgacgacgacgatgagtgtggcgaagaaaagttaccgagttgttttgattatgtgatgcacttcctgacagtgttctggaaggtcctcttcgctttcgtccctcccactgaatactggaacggctgggcatgttttatcgtgtcaatcttaatgattggcttacttacggctttcattggcgacctggcatcccacttcggctgcaccataggcctgaaggactcagttacagcagtggtcttcgtagctctgggcacctctgtgcctgacacattcgcttcaaaggtggccgctacacaggaccaatatgctgacgcctcaattggcaacgtgacaggcagcaacgccgtcaacgttttcctaggtatcggagtcgcctggtctatcgctgccatataccatgccgcaaacggcgagcagttcaaagtttcacccggaacactcgccttttctgtgaccctgttcacaattttcgccttcataaacgttggggttttactctacaggcgtcggccagaaatcggcggtgaattgggtggaccccgtacagccaaactgctcaccagctgcttgttcgttttgctctggctgctctatatcttcttctcttccctcgaggcatattgtcacatcaaaggtttttag

SEQ ID NO: 279079 - DNA, 2814 bp, Artificial Sequence
  derived and/or modified sequence
atgtacaacatgcgacgtctctcactgtcaccaacgtttagtatgggctttcacctgctggtgacagtgagcctactgttttcccacgtcgatcacgttattgctgagaccgagatggagggcgagggcaacgaaaccggagagtgtacgggctcttattattgtaaaaagggtgtgatcctgcccatctgggagcctcaggaccctagcttcggagataaaatcgcacgtgcaacagtatattttgtcgccatggtatacatgttcttaggtgtgtccatcattgcagaccggttcatgtcctccatagaagtcatcactagtcaggaaaaagagatcactattaagaagccaaacggggaaacaactaagacaactgtgcgcatttggaatgagacagtcagcaatctcacattgatggcactgggttcttccgcccctgaaatactgctgagcgtcattgaggtgtgtgggcataattttaccgctggagatctggggccaagcacaatcgtggggagcgccgcattcaacatgtttatcattattgccctctgtgtgtatgtcgtgccagatggggaaactagaaagattaaacatctgagggtgttcttcgttacagctgcatggagcatcttcgcctacacctggttgtatatcatcctctccgtcatttcaccgggagttgttgaggtgtgggagggtctactgactttctttttctttcctatttgcgtggtgttcgcctgggtcgcagacaggcgcttgcttttttataagtacgtttataagagatatagagcaggcaagcagcgcggtatgataatcgagcacgaaggggacaggccctcgagcaaaacagagatagagatggacggcaaggtggtcaactcgcatgtggaaaacttcctggatggagccctggtgctagaagtcgacgagagggatcaggacgacgaggaggctcggcgtgaaatggcgcgaattctgaaagaattaaaacaaaagcaccccgataaagaaatagagcagctcatcgaactggcaaattatcaggttttgtcacagcagcaaaagagcagagcattctaccggattcaggcaaccaggctgatgactggtgctggcaatatcctaaaacgccacgcagccgaccaggctcggaaagctgtctcaatgcatgaggttaataccgaggtgaccgaaaatgaccctgtgagcaagatcttttttgagcagggcacatatcagtgcctagaaaactgcggtacagtcgctctgacaataatcaggcgaggtggtgatctgacaaacaccgtgtttgtggactttcgtactgaagatggaaccgcaaatgcaggatccgattacgaattcaccgaggggacagtggtgttcaaacctggggatactcagaaagagattcgcgtcggtataattgacgacgatatttttgaggaagacgaaaattttctggtgcatctctcaaacgttaaagtgtcctctgaggcgtccgaagacggaatcctggaggctaatcatgtgagtactctggcatgtctgggctccccttccacagcgaccgtgactatcttcgacgacgaccatgccggtatctttaccttcgaggagcccgtgactcatgtgtcggaatccataggaattatggaagtaaaggtgctgcggaccagcggtgcacggggtaatgtgatcgttccgtacaagacgatcgaaggtacagcgagagggggaggggaagacttcgaggatacctgcggcgagttggagttccaaaacgacgagattgtgaagattataacgatccgcatatttgaccgcgaagagtacgagaaagaatgttccttcagcctggtgctggaagagcccaagtggattcgccgtggaatgaagggagggttcaccataacagatgaatatgacgacaagcagccactcacctctaaggaagaggaggaacgcaggatcgcggaaatgggacgcccaatcctgggcgagcacaccaagcttgaggtgataatcgaagagagctacgagttcaagtccaccgttgataaattaatcaagaaaaccaacttggccctcgtggtcggaaccaattcttggcgcgagcagtttatcgaagccattacagtgtcagcgggtgaagatgatgatgatgacgagtgcggagaagaaaagttgccttcttgtttcgactacgtaatgcactttctgacagtcttttggaaggtactgttcgcctttgtacctccgacagagtattggaacggttgggcctgcttcattgttagtattcttatgatcgggctgctaaccgcattcattggagacctggcgagtcacttcggatgcacaatcggactcaaggactctgtcactgctgtggtgttcgtcgccctggggacaagcgttccagacacttttgcctccaaggttgcggcaacacaggaccagtacgctgatgcctccattggcaatgtgaccggaagcaacgctgtaaatgtattcctcggtatcggcgtagcctggtcgatagccgcaatctaccacgcagccaacggagaacagtttaaagtgtcgccgggtaccctggctttcagtgtgactctttttacgatctttgccttcattaacgtgggtgtgctcttgtacagaaggaggccggagataggcggtgagctgggaggcccacgcacggccaaactcctgacctcctgtctcttcgtgttgctgtggctactttatatttttttttcctcactggaagcttactgtcatatcaaggggttttag

SEQ ID NO: 279080 - DNA, 2814 bp, Artificial Sequence
  derived and/or modified sequence
atgtacaatatgaggcgcctctcactgtcccctacattcagcatgggattccaccttctggtgaccgtatctctactgttttcccatgtcgatcacgtgatagctgagacggagatggaaggtgagggcaatgaaaccggtgagtgtactggttcatactactgcaaaaagggggtcattctgccaatctgggagcctcaggaccccagcttcggggataagatcgctagagctaccgtatactttgtggcgatggtttacatgtttctgggcgtgtctattatagcagacagattcatgagctccatagaagtgatcacttcgcaggaaaaggagattacaatcaaaaaacctaacggagaaactacgaaaaccaccgtgagaatatggaatgagacagtgtccaacctgacattaatggcccttgggtcttccgctccagagatattgctgtctgtcatagaggtgtgcgggcacaattttaccgcaggagacttaggccctagcactattgttggcagtgccgcattcaacatgttcataatcatcgctctgtgtgtgtacgtggtaccggacggggagacccggaagatcaagcacttacgggtgttctttgtgacagctgcatggagtatttttgcttatacctggctgtacatcattctttctgttatatccccgggagttgtcgaggtctgggaaggccttttgaccttcttcttcttccctatctgtgtggtcttcgcctgggtggccgacagaaggttgctgttttacaagtacgtttataaaaggtatcgagcagggaaacaaaggggaatgattatagagcatgagggagacagaccttcttcaaaaacagaaattgaaatggatggaaaagtcgtcaactcgcacgtggagaacttcctggacggtgctctggtcctggaagtagatgagcgcgaccaggacgacgaagaagccaggagagaaatggctcgtatcctgaaggagctgaagcagaagcaccccgacaaagagatcgagcagctgatagaactggccaactatcaggtgttaagccaacagcagaagagcagggccttttaccggatccaggccacaagactgatgacgggcgcagggaacattctgaagcggcatgctgctgaccaggctcgcaaggcagtgagtatgcacgaggtgaacacagaggttaccgagaatgaccccgtcagtaaaatcttcttcgaacaggggacttatcagtgtttagagaattgcggcacggtggcgttgaccatcatccgcagaggaggggacctgactaataccgtgttcgtcgatttccgtaccgaagatggcacggcaaatgccggatcagactatgagtttaccgaaggaactgtggttttcaagccgggagacactcagaaagaaatacgcgtgggcatcatagacgacgatatatttgaggaggacgagaacttcctggtgcatctgagcaacgtcaaagtctccagcgaggctagtgaggacggcattctcgaggcaaatcacgtgagtacactggcctgcctggggtctcccagcactgcaaccgtcactattttcgacgatgaccatgctggcatcttcacctttgaagaaccagtaacacatgtgtctgagtcaatcggtataatggaagtcaaggtattacgtacgtcaggagctaggggtaatgtcattgttccctataagacaatcgaaggaaccgcacgagggggaggtgaagatttcgaggacacatgcggggagctggaattccagaacgacgaaatcgtgaagattataaccattcgcattttcgatagggaggaatacgagaaggaatgcagcttctcactcgttctggaagaaccaaaatggatccgcagagggatgaaaggcggattcactattaccgatgaatatgacgataaacagcctctcaccagcaaggaagaagaggagaggagaatcgctgaaatgggacggcctatactcggagagcacacaaagctggaggtgattatcgaggagagttacgagtttaagtctaccgtagacaaactaattaaaaaaaccaacctggctctggttgtgggcacaaattcatggagagaacagttcattgaagccattacggtgtctgcgggagaggacgacgatgatgacgagtgcggtgaggaaaagctgccatcttgtttcgattacgttatgcatttccttaccgtgttctggaaggtgcttttcgccttcgtgcctccaactgaatactggaacggttgggcatgctttattgtgtccatactgatgataggactactgaccgcatttatcggcgacctcgctagccactttggatgcacgatcggccttaaggattcagtgactgcggtagttttcgttgcgctggggacaagcgtccccgacacctttgcctcaaaggttgcagctacgcaggaccagtacgctgacgccagcatcggtaatgtaacgggaagcaatgccgtgaatgtgttcctcggaatcggggtcgcctggtccatagccgctatctaccacgccgctaatggcgaacagtttaaagtctcacctgggacgttagctttctccgtcacattgtttacaatttttgcgttcatcaatgtgggtgtcttgctatacagacggagaccagagatcggcggagaacttgggggacctcgcacggcaaagctgctgacttcttgcttatttgtcctgctgtggctcctgtacatctttttctcttccctggaggcttactgccacatcaagggattttag

SEQ ID NO: 279081 - DNA, 2814 bp, Artificial Sequence
  derived and/or modified sequence
atgtacaacatgagaagactgagcttgagccctactttctccatgggctttcatcttctagtaaccgtgtcccttctgttttcacacgtagatcacgtaatagcagagacagagatggagggtgaagggaacgaaaccggagaatgcaccgggtcctattattgtaaaaaaggggtcattctccccatctgggaacctcaggatccttcctttggtgataagatcgccagagcaaccgtgtacttcgtagccatggtgtacatgttccttggagtcagtataattgctgaccgttttatgtcaagcatcgaggtcataactagtcaggagaaagagatcacgatcaaaaagcccaacggcgagaccactaaaacaactgtaaggatctggaatgagactgtaagcaaccttacattgatggccctgggatcgtcagcacctgagatactcctatccgtgattgaggtctgcggccacaactttacagcaggggatctcgggccttcaaccattgtcgggtctgctgcatttaatatgtttatcattattgctctatgtgtgtatgtggtaccagatggcgagacacgcaagatcaagcatctgagggtgttcttcgtgactgctgcgtggtcaatttttgcgtatacctggctgtatattatactttccgtgatatcccccggagtggtggaagtgtgggaaggcctcctaacgtttttcttctttccaatctgcgtcgtgttcgcctgggttgccgaccgcagactgctcttttataagtacgtgtataagagatatagggccggtaaacagcggggtatgattattgaacatgaaggcgacaggccttcctccaaaacagaaattgagatggacggtaaagtagtgaattcccacgtcgaaaactttctggacggcgcattggttctggaagtggatgaacgggatcaagatgatgaggaagcacgccgagagatggctagaatcctgaaagagctgaaacagaagcatccagataaagagatcgagcaactgatcgaactggccaattaccaggtcctgtcccagcaacaaaagagccgcgcattttaccgcattcaggctacaaggttgatgactggggctggtaacattcttaagagacacgcggctgatcaggcaaggaaggcagtgagcatgcacgaggtcaacaccgaggtaactgagaacgatccggtatctaagatctttttcgagcagggtacttaccaatgcttggaaaactgcggcaccgtcgctcttaccatcatcaggcgcggtggggacctgacaaatacagtgtttgtggacttccgcaccgaagatggcacggccaatgcaggctccgattatgagtttactgagggaaccgtggtcttcaagccgggagacacacaaaaagaaatccgggtaggtataatcgacgacgatatttttgaggaggacgagaatttcctggtccatctcagcaacgttaaggtctccagcgaggcctcagaagatgggatcctggaggcgaatcatgtcagcactctggcatgtctgggatccccttcgacagctacagtgacaatctttgatgatgaccacgcaggcattttcacattcgaagaaccagtgactcatgtgagtgaatcaattggcatcatggaagtcaaggtccttcggacttctggcgcaaggggcaatgtgatcgtgccctacaagaccatagaagggacagccaggggtggcggagaggactttgaagacacgtgtggcgaactggaatttcagaatgacgaaattgttaaaataattaccattcgaatttttgaccgcgaggaatatgaaaaagaatgcagtttcagcttggtgctggaggagcccaagtggatccgacgcggtatgaaagaagggttttgctttaccgatgagtacgatgacaagcagcccctaacctcaaaggaggaagaggagcgaagaattgctgagatgggacgccctatcttgggagagcacacgaagcttgaggttattatcgaggaatcttacgagtttaagtcaaccgttgacaaactgataaagaaaactaatctggctttggtggtgggcactaactcatggcgcgaacagtttattgaagccattaccgtgtcagccggagaagacgacgacgatgacgagtgcggcgaggagaagctccccagttgcttcgactatgtgatgcattttctcaccgttttttggaaggtgctgttcgccttcgtcccaccaacagagtactggaacggatgggcttgttttattgtgagcattctcatgatcggccttctcacggctttcattggcgacctcgctagccacttcggttgtaccattggcttaaaggacagtgtcaccgccgttgtcttcgttgccctgggaaccagtgtgcccgatacctttgcttctaaagtggctgccacacaggatcagtacgccgacgcctctatcgggaatgtcacaggcagcaacgccgtcaacgtgttccttggtataggcgtcgcgtggtcgattgcagccatttaccatgccgctaacggcgaacaatttaaagtgagcccgggaacattggccttctccgtaaccctttttacaattttcgcatttatcaatgtgggggtgcttctgtatcgcaggcgaccagagattggcggagagttggggggaccaagaactgctaaacttttgacatcgtgcctctttgtgctgctatggctgctatacatattcttctcatccctggaggcctattgccatatcaaggggttctag

SEQ ID NO: 279082 - DNA, 3065 bp, Artificial Sequence
  derived and/or modified sequence
ctttctggtaaatttagagaaggcatcatactgggatcttttttcacatccagcccatgcggactgagcagccaaagcttgacagagtaggttgtgacagttggaagtgtcatgtacaacatgcggcgattaagtctttcacccaccttttcaatgggatttcatctgttagttactgtgagtctcttattttcccatgtggaccatgtaattgctgagacagaaatggaaggagaaggaaatgaaactggtgaatgtactggatcatattactgtaagaaaggggtgattttgcccatttgggaaccccaagacccttcttttggggacaaaattgctagagctactgtgtattttgtggccatggtctacatgtttcttggagtctctatcatagctgatcggttcatgtcctctatagaagtcatcacatctcaagaaaaagaaataaccataaagaaacccaatggagagaccaccaagacaactgtgaggatctggaatgaaacagtttctaacctgaccttgatggccctgggatcttctgctcctgagattctcctttcagtaattgaagtgtgtggccataacttcactgcaggagacctcggtcctagcaccatcgtgggaagtgctgcattcaatatgttcatcattattgcactctgtgtttatgtggtgcctgacggagagacaaggaagattaagcatttgcgtgtcttctttgtgacagcagcctggagcatctttgcctacacctggctttacattattttgtctgtcatatctcctggtgttgtggaggtctgggaaggtttgcttactttcttcttctttcccatctgtgttgtgttcgcttgggtagcggataggagacttctgttttacaagtatgtctacaagaggtatcgagctggcaagcagagggggatgattattgaacatgaaggagacaggccatcttctaagactgaaattgaaatggacgggaaagtggtcaattctcatgttgaaaatttcttagatggtgctctggttctggaggtggatgagagggaccaagatgatgaagaagctaggcgagaaatggctaggattctgaaggaacttaagcagaagcatccagataaagaaatagagcaattaatagaattagctaactaccaagtcctaagtcagcagcaaaaaagtagagcattttatcgcattcaagctactcgcctcatgactggagctggcaacattttaaagaggcatgcagctgaccaagcaaggaaggctgtcagcatgcacgaggtcaacactgaagtgactgaaaatgaccctgttagtaagatcttctttgaacaagggacatatcagtgtctggagaactgtggtactgtggcccttaccattatccgcagaggtggtgatttgactaacactgtgtttgttgacttcagaacagaggatggcacagcaaatgctgggtctgattatgaatttactgaaggaactgtggtgtttaagcctggtgatacccagaaggaaatcagagtgggtatcatagatgatgatatctttgaggaggatgaaaatttccttgtgcatctcagcaatgtcaaagtatcttctgaagcttcagaagatggcatactggaagccaatcatgtttctacacttgcttgcctcggatctccctccactgccactgtaactatttttgatgatgaccacgcaggcatttttacttttgaggaacctgtgactcatgtgagtgagagcattggcatcatggaggtgaaagtattgagaacatctggagctcgaggaaatgttatcgttccatataaaaccatcgaagggactgccagaggtggaggggaggattttgaggacacttgtggagagctcgaattccagaatgatgaaattgtgaagatcattaccattagaatatttgaccgtgaggaatatgagaaagagtgcagtttctcccttgtgcttgaggaaccaaaatggataagaagaggaatgaaaggtggcttcacaataacagacgaatatgatgacaagcagccactgaccagcaaagaggaagaggagaggcgcattgcagaaatggggcgccccatcctgggagagcacaccaagttggaagtgatcattgaagaatcctatgaattcaagagtactgtggacaaactcattaagaagacaaacctggcccttgtggttgggactaacagctggagagaacagttcattgaagctatcactgtcagtgctggggaagatgatgacgacgatgaatgtggggaagagaagctgccctcctgtttcgattacgtgatgcactttctgactgtgttctggaaggtcctgtttgccttcgtcccccctactgaatactggaatggctgggcgtgtttcattgtctccatcctcatgattggcctactgacagctttcattggagacctggcttcccactttggctgcaccattggcctgaaagattctgtgactgcagtcgtgttcgtcgcacttggaacatcagtgccagacacatttgccagcaaagtggcagccacccaggaccagtatgcagacgcctccataggtaacgtcacgggcagcaacgcggtgaatgtcttcctgggaatcggtgtggcctggtccatcgctgccatctaccacgcagccaatggggaacagttcaaagtgtcccctggcacactagctttctctgtcactctcttcaccatttttgctttcatcaatgtgggggtgctgctgtatcggcggaggccagaaatcggaggtgagctgggtgggccccggactgccaagctcctcacatcctgcctctttgtgctcctatggctcttgtacattttcttctcctccctggaggcctactgccacataaaaggcttctaaaggaactatcagatatagtaaatttatatatatacatatatatacataaaaattatgtataatggacagaggaaactgacatttgtcatgttcacttacctgctgatggaatccagcttcaagagcatactctgtactag

SEQ ID NO: 279083 - DNA, 2965 bp, Artificial Sequence
  derived and/or modified sequence
tcttggttgctctcaccatgtgatacaccagctccacctttgccttctgctgtgactgtaagtttcctgaggcctctccagaagcagattctagcaccatgctgctcgcacagccttcaaaacttaggttgtgacagttggaagtgtcatgtacaacatgcggcgattaagtctttcacccaccttttcaatgggatttcatctgttagttactgtgagtctcttattttcccatgtggaccatgtaattgctgagacagaaatggaaggagaaggaaatgaaactggtgaatgtactggatcatattactgtaagaaaggggtgattttgcccatttgggaaccccaagacccttcttttggggacaaaattgctagagctactgtgtattttgtggccatggtctacatgtttcttggagtctctatcatagctgatcggttcatgtcctctatagaagtcatcacatctcaagaaaaagaaataaccataaagaaacccaatggagagaccaccaagacaactgtgaggatctggaatgaaacagtttctaacctgaccttgatggccctgggatcttctgctcctgagattctcctttcagtaattgaagtgtgtggccataacttcactgcaggagacctcggtcctagcaccatcgtgggaagtgctgcattcaatatgttcatcattattgcactctgtgtttatgtggtgcctgacggagagacaaggaagattaagcatttgcgtgtcttctttgtgacagcagcctggagcatctttgcctacacctggctttacattattttgtctgtcatatctcctggtgttgtggaggtctgggaaggtttgcttactttcttcttctttcccatctgtgttgtgttcgcttgggtagcggataggagacttctgttttacaagtatgtctacaagaggtatcgagctggcaagcagagggggatgattattgaacatgaaggagacaggccatcttctaagactgaaattgaaatggacgggaaagtggtcaattctcatgttgaaaatttcttagatggtgctctggttctggaggtggatgagagggaccaagatgatgaagaagctaggcgagaaatggctaggattctgaaggaacttaagcagaagcatccagataaagaaatagagcaattaatagaattagctaactaccaagtcctaagtcagcagcaaaaaagtagagcattttatcgcattcaagctactcgcctcatgactggagctggcaacattttaaagaggcatgcagctgaccaagcaaggaaggctgtcagcatgcacgaggtcaacactgaagtgactgaaaatgaccctgttagtaagatcttctttgaacaagggacatatcagtgtctggagaactgtggtactgtggcccttaccattatccgcagaggtggtgatttgactaacactgtgtttgttgacttcagaacagaggatggcacagcaaatgctgggtctgattatgaatttactgaaggaactgtggtgtttaagcctggtgatacccagaaggaaatcagagtgggtatcatagatgatgatatctttgaggaggatgaaaatttccttgtgcatctcagcaatgtcaaagtatcttctgaagcttcagaagatggcatactggaagccaatcatgtttctacacttgcttgcctcggatctccctccactgccactgtaactatttttgatgatgaccacgcaggcatttttacttttgaggaacctgtgactcatgtgagtgagagcattggcatcatggaggtgaaagtattgagaacatctggagctcgaggaaatgttatcgttccatataaaaccatcgaagggactgccagaggtggaggggaggattttgaggacacttgtggagagctcgaattccagaatgatgaaattgtgaagatcattaccattagaatatttgaccgtgaggaatatgagaaagagtgcagtttctcccttgtgcttgaggaaccaaaatggataagaagaggaatgaaaggtggcttcacaataacagacgaatatgatgacaagcagccactgaccagcaaagaggaagaggagaggcgcattgcagaaatggggcgccccatcctgggagagcacaccaagttggaagtgatcattgaagaatcctatgaattcaagagtactgtggacaaactcattaagaagacaaacctggcccttgtggttgggactaacagctggagagaacagttcattgaagctatcactgtcagtgctggggaagatgatgacgacgatgaatgtggggaagagaagctgccctcctgtttcgattacgtgatgcactttctgactgtgttctggaaggtcctgtttgccttcgtcccccctactgaatactggaatggctgggcgtgtttcattgtctccatcctcatgattggcctactgacagctttcattggagacctggcttcccactttggctgcaccattggcctgaaagattctgtgactgcagtcgtgttcgtcgcacttggaacatcagtgccagacacatttgccagcaaagtggcagccacccaggaccagtatgcagacgcctccataggtaacgtcacgggcagcaacgcggtgaatgtcttcctgggaatcggtgtggcctggtccatcgctgccatctaccacgcagccaatggggaacagttcaaagtgtcccctggcacactagctttctctgtcactctcttcaccatttttgctttcatcaatgtgggggtgctgctgtatcggcggaggccagaaatcggaggtgagctgggtgggccccggactgccaagctcctcacatcctgcctctttgtgctcctatggctcttgtacattttcttctcctccctggaggcctactgccacataaaaggcttctaaagg

SEQ ID NO: 279084 - DNA, 2814 bp, Artificial Sequence
  derived and/or modified sequence
atgtacaacatgcggcgattaagtctttcacccaccttttcaatgggatttcatctgttagttactgtgagtctcttattttcccatgtggaccatgtaattgctgagacagaaatggaaggagaaggaaatgaaactggtgaatgtactggatcatattactgtaagaaaggggtgattttgcccatttgggaaccccaagacccttcttttggggacaaaattgctagagctactgtgtattttgtggccatggtctacatgtttcttggagtctctatcatagctgatcggttcatgtcctctatagaagtcatcacatctcaagaaaaagaaataaccataaagaaacccaatggagagaccaccaagacaactgtgaggatctggaatgaaacagtttctaacctgaccttgatggccctgggatcttctgctcctgagattctcctttcagtaattgaagtgtgtggccataacttcactgcaggagacctcggtcctagcaccatcgtgggaagtgctgcattcaatatgttcatcattattgcactctgtgtttatgtggtgcctgacggagagacaaggaagattaagcatttgcgtgtcttctttgtgacagcagcctggagcatctttgcctacacctggctttacattattttgtctgtcatatctcctggtgttgtggaggtctgggaaggtttgcttactttcttcttctttcccatctgtgttgtgttcgcttgggtagcggataggagacttctgttttacaagtatgtctacaagaggtatcgagctggcaagcagagggggatgattattgaacatgaaggagacaggccatcttctaagactgaaattgaaatggacgggaaagtggtcaattctcatgttgaaaatttcttagatggtgctctggttctggaggtggatgagagggaccaagatgatgaagaagctaggcgagaaatggctaggattctgaaggaacttaagcagaagcatccagataaagaaatagagcaattaatagaattagctaactaccaagtcctaagtcagcagcaaaaaagtagagcattttatcgcattcaagctactcgcctcatgactggagctggcaacattttaaagaggcatgcagctgaccaagcaaggaaggctgtcagcatgcacgaggtcaacactgaagtgactgaaaatgaccctgttagtaagatcttctttgaacaagggacatatcagtgtctggagaactgtggtactgtggcccttaccattatccgcagaggtggtgatttgactaacactgtgtttgttgacttcagaacagaggatggcacagcaaatgctgggtctgattatgaatttactgaaggaactgtggtgtttaagcctggtgatacccagaaggaaatcagagtgggtatcatagatgatgatatctttgaggaggatgaaaatttccttgtgcatctcagcaatgtcaaagtatcttctgaagcttcagaagatggcatactggaagccaatcatgtttctacacttgcttgcctcggatctccctccactgccactgtaactatttttgatgatgaccacgcaggcatttttacttttgaggaacctgtgactcatgtgagtgagagcattggcatcatggaggtgaaagtattgagaacatctggagctcgaggaaatgttatcgttccatataaaaccatcgaagggactgccagaggtggaggggaggattttgaggacacttgtggagagctcgaattccagaatgatgaaattgtgaagatcattaccattagaatatttgaccgtgaggaatatgagaaagagtgcagtttctcccttgtgcttgaggaaccaaaatggataagaagaggaatgaaaggtggcttcacaataacagacgaatatgatgacaagcagccactgaccagcaaagaggaagaggagaggcgcattgcagaaatggggcgccccatcctgggagagcacaccaagttggaagtgatcattgaagaatcctatgaattcaagagtactgtggacaaactcattaagaagacaaacctggcccttgtggttgggactaacagctggagagaacagttcattgaagctatcactgtcagtgctggggaagatgatgacgacgatgaatgtggggaagagaagctgccctcctgtttcgattacgtgatgcactttctgactgtgttctggaaggtcctgtttgccttcgtcccccctactgaatactggaatggctgggcgtgtttcattgtctccatcctcatgattggcctactgacagctttcattggagacctggcttcccactttggctgcaccattggcctgaaagattctgtgactgcagtcgtgttcgtcgcacttggaacatcagtgccagacacatttgccagcaaagtggcagccacccaggaccagtatgcagacgcctccataggtaacgtcacgggcagcaacgcggtgaatgtcttcctgggaatcggtgtggcctggtccatcgctgccatctaccacgcagccaatggggaacagttcaaagtgtcccctggcacactagctttctctgtcactctcttcaccatttttgctttcatcaatgtgggggtgctgctgtatcggcggaggccagaaatcggaggtgagctgggtgggccccggactgccaagctcctcacatcctgcctctttgtgctcctatggctcttgtacattttcttctcctccctggaggcctactgccacataaaaggcttctaa

SEQ ID NO: 279085 - DNA, 6111 bp, Artificial Sequence
  derived and/or modified sequence
ggcgctgcacggtagtcagcccgccgccgccgcctgctttgtgcttcccacagaagatgggagcgacctcttcctgatcgggagctgtttaaaaggagggagtgcgccgtattttctactagcgtggaggaacggaggaagaatccattcacactccccaaaccagtaggttgtgacagttggaagtgtcatgtacaacatgcggcgattaagtctttcacccaccttttcaatgggatttcatctgttagttactgtgagtctcttattttcccatgtggaccatgtaattgctgagacagaaatggaaggagaaggaaatgaaactggtgaatgtactggatcatattactgtaagaaaggggtgattttgcccatttgggaaccccaagacccttcttttggggacaaaattgctagagctactgtgtattttgtggccatggtctacatgtttcttggagtctctatcatagctgatcggttcatgtcctctatagaagtcatcacatctcaagaaaaagaaataaccataaagaaacccaatggagagaccaccaagacaactgtgaggatctggaatgaaacagtttctaacctgaccttgatggccctgggatcttctgctcctgagattctcctttcagtaattgaagtgtgtggccataacttcactgcaggagacctcggtcctagcaccatcgtgggaagtgctgcattcaatatgttcatcattattgcactctgtgtttatgtggtgcctgacggagagacaaggaagattaagcatttgcgtgtcttctttgtgacagcagcctggagcatctttgcctacacctggctttacattattttgtctgtcatatctcctggtgttgtggaggtctgggaaggtttgcttactttcttcttctttcccatctgtgttgtgttcgcttgggtagcggataggagacttctgttttacaagtatgtctacaagaggtatcgagctggcaagcagagggggatgattattgaacatgaaggagacaggccatcttctaagactgaaattgaaatggacgggaaagtggtcaattctcatgttgaaaatttcttagatggtgctctggttctggaggtggatgagagggaccaagatgatgaagaagctaggcgagaaatggctaggattctgaaggaacttaagcagaagcatccagataaagaaatagagcaattaatagaattagctaactaccaagtcctaagtcagcagcaaaaaagtagagcattttatcgcattcaagctactcgcctcatgactggagctggcaacattttaaagaggcatgcagctgaccaagcaaggaaggctgtcagcatgcacgaggtcaacactgaagtgactgaaaatgaccctgttagtaagatcttctttgaacaagggacatatcagtgtctggagaactgtggtactgtggcccttaccattatccgcagaggtggtgatttgactaacactgtgtttgttgacttcagaacagaggatggcacagcaaatgctgggtctgattatgaatttactgaaggaactgtggtgtttaagcctggtgatacccagaaggaaatcagagtgggtatcatagatgatgatatctttgaggaggatgaaaatttccttgtgcatctcagcaatgtcaaagtatcttctgaagcttcagaagatggcatactggaagccaatcatgtttctacacttgcttgcctcggatctccctccactgccactgtaactatttttgatgatgaccacgcaggcatttttacttttgaggaacctgtgactcatgtgagtgagagcattggcatcatggaggtgaaagtattgagaacatctggagctcgaggaaatgttatcgttccatataaaaccatcgaagggactgccagaggtggaggggaggattttgaggacacttgtggagagctcgaattccagaatgatgaaattgtgaagatcattaccattagaatatttgaccgtgaggaatatgagaaagagtgcagtttctcccttgtgcttgaggaaccaaaatggataagaagaggaatgaaaggtggcttcacaataacagacgaatatgatgacaagcagccactgaccagcaaagaggaagaggagaggcgcattgcagaaatggggcgccccatcctgggagagcacaccaagttggaagtgatcattgaagaatcctatgaattcaagagtactgtggacaaactcattaagaagacaaacctggcccttgtggttgggactaacagctggagagaacagttcattgaagctatcactgtcagtgctggggaagatgatgacgacgatgaatgtggggaagagaagctgccctcctgtttcgattacgtgatgcactttctgactgtgttctggaaggtcctgtttgccttcgtcccccctactgaatactggaatggctgggcgtgtttcattgtctccatcctcatgattggcctactgacagctttcattggagacctggcttcccactttggctgcaccattggcctgaaagattctgtgactgcagtcgtgttcgtcgcacttggaacatcagtgccagacacatttgccagcaaagtggcagccacccaggaccagtatgcagacgcctccataggtaacgtcacgggcagcaacgcggtgaatgtcttcctgggaatcggtgtggcctggtccatcgctgccatctaccacgcagccaatggggaacagttcaaagtgtcccctggcacactagctttctctgtcactctcttcaccatttttgctttcatcaatgtgggggtgctgctgtatcggcggaggccagaaatcggaggtgagctgggtgggccccggactgccaagctcctcacatcctgcctctttgtgctcctatggctcttgtacattttcttctcctccctggaggcctactgccacataaaaggcttctaaaggaactatcagatatagtaaatttatatatatacatatatatacataaaaattatgtataatggacagaggaaactgacatttgtcatgttcacttacctgctgatggaatccagcttcaagagcatactctgtactagggccgaagtaaaaaaccatcacctcccattcccaggggcatcatcatgttcaacaaggcatggaggcagggccatctttgcagctcagtctagaagggctgcactctctccaggttgataaatccttaaggctttgatttgttttgtttttggttttgttttcagtggagctggggaggtagttaatgtttggctttatttttgttattttgttttgttttgtttttttgggagagtcagggttgttgcttttctttgtggaaagtgaaaccatccaaatgtaaatgggttttggtaaaaatttaaatcattagtattccccctcacctcccccaatcactttaaaacttattttggattaagaaaaaatctgggcatggaagaagaaagaagcatgtcttcatcgtattaccaaagttcatgcttatctccggaatgtgagtggaggtgaagctgcctccaagaagaagcataaaagtggaatggagccaggaaatccgatggttctagaaatagtctgatatttaaacatgtgatacctggcagtctcgtttaacaggtacaaggaaaacgtgcctagattcccaggaacgtgcaaaatcctttctttcttatctctttagctctggactgtgattggcaaggtccttcttccagcattcagcccagctaagcccccaggtgccccatcccaaccctgttcctcctgtccacctgccatcccctatgcaaacagtaagaataaccccattcaaaaagcacatcatcgttttccatttgcattaacatgtgtctcagtcccatgttgccgttgcttgggattgtctgtcagttttattttcaaaggcatccatggcttgcacaatcctgttccagtcatgactgaacatttgctccttcttcatgtgccgttcggaaatgttgttgtgatacctgttacacagtgcatggtgaaaaacaaataaaacaaaacaaagagtatctgtatatagtagagtatagtacatactgttctcccatttggcaatgttgattggacattgaagacataagtgagttttcttttcacctgagttgttacttttgtgctgttattgagtttgattaattactagggataaaaggagaaaatggattattgttcacggttctgcacattcatttctaagaagcaataactgtcatgtggggagaagttaaagctattgagaggatagcaggcaaactacaaagatcttcatggaaaattagccatgtggaacacatcagaggcctctaaaaatcacccattaattcaggaaggccaaggagaaaggccttatagagacgttgatatgttggatgtgcctaggctttcagagccaccctttccacaacacccctccctgcaaagtatttatttcacatctgcactgtctggcacagatggtagatagtgctggtttgttcattttatttttttacttaaaaggctattttgagccctgtttctttcactgtccagtctagtcctctttgattatatcagtagttgctgagtaagaaagaagccagggtgaccaacgggcctttaaaagtgttgtctcctctacttatgctgaaagagaaggcaattaaataagactagtacctcccaggaggattggactgggatatttttaaccctttaaaaagaatagctgtttctatgttaaaataccaaagaacatggataaacccaacattccaaagtagtgagtccactaatgagaaaaataatagaatgactttggtcacctctcggagacttctgtgtctataaggaatcccaggctggagacattcctagccctctgtattgattcaaaaatacttaataaattaaagctgttgagacttattttttcttctgtcactcagtaaccatgatccttcctcatttaataaacatttggtgactgaatgagtaattaaatgctggttacccacttaatgtgccaggtagtatgatactttctggggactaagccatgaacaaaacagtctagatccctgccctcagaagggttacagtttatgtgattactattttcatgagtaaaagtgaagaaagccatatggaaagatttttatcttgcaagaaaaaacaattatgaaactcttttaacataaacacactgaaactgtatcaaagcaattgtccaaattgtatttatacccaagaatttctttaactaagagagcataaggcatatgtttggaaaaccaccctctttatctttgaccgacttgcagataaatatatctctccattttaaaccaagaagggcaatcatgttggtgatccagatcactgagaaagcccagtgtatcccatcttttatctttgttggcaatggaacttttctatggcccacactttacaattctttgtcattctaacccatccttcccatccttattttttttttttttgagaattgctaaatggaaagctagcctagaagcaccaagtaaatatattcaaggaatataagttgtttaaacattagaaaaatttttgcactcattttttagctgtattaggaatgtcaataatcctgtagcaaattttcacagagaactttaagaaattcttgcattggtcgatttcaatttgaaagctttttggtttgtttgctttttaaattttcatgttctaggaaactatgattctggttgttcaggattgttattattatagttgtgtaaaattattttattttgtgtgtattgtgcacagcttggggggggggcgggaaatgcactaattgtgctcttccttataaatggtacatattactgacacagacaaataaagtttctaattgtttctgatttaatcactagtgatacagcatattctgtatgaaatgttttctcctttctcattgtcatctacttcattttttgttttcatgttttgaagaaataaaaaccaaaatggta

SEQ ID NO: 279086 - DNA, 2814 bp, Artificial Sequence
  derived and/or modified sequence
atgtacaacatgcggcgattaagtctttcacccaccttttcaatgggatttcatctgttagttactgtgagtctcttattttcccatgtggaccatgtaattgctgagacagaaatggaaggagaaggaaatgaaactggtgaatgtactggatcatattactgtaagaaaggggtgattttgcccatttgggaaccccaagacccttcttttggggacaaaattgctagagctactgtgtattttgtggccatggtctacatgtttcttggagtctctatcatagctgatcggttcatgtcctctatagaagtcatcacatctcaagaaaaagaaataaccataaagaaacccaatggagagaccaccaagacaactgtgaggatctggaatgaaacagtttctaacctgaccttgatggccctgggatcttctgctcctgagattctcctttcagtaattgaagtgtgtggccataacttcactgcaggagacctcggtcctagcaccatcgtgggaagtgctgcattcaatatgttcatcattattgcactctgtgtttatgtggtgcctgacggagagacaaggaagattaagcatttgcgtgtcttctttgtgacagcagcctggagcatctttgcctacacctggctttacattattttgtctgtcatatctcctggtgttgtggaggtctgggaaggtttgcttactttcttcttctttcccatctgtgttgtgttcgcttgggtagcggataggagacttctgttttacaagtatgtctacaagaggtatcgagctggcaagcagagggggatgattattgaacatgaaggagacaggccatcttctaagactgaaattgaaatggacgggaaagtggtcaattctcatgttgaaaatttcttagatggtgctctggttctggaggtggatgagagggaccaagatgatgaagaagctaggcgagaaatggctaggattctgaaggaacttaagcagaagcatccagataaagaaatagagcaattaatagaattagctaactaccaagtcctaagtcagcagcaaaaaagtagagcattttatcgcattcaagctactcgcctcatgactggagctggcaacattttaaagaggcatgcagctgaccaagcaaggaaggctgtcagcatgcacgaggtcaacactgaagtgactgaaaatgaccctgttagtaagatcttctttgaacaagggacatatcagtgtctggagaactgtggtactgtggcccttaccattatccgcagaggtggtgatttgactaacactgtgtttgttgacttcagaacagaggatggcacagcaaatgctgggtctgattatgaatttactgaaggaactgtggtgtttaagcctggtgatacccagaaggaaatcagagtgggtatcatagatgatgatatctttgaggaggatgaaaatttccttgtgcatctcagcaatgtcaaagtatcttctgaagcttcagaagatggcatactggaagccaatcatgtttctacacttgcttgcctcggatctccctccactgccactgtaactatttttgatgatgaccacgcaggcatttttacttttgaggaacctgtgactcatgtgagtgagagcattggcatcatggaggtgaaagtattgagaacatctggagctcgaggaaatgttatcgttccatataaaaccatcgaagggactgccagaggtggaggggaggattttgaggacacttgtggagagctcgaattccagaatgatgaaattgtgaagatcattaccattagaatatttgaccgtgaggaatatgagaaagagtgcagtttctcccttgtgcttgaggaaccaaaatggataagaagaggaatgaaagaaggattctgtttcacagacgaatatgatgacaagcagccactgaccagcaaagaggaagaggagaggcgcattgcagaaatggggcgccccatcctgggagagcacaccaagttggaagtgatcattgaagaatcctatgaattcaagagtactgtggacaaactcattaagaagacaaacctggcccttgtggttgggactaacagctggagagaacagttcattgaagctatcactgtcagtgctggggaagatgatgacgacgatgaatgtggggaagagaagctgccctcctgtttcgattacgtgatgcactttctgactgtgttctggaaggtcctgtttgccttcgtcccccctactgaatactggaatggctgggcgtgtttcattgtctccatcctcatgattggcctactgacagctttcattggagacctggcttcccactttggctgcaccattggcctgaaagattctgtgactgcagtcgtgttcgtcgcacttggaacatcagtgccagacacatttgccagcaaagtggcagccacccaggaccagtatgcagacgcctccataggtaacgtcacgggcagcaacgcggtgaatgtcttcctgggaatcggtgtggcctggtccatcgctgccatctaccacgcagccaatggggaacagttcaaagtgtcccctggcacactagctttctctgtcactctcttcaccatttttgctttcatcaatgtgggggtgctgctgtatcggcggaggccagaaatcggaggtgagctgggtgggccccggactgccaagctcctcacatcctgcctctttgtgctcctatggctcttgtacattttcttctcctccctggaggcctactgccacataaaaggcttctaa

SEQ ID NO: 279087 - protein, 1318 aa, Artificial Sequence
  derived and/or modified sequence
MQAQQLPYEFFSEENAPKWRGLLVPALKKVQGQVHPTLESNDDALQYVEELILQLLNMLCQAQPRSASDVEERVQKSFPHPIDKWAIADAQSAIEKRKRRNPLSLPVEKIHPLLKEVLGYKIDHQVSVYIVAVLEYISADILKLVGNYVRNIRHYEITKQDIKVAMCADKVLMDMFHQDVEDINILSLTDEEPSTSGEQTYYDLVKAFMAEIRQYIRELNLIIKVFREPFVSNSKLFSANDVENIFSRIVDIHELSVKLLGHIEDTVEMTDEGSPHPLVGSCFEDLAEELAFDPYESYARDILRPGFHDRFLSQLSKPGAALYLQSIGEGFKEAVQYVLPRLLLAPVYHCLHYFELLKQLEEKSEDQEDKECLKQAITALLNVQSGMEKICSKSLAKRRLSESACRFYSQQMKGKQLAIKKMNEIQKNIDGWEGKDIGQCCNEFIMEGTLTRVGAKHERHIFLFDGLMICCKSNHGQPRLPGASNAEYRLKEKFFMRKVQINDKDDTNEYKHAFEIILKDENSVIFSAKSAEEKNNWMAALISLQYRSTLERMLDVTMLQEEKEEQMRLPSADVYRFAEPDSEENIIFEENMQPKAGIPIIKAGTVIKLIERLTYHMYADPNFVRTFLTTYRSFCKPQELLSLIIERFEIPEPEPTEADRIAIENGDQPLSAELKRFRKEYIQPVQLRVLNVCRHWVEHHFYDFERDAYLLQRMEEFIGTVRGKAMKKWVESITKIIQRKKIARDNGPGHNITFQSSPPTVEWHISRPGHIETFDLLTLHPIEIARQLTLLESDLYRAVQPSELVGSVWTKEDKEINSPNLLKMIRHTTNLTLWFEKCIVETENLEERVAVVSRIIEILQVFQELNNFNGVLEVVSAMNSSPVYRLDHTFEQIPSRQKKILEEAHELSEDHYKKYLAKLRSINPPCVPFFGIYLTNILKTEEGNPEVLKRHGKELINFSKRRKVAEITGEIQQYQNQPYCLRVESDIKRFFENLNPMGNSMEKEFTDYLFNKSLEIEPRNPKPLPRFPKKYSYPLKSPGVRPSNPRPGTMRHPTPLQQEPRKISYSRIPESETESTASAPNSPRTPLTPPPASGASSTTDVCSVFDSDHSSPFHSRSASVSSISLTKGTDEVPVPPPVPPRRRPESAPAESSPSKIMSKHLDSPPAIPPRQPTSKAYSPRYSISDRTSISDPPESPPLLPPREPVRTPDVFSSSPLHLQPPPLGKKSDHGNAFFPNSPSPFTPPPPQTPSPHGTRRHLPSPPLTQEVDLHSIAGPPVPPRQSTSQHIPKLPPKTYKREHTHPSMHRDGPPLLENAHSS

SEQ ID NO: 279088 - protein, 1050 aa, Artificial Sequence
  derived and/or modified sequence
MTDEGSPHPLVGSCFEDLAEELAFDPYESYARDILRPGFHDRFLSQLSKPGAALYLQSIGEGFKEAVQYVLPRLLLAPVYHCLHYFELLKQLEEKSEDQEDKECLKQAITALLNVQSGMEKICSKSLAKRRLSESACRFYSQQMKGKQLAIKKMNEIQKNIDGWEGKDIGQCCNEFIMEGTLTRVGAKHERHIFLFDGLMICCKSNHGQPRLPGASNAEYRLKEKFFMRKVQINDKDDTNEYKHAFEIILKDENSVIFSAKSAEEKNNWMAALISLQYRSTLERMLDVTMLQEEKEEQMRLPSADVYRFAEPDSEENIIFEENMQPKAGIPIIKAGTVIKLIERLTYHMYADPNFVRTFLTTYRSFCKPQELLSLIIERFEIPEPEPTEADRIAIENGDQPLSAELKRFRKEYIQPVQLRVLNVCRHWVEHHFYDFERDAYLLQRMEEFIGTVRGKAMKKWVESITKIIQRKKIARDNGPGHNITFQSSPPTVEWHISRPGHIETFDLLTLHPIEIARQLTLLESDLYRAVQPSELVGSVWTKEDKEINSPNLLKMIRHTTNLTLWFEKCIVETENLEERVAVVSRIIEILQVFQELNNFNGVLEVVSAMNSSPVYRLDHTFEQIPSRQKKILEEAHELSEDHYKKYLAKLRSINPPCVPFFGIYLTNILKTEEGNPEVLKRHGKELINFSKRRKVAEITGEIQQYQNQPYCLRVESDIKRFFENLNPMGNSMEKEFTDYLFNKSLEIEPRNPKPLPRFPKKYSYPLKSPGVRPSNPRPGTMRHPTPLQQEPRKISYSRIPESETESTASAPNSPRTPLTPPPASGASSTTDVCSVFDSDHSSPFHSRSASVSSISLTKGTDEVPVPPPVPPRRRPESAPAESSPSKIMSKHLDSPPAIPPRQPTSKAYSPRYSISDRTSISDPPESPPLLPPREPVRTPDVFSSSPLHLQPPPLGKKSDHGNAFFPNSPSPFTPPPPQTPSPHGTRRHLPSPPLTQEVDLHSIAGPPVPPRQSTSQHIPKLPPKTYKREHTHPSMHRDGPPLLENAHSS

SEQ ID NO: 279089 - DNA, 3957 bp, Artificial Sequence
  derived and/or modified sequence
atgcaggcccagcagctgccctacgagttcttcagcgaggagaacgcccccaagtggagaggcctgctggtgcccgccctgaagaaggtgcagggccaggtgcaccccaccctggagagcaacgacgacgccctgcagtacgtggaggagctgatcctgcagctgctgaacatgctgtgccaggcccagcccagaagcgccagcgacgtggaggagagagtgcagaagagcttcccccaccccatcgacaagtgggccatcgccgacgcccagagcgccatcgagaagagaaagagaagaaaccccctgagcctgcccgtggagaagatccaccccctgctgaaggaggtgctgggctacaagatcgaccaccaggtgagcgtgtacatcgtggccgtgctggagtacatcagcgccgacatcctgaagctggtgggcaactacgtgagaaacatcagacactacgagatcaccaagcaggacatcaaggtggccatgtgcgccgacaaggtgctgatggacatgttccaccaggacgtggaggacatcaacatcctgagcctgaccgacgaggagcccagcaccagcggcgagcagacctactacgacctggtgaaggccttcatggccgagatcagacagtacatcagagagctgaacctgatcatcaaggtgttcagagagcccttcgtgagcaacagcaagctgttcagcgccaacgacgtggagaacatcttcagcagaatcgtggacatccacgagctgagcgtgaagctgctgggccacatcgaggacaccgtggagatgaccgacgagggcagcccccaccccctggtgggcagctgcttcgaggacctggccgaggagctggccttcgacccctacgagagctacgccagagacatcctgagacccggcttccacgacagattcctgagccagctgagcaagcccggcgccgccctgtacctgcagagcatcggcgagggcttcaaggaggccgtgcagtacgtgctgcccagactgctgctggcccccgtgtaccactgcctgcactacttcgagctgctgaagcagctggaggagaagagcgaggaccaggaggacaaggagtgcctgaagcaggccatcaccgccctgctgaacgtgcagagcggcatggagaagatctgcagcaagagcctggccaagagaagactgagcgagagcgcctgcagattctacagccagcagatgaagggcaagcagctggccatcaagaagatgaacgagatccagaagaacatcgacggctgggagggcaaggacatcggccagtgctgcaacgagttcatcatggagggcaccctgaccagagtgggcgccaagcacgagagacacatcttcctgttcgacggcctgatgatctgctgcaagagcaaccacggccagcccagactgcccggcgccagcaacgccgagtacagactgaaggagaagttcttcatgagaaaggtgcagatcaacgacaaggacgacaccaacgagtacaagcacgccttcgagatcatcctgaaggacgagaacagcgtgatcttcagcgccaagagcgccgaggagaagaacaactggatggccgccctgatcagcctgcagtacagaagcaccctggagagaatgctggacgtgaccatgctgcaggaggagaaggaggagcagatgagactgcccagcgccgacgtgtacagattcgccgagcccgacagcgaggagaacatcatcttcgaggagaacatgcagcccaaggccggcatccccatcatcaaggccggcaccgtgatcaagctgatcgagagactgacctaccacatgtacgccgaccccaacttcgtgagaaccttcctgaccacctacagaagcttctgcaagccccaggagctgctgagcctgatcatcgagagattcgagatccccgagcccgagcccaccgaggccgacagaatcgccatcgagaacggcgaccagcccctgagcgccgagctgaagagattcagaaaggagtacatccagcccgtgcagctgagagtgctgaacgtgtgcagacactgggtggagcaccacttctacgacttcgagagagacgcctacctgctgcagagaatggaggagttcatcggcaccgtgagaggcaaggccatgaagaagtgggtggagagcatcaccaagatcatccagagaaagaagatcgccagagacaacggccccggccacaacatcaccttccagagcagcccccccaccgtggagtggcacatcagcagacccggccacatcgagaccttcgacctgctgaccctgcaccccatcgagatcgccagacagctgaccctgctggagagcgacctgtacagagccgtgcagcccagcgagctggtgggcagcgtgtggaccaaggaggacaaggagatcaacagccccaacctgctgaagatgatcagacacaccaccaacctgaccctgtggttcgagaagtgcatcgtggagaccgagaacctggaggagagagtggccgtggtgagcagaatcatcgagatcctgcaggtgttccaggagctgaacaacttcaacggcgtgctggaggtggtgagcgccatgaacagcagccccgtgtacagactggaccacaccttcgagcagatccccagcagacagaagaagatcctggaggaggcccacgagctgagcgaggaccactacaagaagtacctggccaagctgagaagcatcaaccccccctgcgtgcccttcttcggcatctacctgaccaacatcctgaagaccgaggagggcaaccccgaggtgctgaagagacacggcaaggagctgatcaacttcagcaagagaagaaaggtggccgagatcaccggcgagatccagcagtaccagaaccagccctactgcctgagagtggagagcgacatcaagagattcttcgagaacctgaaccccatgggcaacagcatggagaaggagttcaccgactacctgttcaacaagagcctggagatcgagcccagaaaccccaagcccctgcccagattccccaagaagtacagctaccccctgaagagccccggcgtgagacccagcaaccccagacccggcaccatgagacaccccacccccctgcagcaggagcccagaaagatcagctacagcagaatccccgagagcgagaccgagagcaccgccagcgcccccaacagccccagaacccccctgacccccccccccgccagcggcgccagcagcaccaccgacgtgtgcagcgtgttcgacagcgaccacagcagccccttccacagcagaagcgccagcgtgagcagcatcagcctgaccaagggcaccgacgaggtgcccgtgcccccccccgtgccccccagaagaagacccgagagcgcccccgccgagagcagccccagcaagatcatgagcaagcacctggacagcccccccgccatcccccccagacagcccaccagcaaggcctacagccccagatacagcatcagcgacagaaccagcatcagcgacccccccgagagcccccccctgctgccccccagagagcccgtgagaacccccgacgtgttcagcagcagccccctgcacctgcagcccccccccctgggcaagaagagcgaccacggcaacgccttcttccccaacagccccagccccttcacccccccccccccccagacccccagcccccacggcaccagaagacacctgcccagcccccccctgacccaggaggtggacctgcacagcatcgccggcccccccgtgccccccagacagagcaccagccagcacatccccaagctgccccccaagacctacaagagagagcacacccaccccagcatgcacagagacggcccccccctgctggagaacgcccacagcagctag

SEQ ID NO: 279090 - DNA, 3153 bp, Artificial Sequence
  derived and/or modified sequence
atgaccgacgagggcagcccccaccccctggtgggcagctgcttcgaggacctggccgaggagctggccttcgacccctacgagagctacgccagagacatcctgagacccggcttccacgacagattcctgagccagctgagcaagcccggcgccgccctgtacctgcagagcatcggcgagggcttcaaggaggccgtgcagtacgtgctgcccagactgctgctggcccccgtgtaccactgcctgcactacttcgagctgctgaagcagctggaggagaagagcgaggaccaggaggacaaggagtgcctgaagcaggccatcaccgccctgctgaacgtgcagagcggcatggagaagatctgcagcaagagcctggccaagagaagactgagcgagagcgcctgcagattctacagccagcagatgaagggcaagcagctggccatcaagaagatgaacgagatccagaagaacatcgacggctgggagggcaaggacatcggccagtgctgcaacgagttcatcatggagggcaccctgaccagagtgggcgccaagcacgagagacacatcttcctgttcgacggcctgatgatctgctgcaagagcaaccacggccagcccagactgcccggcgccagcaacgccgagtacagactgaaggagaagttcttcatgagaaaggtgcagatcaacgacaaggacgacaccaacgagtacaagcacgccttcgagatcatcctgaaggacgagaacagcgtgatcttcagcgccaagagcgccgaggagaagaacaactggatggccgccctgatcagcctgcagtacagaagcaccctggagagaatgctggacgtgaccatgctgcaggaggagaaggaggagcagatgagactgcccagcgccgacgtgtacagattcgccgagcccgacagcgaggagaacatcatcttcgaggagaacatgcagcccaaggccggcatccccatcatcaaggccggcaccgtgatcaagctgatcgagagactgacctaccacatgtacgccgaccccaacttcgtgagaaccttcctgaccacctacagaagcttctgcaagccccaggagctgctgagcctgatcatcgagagattcgagatccccgagcccgagcccaccgaggccgacagaatcgccatcgagaacggcgaccagcccctgagcgccgagctgaagagattcagaaaggagtacatccagcccgtgcagctgagagtgctgaacgtgtgcagacactgggtggagcaccacttctacgacttcgagagagacgcctacctgctgcagagaatggaggagttcatcggcaccgtgagaggcaaggccatgaagaagtgggtggagagcatcaccaagatcatccagagaaagaagatcgccagagacaacggccccggccacaacatcaccttccagagcagcccccccaccgtggagtggcacatcagcagacccggccacatcgagaccttcgacctgctgaccctgcaccccatcgagatcgccagacagctgaccctgctggagagcgacctgtacagagccgtgcagcccagcgagctggtgggcagcgtgtggaccaaggaggacaaggagatcaacagccccaacctgctgaagatgatcagacacaccaccaacctgaccctgtggttcgagaagtgcatcgtggagaccgagaacctggaggagagagtggccgtggtgagcagaatcatcgagatcctgcaggtgttccaggagctgaacaacttcaacggcgtgctggaggtggtgagcgccatgaacagcagccccgtgtacagactggaccacaccttcgagcagatccccagcagacagaagaagatcctggaggaggcccacgagctgagcgaggaccactacaagaagtacctggccaagctgagaagcatcaaccccccctgcgtgcccttcttcggcatctacctgaccaacatcctgaagaccgaggagggcaaccccgaggtgctgaagagacacggcaaggagctgatcaacttcagcaagagaagaaaggtggccgagatcaccggcgagatccagcagtaccagaaccagccctactgcctgagagtggagagcgacatcaagagattcttcgagaacctgaaccccatgggcaacagcatggagaaggagttcaccgactacctgttcaacaagagcctggagatcgagcccagaaaccccaagcccctgcccagattccccaagaagtacagctaccccctgaagagccccggcgtgagacccagcaaccccagacccggcaccatgagacaccccacccccctgcagcaggagcccagaaagatcagctacagcagaatccccgagagcgagaccgagagcaccgccagcgcccccaacagccccagaacccccctgacccccccccccgccagcggcgccagcagcaccaccgacgtgtgcagcgtgttcgacagcgaccacagcagccccttccacagcagaagcgccagcgtgagcagcatcagcctgaccaagggcaccgacgaggtgcccgtgcccccccccgtgccccccagaagaagacccgagagcgcccccgccgagagcagccccagcaagatcatgagcaagcacctggacagcccccccgccatcccccccagacagcccaccagcaaggcctacagccccagatacagcatcagcgacagaaccagcatcagcgacccccccgagagcccccccctgctgccccccagagagcccgtgagaacccccgacgtgttcagcagcagccccctgcacctgcagcccccccccctgggcaagaagagcgaccacggcaacgccttcttccccaacagccccagccccttcacccccccccccccccagacccccagcccccacggcaccagaagacacctgcccagcccccccctgacccaggaggtggacctgcacagcatcgccggcccccccgtgccccccagacagagcaccagccagcacatccccaagctgccccccaagacctacaagagagagcacacccaccccagcatgcacagagacggcccccccctgctggagaacgcccacagcagctag

SEQ ID NO: 279091 - DNA, 3957 bp, Artificial Sequence
  derived and/or modified sequence
atgcaggcccaacagctgccgtacgaattttttagcgaggagaacgcccctaaatggcgcggactcttggtccctgcgcttaagaaagttcagggacaggtccatcccaccctagagtcaaacgacgacgcactgcaatatgtcgaggagttaatactgcagttgttgaatatgttgtgccaggcccagccccgatcagcaagtgacgttgaggagcgagtgcaaaagtcattccctcacccgatcgataagtgggctatcgctgatgcgcagagtgcaatcgaaaaaagaaagagaagaaaccccctgtccctcccagtcgagaagatccatccactcctgaaggaagtcttgggatacaagatagaccaccaagtgtctgtatacatcgtggctgttctggaatacatctccgcggatatcttaaagttggtggggaattacgtacgcaatatccggcactacgaaatcacaaagcaggacatcaaggtggctatgtgtgccgacaaggtgctgatggatatgtttcaccaggacgtggaagacatcaatattctgtccctgaccgatgaggagccgagcacaagcggggaacaaacctactacgacctcgttaaggccttcatggcggagatacgccagtatatacgcgagcttaacctgattatcaaggttttccgtgagcccttcgtctccaattcaaagttgttttccgcaaacgatgttgagaacattttttcacgcatagtggacatccacgaactgtccgtgaaacttttagggcacatcgaagacaccgtggagatgactgatgagggatcccctcatcctttagtgggatcatgcttcgaggatctcgccgaagagctagcttttgacccttatgagtcctatgctagggacatcctgcggcctgggtttcacgaccgttttttatctcagttgtctaaacctggcgccgcactgtatctgcagagtattggggaaggattcaaggaagccgtgcagtatgtgctcccaaggcttttgctagccccagtctaccactgcctgcattattttgaactcctgaagcaattggaagaaaagtccgaagatcaggaggataaagaatgcctgaagcaggcgatcaccgctttgctgaacgtgcagtccggtatggagaagatttgctccaaaagcctcgctaagaggcgcctttcagagagcgcctgcaggttttactcccaacagatgaagggaaaacagctggccataaaaaaaatgaacgagatccagaagaatatagatggctgggagggcaaggatatcggtcaatgctgtaatgaattcatcatggagggcacgctaacccgggtcggagcgaaacatgaacgccatattttcctgttcgatggcctgatgatttgttgtaaatcaaatcacggccagccccgactgcctggggcatccaacgcagagtaccgacttaaagagaagttttttatgcgcaaggtgcaaatcaatgataaagatgacacaaacgagtacaaacatgcctttgagatcattctcaaggacgagaattccgtgatcttcagtgcaaagagcgcggaggagaaaaataattggatggccgctttgatcagcttgcagtaccgtagcactctggagcggatgcttgatgtgactatgctgcaagaagagaaggaagagcaaatgcgccttcctagtgcagacgtctaccgctttgcagaacccgactctgaagaaaatatcatttttgaagagaacatgcaacccaaggccggcatcccaatcattaaggcgggcaccgtcatcaaactgattgagaggctgacatatcacatgtatgctgatccaaacttcgtgagaacctttctaactacctaccgctcgttctgcaaaccgcaagagttgctttcacttattatcgagaggtttgagattcccgagcctgagccaactgaggccgatagaatcgctatcgagaacggcgaccaacctctttccgccgagctgaagcgctttaggaaagaatacatccagccagtccagctgcgagtgctcaatgtgtgtcggcactgggttgaacaccacttctacgactttgaaagagatgcctatcttctgcaaagaatggaggagttcatcggtaccgtgcgtgggaaggccatgaaaaagtgggtggagtccattacaaagatcatccaaaggaagaaaatcgctagagacaacggacccggacacaacatcacattccagtccagccctccaaccgtggagtggcatattagccgtcctggtcacatcgagacttttgacctgttaaccctgcatccgatcgagattgcaaggcagctgaccctgctggagtcggatctataccgcgctgtgcagccatctgaacttgtcggctccgtgtggactaaagaggacaaggagatcaatagtccgaacttgctcaagatgattcggcacactactaatttgacactgtggttcgagaaatgcatcgttgaaaccgagaacctggaagagcgagtggcagttgtctcgagaatcattgaaatccttcaagttttccaggaactgaacaatttcaacggggtgctcgaggtggtgagcgctatgaacagctctcccgtgtataggctcgaccatacgttcgaacaaattccaagcaggcagaagaaaatcctcgaggaagcccacgaactgtccgaagatcattataaaaagtacttagctaaactccgaagcattaaccccccttgcgtgccattcttcggtatctaccttaccaacattctcaaaacggaggaggggaaccccgaggtgcttaaaaggcatggtaaagaactcataaatttcagtaagcgcagaaaagttgctgagattacgggtgagattcagcaataccagaatcagccctactgcctacgggtggagtctgacattaagcgcttcttcgaaaacctgaacccaatgggcaatagtatggagaaggaattcaccgactatttgtttaataagagcctggagattgaacccaggaacccgaaacctcttcccaggttccctaagaagtattcgtatcctctgaagtcccctggcgtaaggccctccaacccacggccaggaacaatgagacaccctacacctctccagcaggagccacgtaaaatttcttacagccgaatccctgaaagcgagacagagtcaacggctagcgcccccaattccccgcgaacaccgttgaccccgccaccggcaagtggcgcaagttctaccactgacgtgtgttccgtgtttgatagcgaccatagttctccgttccacagccgttccgcctctgtctcatccatctcactcactaaagggactgacgaagtgcctgtgcctccccccgtgccacctagacggcggcctgaaagcgctccagccgagtcaagccccagcaaaattatgagcaagcatctggactcaccacccgctatccctcctcgacagcccacttcaaaggcttactcaccacgctatagcatatcagatagaaccagcatctcggatccacctgagtcccccccactgctgccgccccgggagcccgtcagaacaccggacgtcttctcaagcagtcccctgcacctgcagcctccgcctttgggcaaaaagagtgatcacggcaacgcattctttccaaactctccatcacctttcacaccgccgccccctcagacaccgtccccccatgggacaagacggcatctgcctagccctcccctgacccaggaagtcgatttgcacagcattgctggccctcctgtaccaccccgtcaaagcacttctcaacacataccaaagttaccccccaagacgtataaaagggagcacacccatccttccatgcacagggacggtcctccactactggaaaacgctcattctagctag

SEQ ID NO: 279092 - DNA, 3153 bp, Artificial Sequence
  derived and/or modified sequence
atgaccgacgaggggagtcctcatccattggtgggatcttgtttcgaggatctggctgaggaattggccttcgatccctatgagtcttacgccagggatattttacggccaggtttccacgataggttcctgagtcagctgtccaagccaggagccgcgctgtatctacagtcaataggagaggggttcaaggaggccgtccagtacgtcctcccacgtttactgcttgcccccgtgtaccactgccttcattacttcgaactgttaaaacagctggaagagaaatcggaggatcaggaagataaagagtgcttaaaacaggccatcacagcccttctaaatgtccagagtggcatggagaaaatctgctccaagtccctggcaaaaagaaggctatccgaaagcgcatgcaggttttattcccaacagatgaagggcaagcagctggccatcaagaagatgaacgaaatacagaaaaacatcgatgggtgggaggggaaggatattggccaatgctgcaacgagtttatcatggaaggcacccttacgagagtgggtgccaaacatgagcgccacattttcttgtttgatggattaatgatctgctgtaaaagcaaccacggacagccaagattaccaggggccagcaatgcagagtaccggctgaaagaaaaattcttcatgagaaaagtgcagatcaacgacaaagacgatacgaacgagtacaaacacgccttcgagatcatcctcaaagacgagaactccgtgattttctctgcaaagtctgcggaggagaagaacaactggatggccgctcttatctcactgcaataccgtagcactcttgagaggatgctggacgtgactatgctccaggaggagaaggaggaacaaatgcgcttgcccagtgcagacgtgtaccgctttgcagagcccgattccgaagaaaacatcattttcgaggaaaacatgcaacctaaggcaggtataccgattattaaagcggggaccgtaatcaagcttattgaacgtctgacataccacatgtatgctgaccccaatttcgtgaggacgttcctaacaacataccgctctttttgtaagccccaggaacttctgtctctgatcattgagaggtttgagatacctgagccagagcccactgaagcagacaggattgctatcgagaatggcgaccaaccattaagcgcagaactcaagcgattccgcaaggagtatatacaacccgttcagctgcgagtccttaacgtgtgtcgacactgggttgaacaccatttttacgacttcgaacgtgacgcctacctgctacagcgcatggaagagtttatcggaaccgtgagaggcaaagctatgaaaaaatgggttgagagcatcacgaagatcattcagagaaagaaaatcgcacgggataatggacccggccacaacattaccttccagtccagcccaccaaccgtagagtggcatatctcacgccctggtcatatcgagactttcgatctcctgacattacacccaatcgagattgcgcgccagttgaccctgctggaaagtgacctttaccgggccgtgcagccctcggagctggtagggtccgtctggaccaaagaggataaagaaattaattcacctaatctgctgaagatgatccggcatacgactaatctcaccctgtggttcgagaaatgtattgtggagaccgaaaatcttgaggaacgggtggccgtggtgagtcgaatcatcgaaattcttcaggtttttcaggaactgaacaatttcaacggtgtgctggaagtggtttccgctatgaatagctccccagtgtaccggctggaccatacctttgaacagatcccaagtaggcagaagaaaattctcgaggaagctcacgagctgagcgaggatcactataaaaaataccttgctaagctgcggtcaattaaccccccctgtgtgccattctttggcatataccttaccaacatcctaaagactgaggaaggaaatccagaggttcttaaaagacacggcaaggagctgattaattttagcaaacgacgtaaggtggccgaaatcacgggcgagatccagcagtatcagaaccagccctactgcctgagggttgagtcagacattaagagattcttcgagaaccttaatcctatgggtaactctatggaaaaagagttcactgattatttgtttaataagagtctagagattgagccaagaaaccctaagcctttgccgcgctttcctaaaaaatattcctatccactgaagtccccaggggtgaggccctcgaatcctagacctgggacgatgcgtcatcctacgccgcttcaacaagagccccgcaagatctcctacagccggattcccgaaagtgaaacggagagtaccgcctcggcccctaattctccacggacccccctaacccctcctccggcgagcggcgctagttccacaaccgatgtctgctccgtatttgactctgatcactcatccccctttcactccagaagtgcctccgtctcttctatcagcctgactaaaggtactgacgaggttcccgtgccccccccagttcccccaagacggagacccgagagcgcaccagccgaaagcagccctagtaagatcatgtctaagcacctggattctcctcctgctatccctccacgacagcccacttcgaaggcctatagccctaggtactccatttcagatcgaacctctatctcggacccacctgaaagtcccccccttcttccccctcgcgagcctgtccggactcctgacgtgttcagtagcagtcctctgcacctacaaccacccccactcggcaagaaatctgatcatggaaatgcattcttccccaatagtccatcaccgtttaccccacctcccccccagacaccctccccccacggcacaagaaggcatttacccagccctccacttacacaggaggtggatctgcacagtattgcgggacccccggtacctccgaggcagtcaacatctcagcatattcccaaacttcccccaaaaacctacaaacgcgagcatacacacccctcgatgcatagagacgggcctccactactcgaaaatgcgcatagtagctag

SEQ ID NO: 279093 - DNA, 3957 bp, Artificial Sequence
  derived and/or modified sequence
atgcaggcccagcagctgccctatgagttcttcagcgaggagaatgcccccaagtggaggggcctgctggtgcctgccctgaagaaggtgcagggccaggtgcaccccaccctggagagcaatgatgatgccctgcagtatgtggaggagctgatcctgcagctgctgaacatgctgtgccaggcccagcccaggtctgccagtgatgtggaggagcgggtgcagaagagcttcccccaccccatcgacaagtgggccatcgcagatgcccagagcgccatcgagaagaggaagagaagaaaccccctgagcctgcctgtggagaagatccaccccctgctgaaggaggtgctgggctacaagattgaccaccaggtgtctgtgtacatcgtggccgtgctggagtacatctctgctgacatcctgaagctggtgggcaactacgtgaggaacatccgccactatgagatcaccaagcaggacatcaaggtggccatgtgtgccgacaaggtgctgatggacatgttccaccaggatgtggaggacatcaacatcctgagcctgacagatgaggagcccagcaccagcggggagcagacctactatgacctggtgaaggccttcatggccgagatccggcagtacatccgggagctgaacctgatcatcaaggtgttccgggagccctttgtgagcaacagcaagctgttcagcgccaatgatgtggagaacatcttcagcagaattgtggacatccacgagctgtctgtgaagctgctgggccacatcgaggacacagtggagatgacagatgagggcagcccccaccccctggtgggcagctgctttgaggacctggccgaggagctggcctttgacccctatgagagctatgcccgggacatcctgcggcccggcttccatgaccgcttcctgagccagctgagcaagccaggggccgccctgtacctgcagagcattggagagggcttcaaggaggccgtgcagtatgtgctgccccggctgctgctggcccctgtgtaccactgcctgcactactttgagctgctgaagcagctggaggagaagtctgaggaccaggaggacaaggaatgtctgaagcaggccatcacagccctgctgaatgtgcagagcggcatggagaagatctgcagcaagagcctggccaagaggcggctgtctgagagcgcctgccgcttctacagccagcagatgaagggcaagcagctggccatcaagaagatgaatgagatccagaagaacattgatggctgggagggcaaggacatcggccagtgctgcaatgagttcatcatggagggcaccctgaccagggtgggcgccaagcatgagcggcacatcttcctgtttgatggcctgatgatctgctgcaagagcaaccacggccagccccggctgcccggggccagcaatgctgagtaccgcctgaaggagaagttcttcatgaggaaggtgcagatcaatgacaaggatgacaccaatgagtacaagcacgcctttgagatcatcctgaaggatgaaaattctgtcatcttcagcgccaagtctgctgaggagaagaacaactggatggccgccctgatcagcctgcagtaccgcagcaccctggagaggatgctggatgtgaccatgctgcaggaggagaaggaggagcagatgaggctgcccagcgcagatgtgtacagatttgctgagccagacagcgaggagaacatcatctttgaggagaacatgcagcccaaggccggcatccccatcatcaaggccggcaccgtcatcaagctgattgaaaggctgacctaccacatgtatgctgaccccaactttgtgaggaccttcctgaccacctaccgctccttctgcaagccccaggagctgctgagcctcatcatcgagagatttgagatccctgagcctgagcccacagaggccgacagaattgccattgaaaatggagaccagcccctgtctgctgagctgaagcgcttcaggaaggagtacatccagcctgtgcagctgcgggtgctgaatgtgtgccgccactgggtggagcaccacttctatgactttgaaagagatgcctacctgctgcagaggatggaggagttcatcggcaccgtgcggggcaaggccatgaagaagtgggtggagagcatcaccaagatcatccagaggaagaagatcgcccgggacaatggacctggccacaacatcaccttccagagcagcccccccaccgtggagtggcacatcagccggcccggccacatcgagacctttgacctgctgaccctgcaccccatcgagatcgcccggcagctgaccctgctggagagtgacctgtacagagctgtgcagcccagcgagctggtgggctctgtgtggaccaaggaggacaaggagatcaacagccccaacctgctgaagatgatccgccacaccaccaacctgaccctgtggtttgagaagtgcatcgtggagacagagaacctggaggagcgggtggccgtggtgagccgcatcatcgagatcctgcaggtgttccaggagctgaacaacttcaatggagtgctggaggtggtgtctgccatgaacagcagccctgtgtaccgcctggaccacacctttgagcagatccccagccggcagaagaagatcctggaggaggcccacgagctgtctgaggaccactacaagaagtacctggccaagctgcggagcatcaaccccccctgtgtgcccttcttcggcatctacctgaccaacatcctgaagacagaggagggcaaccctgaggtgctgaagagacatggcaaggagctgatcaacttcagcaagaggaggaaggtggccgagatcaccggggagatccagcagtaccagaaccagccctactgcctgcgggtggagagtgacatcaagcgcttctttgagaacctgaaccccatgggcaacagcatggagaaggagttcacagactacctgttcaacaagagcctggagattgagcccaggaaccccaagcccctgccccgcttccccaagaagtacagctaccccctgaagagccctggggtgcggcccagcaaccccaggcctggcaccatgaggcaccccacccccctgcagcaggagcccaggaagatctcctacagccgcatccctgagagcgagacagagagcacagccagcgcccccaacagccccaggacccccctgaccccacctccagccagcggggccagcagcaccacagatgtgtgcagcgtgtttgacagcgaccacagcagccccttccacagccgcagcgcctctgtgagcagcatcagcctgaccaagggcacagatgaggtgcctgtgcccccacctgtgcccccaagaagaagacctgagagcgccccagctgagagcagccccagcaagatcatgagcaagcacctggacagccccccagccatccccccccggcagcccaccagcaaggcctacagcccccgctacagcatcagtgacaggaccagcatcagtgaccccccagagagcccccccctgctgcccccccgggagcctgtgaggaccccagatgtgttcagcagcagccccctgcacctgcagcccccacccctgggcaagaagagtgaccatggaaatgccttcttccccaacagccccagccccttcaccccacctccaccccagacccccagcccccacggcaccaggaggcacctgcccagcccccccctgacccaggaggtggacctgcacagcattgctggcccccctgtgcccccccggcagagcaccagccagcacatccccaagctgccccccaagacctacaagcgggagcacacccaccccagcatgcacagagatggcccccccctgctggagaatgcccacagcagctag

SEQ ID NO: 279094 - DNA, 3153 bp, Artificial Sequence
  derived and/or modified sequence
atgacagatgagggcagcccccaccccctggtgggcagctgctttgaggacctggccgaggagctggcctttgacccctatgagagctatgcccgggacatcctgcggcccggcttccatgaccgcttcctgagccagctgagcaagccaggggccgccctgtacctgcagagcattggagagggcttcaaggaggccgtgcagtatgtgctgccccggctgctgctggcccctgtgtaccactgcctgcactactttgagctgctgaagcagctggaggagaagtctgaggaccaggaggacaaggaatgtctgaagcaggccatcacagccctgctgaatgtgcagagcggcatggagaagatctgcagcaagagcctggccaagaggcggctgtctgagagcgcctgccgcttctacagccagcagatgaagggcaagcagctggccatcaagaagatgaatgagatccagaagaacattgatggctgggagggcaaggacatcggccagtgctgcaatgagttcatcatggagggcaccctgaccagggtgggcgccaagcatgagcggcacatcttcctgtttgatggcctgatgatctgctgcaagagcaaccacggccagccccggctgcccggggccagcaatgctgagtaccgcctgaaggagaagttcttcatgaggaaggtgcagatcaatgacaaggatgacaccaatgagtacaagcacgcctttgagatcatcctgaaggatgaaaattctgtcatcttcagcgccaagtctgctgaggagaagaacaactggatggccgccctgatcagcctgcagtaccgcagcaccctggagaggatgctggatgtgaccatgctgcaggaggagaaggaggagcagatgaggctgcccagcgcagatgtgtacagatttgctgagccagacagcgaggagaacatcatctttgaggagaacatgcagcccaaggccggcatccccatcatcaaggccggcaccgtcatcaagctgattgaaaggctgacctaccacatgtatgctgaccccaactttgtgaggaccttcctgaccacctaccgctccttctgcaagccccaggagctgctgagcctcatcatcgagagatttgagatccctgagcctgagcccacagaggccgacagaattgccattgaaaatggagaccagcccctgtctgctgagctgaagcgcttcaggaaggagtacatccagcctgtgcagctgcgggtgctgaatgtgtgccgccactgggtggagcaccacttctatgactttgaaagagatgcctacctgctgcagaggatggaggagttcatcggcaccgtgcggggcaaggccatgaagaagtgggtggagagcatcaccaagatcatccagaggaagaagatcgcccgggacaatggacctggccacaacatcaccttccagagcagcccccccaccgtggagtggcacatcagccggcccggccacatcgagacctttgacctgctgaccctgcaccccatcgagatcgcccggcagctgaccctgctggagagtgacctgtacagagctgtgcagcccagcgagctggtgggctctgtgtggaccaaggaggacaaggagatcaacagccccaacctgctgaagatgatccgccacaccaccaacctgaccctgtggtttgagaagtgcatcgtggagacagagaacctggaggagcgggtggccgtggtgagccgcatcatcgagatcctgcaggtgttccaggagctgaacaacttcaatggagtgctggaggtggtgtctgccatgaacagcagccctgtgtaccgcctggaccacacctttgagcagatccccagccggcagaagaagatcctggaggaggcccacgagctgtctgaggaccactacaagaagtacctggccaagctgcggagcatcaaccccccctgtgtgcccttcttcggcatctacctgaccaacatcctgaagacagaggagggcaaccctgaggtgctgaagagacatggcaaggagctgatcaacttcagcaagaggaggaaggtggccgagatcaccggggagatccagcagtaccagaaccagccctactgcctgcgggtggagagtgacatcaagcgcttctttgagaacctgaaccccatgggcaacagcatggagaaggagttcacagactacctgttcaacaagagcctggagattgagcccaggaaccccaagcccctgccccgcttccccaagaagtacagctaccccctgaagagccctggggtgcggcccagcaaccccaggcctggcaccatgaggcaccccacccccctgcagcaggagcccaggaagatctcctacagccgcatccctgagagcgagacagagagcacagccagcgcccccaacagccccaggacccccctgaccccacctccagccagcggggccagcagcaccacagatgtgtgcagcgtgtttgacagcgaccacagcagccccttccacagccgcagcgcctctgtgagcagcatcagcctgaccaagggcacagatgaggtgcctgtgcccccacctgtgcccccaagaagaagacctgagagcgccccagctgagagcagccccagcaagatcatgagcaagcacctggacagccccccagccatccccccccggcagcccaccagcaaggcctacagcccccgctacagcatcagtgacaggaccagcatcagtgaccccccagagagcccccccctgctgcccccccgggagcctgtgaggaccccagatgtgttcagcagcagccccctgcacctgcagcccccacccctgggcaagaagagtgaccatggaaatgccttcttccccaacagccccagccccttcaccccacctccaccccagacccccagcccccacggcaccaggaggcacctgcccagcccccccctgacccaggaggtggacctgcacagcattgctggcccccctgtgcccccccggcagagcaccagccagcacatccccaagctgccccccaagacctacaagcgggagcacacccaccccagcatgcacagagatggcccccccctgctggagaatgcccacagcagctag

SEQ ID NO: 279095 - DNA, 3957 bp, Artificial Sequence
  derived and/or modified sequence
atgcaggcccagcagctgccctacgagttcttcagcgaggagaacgctccaaaatggaggggacttctcgtccccgctctcaagaaagtgcagggccaggtacacccaactcttgagtcgaacgacgatgcactgcaatacgtcgaagaactgattctgcagctgctgaacatgctgtgccaggcccagccccgcagcgcctcagacgtggaagaaagggtgcagaagtcattcccccacccaattgacaaatgggccattgcagacgcccagtccgctattgagaagagaaagaggagaaatccattgtctttgcccgttgaaaagatccaccccctcctgaaggaggtgctggggtacaagatcgaccatcaggtgtctgtgtatattgtggcagtgctggagtacatcagcgctgatatcctgaaactggtgggcaactacgttcgcaacatacgccactacgaaatcacaaagcaggatatcaaggttgcaatgtgcgcagacaaggtcctgatggatatgtttcatcaagatgtagaagacataaatattttaagcctgacagatgaggagcccagtacctccggcgaacagacatattacgaccttgttaaagctttcatggccgagataaggcagtatatccgggaactgaacctgattatcaaagttttccgggagccctttgtgagcaactcaaaattatttagcgccaacgatgtcgaaaacattttttcacggatcgtggacatccatgagttatccgtgaaactcctcggccacattgaagacacggtggagatgacagacgaaggaagcccacatcctctggtgggatcctgttttgaggacttggctgaggagctggcttttgacccctatgagagctacgccagggacatccttagaccgggctttcatgaccgatttttatctcaactctccaagcccggtgctgccttatacctgcagagtatcggagaaggctttaaggaagcagtgcagtacgttttacctcgactcctcttggcccctgtctaccactgcttgcattattttgaattactgaagcagctagaggagaaatctgaggatcaagaagacaaggaatgtctgaagcaggcgattactgcgctcctaaacgtgcagtctggcatggaaaaaatctgcagcaaaagtctggcaaaacggcgcctcagtgaatccgcctgccgcttctactctcagcaaatgaaagggaaacagctggcaatcaagaagatgaacgagatccagaagaatattgatggctgggagggaaaagacatcggccagtgttgcaacgagttcattatggaggggacgttgacacgcgtaggagctaagcacgagcggcatatcttccttttcgatggcctgatgatctgttgtaagtctaaccacggccagcctagattgcctggtgcaagcaacgccgagtatcgcttgaaggaaaagttcttcatgcggaaggtccagatcaatgacaaagatgatacaaacgaatataaacacgccttcgagatcatccttaaagatgagaactcagtgatcttcagtgcgaagtcggccgaagagaagaataactggatggctgccctgatcagcctgcagtatcgaagcaccttggaacggatgttggatgtgacgatgctccaggaagaaaaagaggaacagatgaggctgccaagcgccgatgtatatagattcgcagaacctgactccgaagagaacattatctttgaggaaaacatgcagccaaaagccggaatcccgatcataaaagcagggaccgtcattaagttgatcgagaggctcacgtatcacatgtacgcagaccccaattttgttcgcactttcctgacaacgtaccggagcttctgcaaaccacaggaactgctctctctgattattgaacgcttcgaaatccctgagccggagcccaccgaagctgaccggattgccatcgaaaacggggaccaaccactgagcgcggaactgaagcggtttaggaaggaatatattcaaccagtccagctgagagtacttaacgtgtgccgccattgggttgagcaccatttttatgactttgagagggacgcatacctgttacagcgcatggaagaatttattggcaccgttagaggcaaggccatgaagaagtgggtggagtccataaccaaaatcattcagcgaaaaaaaatcgcacgagacaacggacctggccacaatattactttccagagcagccctcccacagtagaatggcacatctcccgcccaggacatatcgaaacgtttgatttgcttactctgcaccctattgaaattgcacgacagctcaccctactcgagagcgacctgtaccgggctgtgcagccatcagagttagtcggaagcgtatggaccaaagaagataaggagatcaattctcccaatctactgaaaatgattcgacatactacaaacctgaccttgtggtttgagaagtgtattgtggaaaccgagaatctggaggaacgcgtcgcagtggtctccagaataatagagattctgcaagtttttcaagaactcaacaatttcaacggcgtgttggaggtcgtttctgcaatgaatagtagtccagtctataggctggatcacactttcgagcagattccctcccgacagaagaaaattctggaagaggcccacgagctgtccgaggaccattataaaaagtatctggccaagctacggtctattaaccctccatgtgtccccttcttcgggatctatctcaccaacattctgaagactgaagaaggtaaccccgaagttttgaagcgtcatggcaaggagcttatcaacttcagtaaacgcaggaaggtggcagagatcacaggtgagattcagcagtaccagaaccagccatactgtctgcgggtggaatcagacattaaaagattctttgaaaacttaaaccccatgggaaactcaatggagaaagagttcaccgactacctattcaacaaatctctcgaaattgagcctcggaaccccaagccgcttcccagatttcccaagaaatatagctatcccctgaaaagtcctggcgtgagaccttctaatcctcgcccagggaccatgcggcaccctacgcctttacagcaggaacctcggaagatttcgtactcgcgcatccccgaaagtgagacagagtccaccgccagcgctccgaattccccccgcactcccctgacacctcctccagcttctggagcatcttccaccaccgatgtttgctcagtcttcgattccgaccactccagtcccttccattcaaggtcagccagcgtgtcctcaataagcctaaccaaaggcacagacgaagttcccgttccaccgccagtgcctccaagaagaaggcccgagtccgccccagctgaaagttcacccagcaaaattatgtccaagcacttagatagccctcccgccatcccaccgcgtcagcctacaagcaaggcctactcacctcgatactccatttctgaccggacctcgatctccgacccaccagaaagcccacccttactcccgccacgtgaacccgtgcggaccccggacgttttttcttccagcccccttcacctccagcctccccctttgggaaaaaagagcgaccacggtaatgctttttttccgaactcacctagcccctttaccccgcccccccctcagactccaagtccgcacggaactaggagacatctgccaagccctccattgactcaggaggtggatttgcactctatcgctgggccacccgtccctcctagacagagcaccagccagcacatccctaagctcccgccaaaaacctacaagcgtgagcatacgcacccatcaatgcaccgtgacggtccacccctgctagagaacgcgcacagttcctag

SEQ ID NO: 279096 - DNA, 3153 bp, Artificial Sequence
  derived and/or modified sequence
atgaccgacgagggcagcccccaccccctggtgggcagctgcttcgaggacctggccgaagagctggcgtttgacccatatgagagctacgcccgggacattttgaggcccggttttcacgaccgcttcctctctcaactgtctaagcctggcgccgcactgtacctacagagcatcggtgaggggttcaaggaggcagtgcagtacgtattgccgcggctgttgttggcccccgtttaccattgtctccactactttgaattgctcaagcagctggaggaaaagtctgaggaccaggaggacaaggagtgccttaagcaagcaatcacagcgctgctgaatgtgcagagcgggatggagaaaatctgttccaagtcactcgcgaagcggcgactctctgagagcgcatgcaggttttacagccagcagatgaaaggtaagcagctggccattaaaaaaatgaacgaaattcagaaaaatattgacggttgggaaggaaaagacattggacaatgttgcaatgagttcattatggaaggaacgttaaccagagtgggcgccaaacatgagcgtcacatatttctgttcgacgggctgatgatttgctgtaaaagtaatcacggccaaccgcgcctgccaggggcctccaatgcagagtacagacttaaagagaaattcttcatgcggaaggtgcagatcaacgataaagacgacaccaacgagtacaagcacgcctttgaaattattctcaaggatgagaattccgtgatcttcagtgcgaagtccgccgaagagaaaaataattggatggcagcactgatttccctgcagtaccggtcaaccctagaacgcatgttagatgtgacaatgctccaggaagagaaggaagaacaaatgcgactgcccagtgctgatgtgtacaggttcgccgaaccagatagcgaagagaacatcatcttcgaggaaaatatgcagcccaaagcgggcatccccatcattaaggccggcacagttatcaagctgatcgagcgtcttacctatcacatgtatgccgacccgaatttcgtccgcacctttcttacgacctatcgaagcttttgtaagccacaggagctgctttctctgataattgagcggtttgaaatacccgaaccggagcccacagaggccgatcggatcgctatcgagaatggcgaccagcccctcagtgctgagcttaagaggtttcgaaaggagtacatacagccggtgcagctcagggtgttgaacgtgtgccgccactgggtggaacaccacttctatgactttgagcgcgacgcatacttgcttcagcggatggaagagttcatcggcacagttcgcggcaaggccatgaaaaagtgggttgagtcgataactaaaattatccagcgaaagaaaattgcgagggataacggtcctggccataacataaccttccaatctagcccccccacggttgaatggcacatatcaaggcctgggcatatcgagacctttgacttgttgaccctgcatcctatcgaaattgctagacaactcactctgctggagagtgacctatatcgagctgttcaaccatctgaattagtaggaagcgtgtggaccaaggaggacaaggagattaactcacctaacctgctgaaaatgatccgtcataccaccaacttgacactctggtttgaaaaatgcatcgtggagacagaaaacctggaggaacgcgtggcagtggtctcccggattatcgagatactgcaggtgtttcaggaactcaacaatttcaatggggtattagaggtggtttctgctatgaacagttccccagtttaccggctggatcatacgttcgaacaaatccccagccgccaaaaaaagatactggaagaggcccacgagttatccgaggatcactacaagaagtatttggccaagcttcggagtatcaatccgccatgcgtgccattcttcggtatttatttaactaatatcctcaaaaccgaggaaggaaatcccgaggtcttaaagcggcacggcaaggagcttattaatttttcaaaacggagaaaggtagccgagatcaccggggaaattcaacagtatcagaatcagccttattgtctgcgcgtcgagtctgacattaaaagatttttcgaaaatctaaacccaatgggaaacagtatggaaaaggaattcactgactacctgtttaacaagagcctggaaattgagcctcgaaatcctaagcccctgccacggttccctaagaagtattcctatccactgaaaagccccggcgtgaggccctcaaatccacggcccgggacaatgcgacaccccaccccgttgcagcaagaaccccggaagataagttacagcaggatccccgaatcagaaacggagagtactgccagcgcacctaactccccccgaacccccctgaccccccccccggcaagcggcgcgtcgtcaacaacggacgtctgctcggtgtttgatagcgaccattcgtccccattccatagcaggtccgcttcggtatcctctatatccctgaccaaaggaacagacgaagtccccgtgcctccgcccgtccccccaagaaggcggcccgagtccgcgccggccgagtcctccccttccaagatcatgagcaagcacctagactccccaccagctatcccgcctagacaacctacaagtaaagcctactctccccggtactctatctccgaccgaacttctatcagcgatccccctgagtcaccacctttgctgccgcccagagagccagtccgcactcccgacgtgttctcctctagtccactccatttacaaccacccccgctggggaagaagtcagaccacggcaatgcgttttttcccaattcccccagtccctttacaccacctccacctcagacaccttcaccacacggtaccaggcgtcacctcccctccccgccactgacgcaggaagtcgatctgcattctatcgcaggtcccccagtgcctcctcgacaatcaacctctcaacacattccgaagcttcccccgaagacctacaaacgagagcatacccacccgagcatgcaccgagatggtcctcctttactggagaatgcgcacagtagctag

SEQ ID NO: 279097 - DNA, 3957 bp, Artificial Sequence
  derived and/or modified sequence
atgcaggcccagcagcttccctatgaattcttttcagaagagaatgcgcctaagtggcggggactgcttgtgcccgctctgaaaaaagttcaggggcaggttcatcccacgctggaatctaacgacgacgccctgcaatacgtggaagaactcatccttcaactactgaatatgctctgccaagctcagccaagatctgcgagcgacgtcgaggaaagagtccaaaagagctttccccatcccatagataagtgggcaatagctgacgctcagtctgccatagaaaaaagaaaacggagaaacccactatccctccctgtggagaaaatacaccctttgctgaaggaggtccttggttataagatcgaccatcaggtgtccgtgtacattgtagcggttttggagtacataagtgccgatatcctcaagctggtaggaaactacgtacgcaacattagacactacgagatcaccaagcaggatataaaggtcgctatgtgcgccgacaaggtgctgatggacatgttccaccaagatgttgaggatataaatattctaagcctgacggacgaagagccctctacgtctggcgagcaaacgtattatgatttagtgaaggcgttcatggccgagattaggcaatatatccgggaactgaacctgatcatcaaggtcttccgggagccttttgtgtctaattctaagctatttagtgccaacgatgttgagaacatattctcccgaatagtggatatacatgaactttcagtgaaactgctggggcacattgaggatacagtcgaaatgaccgacgagggcagcccccacccactggttggaagctgttttgaagatctcgccgaggagctcgctttcgatccctacgagtcatacgccagggatatcctgagaccagggtttcacgaccggtttctgagccaacttagtaaaccgggtgctgccctgtatctccagtctatcggcgaggggttcaaggaggccgtgcagtacgtgctgccgagactgctgctggcccctgtgtaccactgtctccactactttgaactgctgaagcaacttgaggaaaaatccgaagaccaggaggacaaggagtgcctaaagcaagcaatcacagccctcctcaacgtgcaatctggaatggagaaaatctgctccaaaagcctggccaagcgcagattgtctgaatcggcctgtaggttctattctcagcagatgaaaggtaagcagctggccatcaagaagatgaacgagatccagaaaaacattgacgggtgggagggcaaagacatcggacagtgctgcaacgaattcatcatggagggtacactgacgcgcgtgggcgcaaagcacgaacgccacatctttctgtttgacggactgatgatctgttgcaaatcgaaccatggacagccaaggcttcctggagcatcaaatgcagagtatcggctaaaggagaagttctttatgagaaaggtacagataaacgacaaagatgatacaaacgagtataagcatgccttcgagataatcctgaaggacgagaactctgtgatcttctcagctaaaagcgccgaggagaaaaacaactggatggcagcgctgatctcactgcagtaccgttctaccctcgagcggatgctggacgtgactatgctgcaggaagagaaggaagagcaaatgaggctaccctccgccgatgtgtaccgctttgcagaacccgacagcgaggaaaatatcatttttgaagagaacatgcagcctaaggccggtattcccatcattaaagccggaaccgtcattaagctgatcgaacgcttaacatatcacatgtatgcagaccctaattttgttcgaacgttccttacgacctatcgcagcttctgtaaaccccaagagctgctaagtcttattatcgagagatttgaaattccagagccggaaccaaccgaggcggaccgtattgccattgaaaacggagaccagccactctccgcggaactgaagaggtttcggaaagagtatatccagcctgtgcagcttcgggtgctgaatgtgtgtaggcattgggtggaacaccacttctacgatttcgaaagagatgcttatctgctgcagcgcatggaagaatttatcggaacagtccgagggaaggctatgaaaaaatgggtcgagtctataaccaaaattattcaaaggaaaaagatcgccagagacaacggcccaggccacaacattacatttcaatccagtccgccaacagttgagtggcacatatcccgtcccggacatatcgaaacctttgatcttctgactctccatccaattgagattgctcgccagctcacactgctcgagagcgatctatatagagctgtgcaaccatcggaactcgtgggctcagtgtggacaaaagaggataaggaaattaactcacccaacctactgaagatgattaggcacaccactaatctgacgctctggtttgaaaagtgcatcgtcgagactgagaacctggaggagcgggtggcagtggtgagccgcatcatcgaaattctccaggtcttccaggaactcaataacttcaacggcgtcctggaagtcgtctctgctatgaatagttcccccgtgtaccggctggatcatactttcgaacaaatccccagtcgccagaaaaagatcctggaggaggctcatgaactgtccgaggatcactataaaaaatacctggccaaactcagatctatcaatcccccttgcgttccattcttcggaatttacctgaccaatattttaaagactgaagagggtaatcccgaggtgctcaaaaggcacgggaaggagctgattaatttttctaaacgcaggaaggtggctgagattaccggcgagattcagcagtaccagaatcaaccatactgccttagagtggagtcagacataaaacgctttttcgaaaacctcaaccccatggggaactctatggaaaaggagtttaccgattacctgtttaacaaaagcctcgagatcgagccccgaaacccaaaacctctacctcgcttccctaagaagtactcatatccattaaagagtcccggagtgaggccctcaaacccaagacccggtacgatgcgtcaccccacccccctgcagcaagagcctcgcaagatatcatatagtagaatccccgagagcgaaaccgaaagcactgcatccgcacccaatagcccccgaacccctttaacgccgccacctgcctcaggtgcaagttccacaacagacgtgtgtagcgtgttcgattctgaccactctagccccttccactccagaagcgcaagtgtttctagcatctctctcacaaaggggactgacgaagtcccagtgccgcctcctgttccacctaggcggcgtcccgaaagtgctcccgctgagagttctcccagtaagatcatgagcaagcacttggacagcccgccagctataccacctagacaaccaacttccaaggcatatagtcctaggtattccatatctgatcgcacctcaattagtgacccccctgaaagtccacctctactccctccccgtgaacccgtgaggaccccagacgtgttttcctctagtccgttgcatctgcagcccccacctctgggaaaaaaatctgatcacggcaatgcattcttcccaaactccccatccccattcaccccccctcctccacagaccccctcacctcacggaaccaggcgccatcttcctagccctccactaacccaggaggtggatttacactcaatagctgggccaccagtccctcctagacaaagcacgtctcagcacatccctaagctgccccctaagacgtacaagcgtgagcacactcacccctccatgcatcgggatggtcctcccttactcgagaatgctcattctagctag

SEQ ID NO: 279098 - DNA, 3153 bp, Artificial Sequence
  derived and/or modified sequence
atgaccgatgagggttcccctcatcctttggtgggaagctgctttgaagacctcgctgaagaactcgcttttgacccttacgagtcgtacgctcgagacattctcagaccaggctttcatgatcgatttctgagccaactgtccaaacctggagccgcactctacttgcagtccatcggagaggggttcaaggaggccgtacagtacgtcctcccacggctgcttcttgctccagtctaccactgcctgcattactttgagctcctcaagcagttggaggagaagtccgaggaccaagaggataaggagtgcctgaagcaggccattaccgccttgctgaacgtacaatccggaatggagaagatttgcagcaaaagcttagctaagagacgactgagcgagtccgcctgccggttctatagtcagcagatgaaggggaagcagctggctatcaagaaaatgaatgaaatccagaagaatatcgacgggtgggaaggcaaggatatcggtcagtgttgtaacgagtttattatggaaggcaccctcacgcgcgtcggtgcaaaacacgagagacatatcttcctgtttgatggcctcatgatatgttgcaagagcaatcacggacagcctagacttccaggagcctctaacgccgagtacaggctcaaagaaaagttcttcatgcgtaaggtgcagatcaatgacaaagatgacaccaatgagtacaaacacgcatttgagataattttgaaagacgaaaattctgtgatcttctcggctaaatctgctgaggagaagaataactggatggccgctctcatatcactgcaataccgcagcacattggagcggatgttggatgtgacaatgttgcaggaagagaaggaagagcaaatgagattgccctcagccgacgtctatcgctttgccgaacctgattctgaagaaaatatcattttcgaggagaacatgcaaccaaaagccggtatacctattatcaaggccggaacagtgatcaagttgattgaacgtctcacttatcacatgtatgccgaccccaactttgtgcgtacattccttacaacctataggagtttctgtaagccacaagaactgttgagtctgataattgaaaggtttgaaatcccagaacccgagcccactgaggcagatcgtatagcgatagaaaacggcgatcagcctttgagcgccgagctcaaacgcttccgaaaggagtatattcagcctgtgcagttgcgtgtgctgaacgtctgcagacactgggttgagcaccacttttatgactttgaaagggacgcctatttgttgcagagaatggaggagttcatcggcactgtgaggggaaaagcgatgaagaagtgggttgagagtattaccaagattattcagcggaagaaaatcgcccgagacaacggaccaggacacaacattacttttcaaagctctccgccaactgtggagtggcacatctcacggcctggtcacattgaaaccttcgaccttttgacactccacccaattgaaatcgccaggcagttaacccttcttgaaagcgacctctacagagcagtccagccttctgagcttgtgggcagcgtgtggacaaaagaagacaaggagattaattcccctaacctactgaaaatgatccgccacactactaacctcacactgtggttcgaaaagtgcatcgttgagaccgagaatctcgaagagcgggtggcggtggtgtctcgtatcatcgagatcctgcaggtttttcaggagttaaataactttaacggcgttctcgaggtggtttctgccatgaactctagcccagtgtaccgattggaccatactttcgaacagattccttcccgtcaaaagaagattttggaggaagcccacgaactcagcgaagaccattataagaagtatcttgccaaattacgttctatcaatccgccatgcgtgcctttctttggaatttatctaacgaacatcctgaagaccgaggagggtaacccggaagtgctgaaaagacatggaaaggagctgatcaatttcagcaagcggagaaaggtggctgaaataacgggggagattcagcagtaccagaatcagccttattgcctccgggttgaaagcgacatcaagagatttttcgaaaatttgaaccctatgggcaactcaatggaaaaagaattcactgattacctcttcaataaaagccttgagatcgagcctcgcaaccccaagccactgcctaggttccctaaaaaatatagctatcctcttaaaagccctggcgtcagaccaagtaatcctcggccaggtaccatgcggcaccccacacctctccagcaagaaccaagaaagatcagttattcacgcatccccgaatctgagaccgaatccaccgcatcggcgccaaattcgcctaggacaccactgaccccccctcccgctagcggtgcatcatccaccacagacgtgtgctctgtcttcgatagcgaccattcttcgcccttccacagtcgcagcgcctccgtctcatcaatttctttgaccaaaggtacggatgaggtccccgtcccaccccctgtcccacccagacggagacccgagagtgcacccgctgaatctagcccttccaaaatcatgtccaaacatcttgacagcccaccagccatacccccaagacagcccacaagcaaagcttatagccctcggtacagcattagcgatcgaacctccatatccgacccacctgagtcccctccccttctcccacccagagagcctgtccgcacccctgacgttttctccagcagcccactacacctacaacctcctcctctgggcaagaagtccgatcacgggaacgcatttttcccaaactctccgtctccattcactcccccaccaccgcaaaccccctcaccccatgggacgaggcgccacctgccaagcccgccactcacccaggaagttgaccttcatagtatcgctggtccacctgtgccaccaaggcaaagcacctctcagcatatccctaaattaccaccaaagacatacaagagggaacacacacatcccagtatgcacagagatggtcccccactgctggagaacgcccattcgagttag

SEQ ID NO: 279099 - DNA, 4123 bp, Artificial Sequence
  derived and/or modified sequence
ccccgcccagaggcgccccgggggcaccatgcaggcgcagcagctgccctacgagtttttcagcgaagagaacgcgcccaagtggcggggactactggtgcctgcgctgaaaaaggtccaggggcaagttcatcctactctcgagtctaatgatgatgctcttcagtatgttgaagaattaattttgcaattattaaatatgctatgccaagctcagccccgaagtgcttcagatgtagaggaacgtgttcaaaaaagtttccctcatccaattgataaatgggcaatagctgatgcccaatcagctattgaaaagaggaagcgaagaaaccctttatctctcccagtagaaaaaattcatcctttattaaaggaggtcctaggttataaaattgaccaccaggtttctgtttacatagtagcagtcttagaatacatttctgcagacattttaaagctggttgggaattatgtaagaaatatacggcattatgaaattacaaaacaagatattaaagtggcaatgtgtgctgacaaggtattgatggatatgtttcatcaagatgtagaagatattaatatattatctttaactgacgaagagccttccacctcaggagaacaaacttactatgatttggtaaaagcatttatggcagaaattcgacaatatataagggaactaaatctaattataaaagtttttagagagccctttgtctccaattcaaaattgttttcagctaatgatgtagaaaatatatttagtcgcatagtagatatacatgaacttagtgtaaagttactgggccatatagaagatacagtagaaatgacagatgaaggcagtccccatccactagtaggaagctgctttgaagacttagcagaggaactggcatttgatccatatgaatcgtatgctcgagatattttgcgacctggttttcatgatcgtttccttagtcagttatcaaagcctggggcagcactttatttgcagtcaataggcgaaggtttcaaagaagctgttcaatatgttttacccaggctgcttctggcccctgtttaccactgtctccattactttgaacttttgaagcagttagaagaaaaaagtgaagatcaagaagacaaggaatgtttaaaacaagcaataacagctttgcttaatgttcagagtggtatggaaaaaatatgttctaaaagtcttgcaaaacgaagactgagtgaatctgcatgtcggttttatagtcagcaaatgaaggggaaacaactagcaatcaagaagatgaacgagattcagaagaatattgatggttgggagggaaaagacattggacagtgttgtaatgaatttataatggaaggaactcttacacgtgtaggagccaaacatgagagacacatatttctctttgatggcttaatgatttgctgtaaatcaaatcatgggcagccaagacttcctggtgctagcaatgcagaatatcgtcttaaagaaaagttttttatgcgaaaggtacaaattaatgataaagatgacaccaatgaatacaagcatgcttttgaaataattttaaaagatgaaaatagtgttatattttctgccaagtcagctgaagagaaaaacaattggatggcagcattgatatctttacagtaccggagtacactggaaaggatgcttgatgtaacaatgctacaggaagagaaagaggagcagatgaggctgcctagtgctgatgtttatagatttgcagagcctgactctgaagagaatattatatttgaagagaacatgcagcccaaggctggaattccaattatcaaagcaggaactgttattaaacttatagagaggcttacgtaccatatgtacgcagatcccaattttgttcggacatttcttacaacatacagatccttttgcaaacctcaagaactactgagtcttataatagaaaggtttgaaattccagagcctgagccaacagaagctgatcgcatagctatagagaatggagatcaacccttgagtgcagaactgaaaagatttagaaaagaatatatacagcctgtgcaactgcgagtattaaatgtatgtcggcactgggtagagcaccacttctatgattttgaaagagatgcatatcttttgcaacgaatggaagaatttattggaacagtaagaggtaaagcaatgaaaaaatgggttgaatccatcactaaaataatccaaaggaaaaaaattgcaagagacaatggaccaggtcataatattacatttcagagttcacctcccacagttgagtggcatataagcagacctgggcacatagagacttttgacctgctcaccttacacccaatagaaattgctcgacaactcactttacttgaatcagatctataccgagctgtacagccatcagaattagttggaagtgtgtggacaaaagaagacaaagaaattaactctcctaatcttctgaaaatgattcgacataccaccaacctcactctgtggtttgagaaatgtattgtagaaactgaaaatttagaagaaagagtagctgtggtgagtcgaattattgagattctacaagtctttcaagagttgaacaactttaatggtgtccttgaggttgtcagtgctatgaattcatcacctgtttacagactagaccacacatttgagcaaataccaagtcgccagaagaaaattttagaagaagctcatgaattgagtgaagatcactataagaaatatttggcaaaactcaggtctattaatccaccatgtgtgcctttctttggaatttatctcactaatatcttgaaaacagaagaaggcaaccctgaggtcctaaaaagacatggaaaagagcttataaactttagcaaaaggaggaaagtagcagaaataacaggagagatccagcagtaccaaaatcagccttactgtttacgagtagaatcagatatcaaaaggttctttgaaaacttgaatccgatgggaaatagcatggagaaggaatttacagattatcttttcaacaaatccctagaaatagaaccacgaaaccctaagcctctcccaagatttccaaaaaaatatagctatcccctaaaatctcctggtgttcgtccatcaaacccaagaccaggtaccatgaggcatcccacacctctgcagcaggagccaaggaaaattagttatagtaggatccctgaaagtgaaacagaaagtacagcatctgcaccaaattctccaagaacaccgttaacacctccgcctgcttctggtgcttccagtaccacagatgtttgcagtgtatttgattccgatcattcgagcccttttcactcaagatctgcttctgtatcatctataagtttaaccaaaggcactgatgaagtgcctgtccctcctcctgttcctccacgaagacgaccagaatctgccccagcagaatcttcaccatctaagattatgtctaagcatttggacagtcccccagccattcctcctaggcaacccacatcaaaagcctattcaccacgatattcaatatcagaccggacctctatctcagaccctcctgaaagccctcccttattaccaccacgagaacctgtgaggacacctgatgttttctcaagctcaccactacatctccaacctccccctttgggcaaaaaaagtgaccatggcaatgccttcttcccaaacagcccttccccctttacaccacctcctcctcaaacaccttctcctcacggcacaagaaggcatctgccatcaccaccattgacacaagaagtggaccttcattccattgctgggccgcctgttcctccacgacaaagcacttctcaacatatccctaaactccctccaaaaacttacaaaagggagcacacacacccatccatgcacagagatggaccaccactgttggagaatgcccattcttcctgagttcctctgtactgggatgtatattttcctagccccaaatccattgctggcaatggatgcactgaatgtgccagcactgaggagttaaaatgagaactccaaacactaacgactcttcttcaagatgcagtataagac

SEQ ID NO: 279100 - DNA, 8269 bp, Artificial Sequence
  derived and/or modified sequence
ccgccgcccctctccccgcccagaggcgccccgggggcaccatgcaggcgcagcagctgccctacgagtttttcagcgaagagaacgcgcccaagtggcggggactactggtgcctgcgctgaaaaaggtccaggggcaagttcatcctactctcgagtctaatgatgatgctcttcagtatgttgaagaattaattttgcaattattaaatatgctatgccaagctcagccccgaagtgcttcagatgtagaggaacgtgttcaaaaaagtttccctcatccaattgataaatgggcaatagctgatgcccaatcagctattgaaaagaggaagcgaagaaaccctttatctctcccagtagaaaaaattcatcctttattaaaggaggtcctaggttataaaattgaccaccaggtttctgtttacatagtagcagtcttagaatacatttctgcagacattttaaagctggttgggaattatgtaagaaatatacggcattatgaaattacaaaacaagatattaaagtggcaatgtgtgctgacaaggtattgatggatatgtttcatcaagatgtagaagatattaatatattatctttaactgacgaagagccttccacctcaggagaacaaacttactatgatttggtaaaagcatttatggcagaaattcgacaatatataagggaactaaatctaattataaaagtttttagagagccctttgtctccaattcaaaattgttttcagctaatgatgtagaaaatatatttagtcgcatagtagatatacatgaacttagtgtaaagttactgggccatatagaagatacagtagaaatgacagatgaaggcagtccccatccactagtaggaagctgctttgaagacttagcagaggaactggcatttgatccatatgaatcgtatgctcgagatattttgcgacctggttttcatgatcgtttccttagtcagttatcaaagcctggggcagcactttatttgcagtcaataggcgaaggtttcaaagaagctgttcaatatgttttacccaggctgcttctggcccctgtttaccactgtctccattactttgaacttttgaagcagttagaagaaaaaagtgaagatcaagaagacaaggaatgtttaaaacaagcaataacagctttgcttaatgttcagagtggtatggaaaaaatatgttctaaaagtcttgcaaaacgaagactgagtgaatctgcatgtcggttttatagtcagcaaatgaaggggaaacaactagcaatcaagaagatgaacgagattcagaagaatattgatggttgggagggaaaagacattggacagtgttgtaatgaatttataatggaaggaactcttacacgtgtaggagccaaacatgagagacacatatttctctttgatggcttaatgatttgctgtaaatcaaatcatgggcagccaagacttcctggtgctagcaatgcagaatatcgtcttaaagaaaagttttttatgcgaaaggtacaaattaatgataaagatgacaccaatgaatacaagcatgcttttgaaataattttaaaagatgaaaatagtgttatattttctgccaagtcagctgaagagaaaaacaattggatggcagcattgatatctttacagtaccggagtacactggaaaggatgcttgatgtaacaatgctacaggaagagaaagaggagcagatgaggctgcctagtgctgatgtttatagatttgcagagcctgactctgaagagaatattatatttgaagagaacatgcagcccaaggctggaattccaattatcaaagcaggaactgttattaaacttatagagaggcttacgtaccatatgtacgcagatcccaattttgttcggacatttcttacaacatacagatccttttgcaaacctcaagaactactgagtcttataatagaaaggtttgaaattccagagcctgagccaacagaagctgatcgcatagctatagagaatggagatcaacccttgagtgcagaactgaaaagatttagaaaagaatatatacagcctgtgcaactgcgagtattaaatgtatgtcggcactgggtagagcaccacttctatgattttgaaagagatgcatatcttttgcaacgaatggaagaatttattggaacagtaagaggtaaagcaatgaaaaaatgggttgaatccatcactaaaataatccaaaggaaaaaaattgcaagagacaatggaccaggtcataatattacatttcagagttcacctcccacagttgagtggcatataagcagacctgggcacatagagacttttgacctgctcaccttacacccaatagaaattgctcgacaactcactttacttgaatcagatctataccgagctgtacagccatcagaattagttggaagtgtgtggacaaaagaagacaaagaaattaactctcctaatcttctgaaaatgattcgacataccaccaacctcactctgtggtttgagaaatgtattgtagaaactgaaaatttagaagaaagagtagctgtggtgagtcgaattattgagattctacaagtctttcaagagttgaacaactttaatggtgtccttgaggttgtcagtgctatgaattcatcacctgtttacagactagaccacacatttgagcaaataccaagtcgccagaagaaaattttagaagaagctcatgaattgagtgaagatcactataagaaatatttggcaaaactcaggtctattaatccaccatgtgtgcctttctttggaatttatctcactaatatcttgaaaacagaagaaggcaaccctgaggtcctaaaaagacatggaaaagagcttataaactttagcaaaaggaggaaagtagcagaaataacaggagagatccagcagtaccaaaatcagccttactgtttacgagtagaatcagatatcaaaaggttctttgaaaacttgaatccgatgggaaatagcatggagaaggaatttacagattatcttttcaacaaatccctagaaatagaaccacgaaaccctaagcctctcccaagatttccaaaaaaatatagctatcccctaaaatctcctggtgttcgtccatcaaacccaagaccaggtaccatgaggcatcccacacctctgcagcaggagccaaggaaaattagttatagtaggatccctgaaagtgaaacagaaagtacagcatctgcaccaaattctccaagaacaccgttaacacctccgcctgcttctggtgcttccagtaccacagatgtttgcagtgtatttgattccgatcattcgagcccttttcactcaagatctgcttctgtatcatctataagtttaaccaaaggcactgatgaagtgcctgtccctcctcctgttcctccacgaagacgaccagaatctgccccagcagaatcttcaccatctaagattatgtctaagcatttggacagtcccccagccattcctcctaggcaacccacatcaaaagcctattcaccacgatattcaatatcagaccggacctctatctcagaccctcctgaaagccctcccttattaccaccacgagaacctgtgaggacacctgatgttttctcaagctcaccactacatctccaacctccccctttgggcaaaaaaagtgaccatggcaatgccttcttcccaaacagcccttccccctttacaccacctcctcctcaaacaccttctcctcacggcacaagaaggcatctgccatcaccaccattgacacaagaagtggaccttcattccattgctgggccgcctgttcctccacgacaaagcacttctcaacatatccctaaactccctccaaaaacttacaaaagggagcacacacacccatccatgcacagagatggaccaccactgttggagaatgcccattcttcctgagttcctctgtactgggatgtatattttcctagccccaaatccattgctggcaatggatgcactgaatgtgccagcactgaggagttaaaatgagaactccaaacactaacgactcttcttcaagatgcagtataagacaatgaattttaacctagatgtaattatacaatggaaatggtattccagtttagaatatggaaagaccgacctagaggaattggacaactgattgcacctgaaaatcataaagggactttttctggccaataggcaggagtcctctttttgtgaagtgatcttttgtgaagtgatcattaaagggatggaaaacacagtctagtgtccagcaggcccacatgacagtttttgtaattcaaattatgcacttttaaaaaaaaaaacttaaacagggatcttaatatcttcctttgttttcctttgctttactcttctactttagaatattttcttaaaaatcactcaaaggactgtgaggaaaggctgtggtacctgaccttgttgaaatcaaggcccggcactgtactacaggcctgtttacagattattacggtgaactgaatgggtaccgaggcttcaccaaagaggtacttttttgttgttgttgttgttttaggaataattgtaccaattttaagagcattccccccacctgtccccacacacccaaacaaaatgtggtggtgttgccttcaaaaaagagaagttttgtgtcattaacatgacagaagaactttttaaaaaaaaataactgtcaactattctatttgcatttaggagactgttcatctatgctagattgtcattttccctccttctcccacagaagtttactggtagtccatgtcatggctcgtagctatccctctaaccataccatggaaatgcaggcacccaatgtgaaaaggagcacttgctgggcatcactgacaccgctcatgttttacacatagttgagtaatcagcatatctagaattatcttgcattgcctaaatcatatgtatatagtgaatgttatataatatacctggcaggtctgttttaatttaattgaataaagatacaaatactttgtttggctggcatatattaaattattatatgaagaaaatggttgattcttatttcttttagttgaaaaacacacaaaaacactaaacataaaagcacgttttgtggtacgccttggtttctagttctggatatatgtattaatcttaaagaatgatctaaagtcacagcttggcatataggaagatacttggttagaataggatgggtatcttttaagcagaactttgtaagtaagttttaagttcctaagcaacaagtatacagtttgttaaggtttatattgaacattctaccttgcttgaggttttctgctttatcaaaactattcataatagaacatctacctgcatcattactatcataatatggattattcataaagcgtatgtactgttcttctgagtctaacaaatactgtgactgaaatgcatgcaccttgttgaagagaaaacattttattaatctccactataatgtctgtgaaatgtgcagtattccatccttagagagtttatctggttcatcagcatctgcatgtatcctctgaataatgaagcaacatttcagcaattctgttaaccacaccattagagacatttttagaagtgctgcaacatggtgggaacctagtactttaataatttcctatgatatttattagagcataaaatgtacatcacgatagtacagtatgtagtcctttaagaccagaaggtatgttaactgcaccatcattaagcagtctatcctattttcttatttatttgttagaattgaatcctttctcaatatctgtaccattcctatgatggtagccattcttctctttataaaatatttcctctttgaaaagcgtcctaaaacattaatttcaaatcccctcttggatgcaaagtgtccctaagaccatccattcaacagtatttatgtgagccaacttactagagccgctacaactaatcatgatagacagtccagaatctccctggactttatactgggccagcctcattgtccctaagatttctctttttatgtctcatggattacttctctttttaattgccccaggcacattccaaatgagaacctggtaaaagtcacattggacccccttcagtatgtcttcggctaatgtgttagccttcaataaggtgataaccccttttcaacctatctagtctataaagaggaaaaattcagatttggagttctaatcctatttctcccaaagggaactattcttctaccccatggttctaggagaccacttcactgtgcaacagttttacatgcattgtggatggaggatatttttattctgaactgttacatttaggtaaaaatattttctgcagtggtaactgattagaaaaatgccaattggatgcccttaggtggaggtgagaaaatggcatccttgccttcttctcaatatgaaacattaactagttgacaaatttatccttgtagtaatgaaaatctatttaatcagggaccagaaatggctgaggagataaatgcatcattacaaaattctgcttttgaatcctggacattacaagggggtaaatgcagcatgactttttgttaaccacattccaaaatgtggaacatttcttttagaaatgaaaatatttcaaggctgatgtattttaagactacacattatcaggaaacatacattgagagttcgcttaattaaaggttgttgggcatcaaattatgtttagtaggttactattctctaacaactcaaggatgctttaatggatctgaatttgacaaagagcatgccacactaatactacagtcaacaacagcccagagaacaattactatgtcagctggaggctatattatgattctaaattcttaaaggtttttttccctccataaatcaaaaattaccttatgtaaaccaaaaattagttggtatttatggtcatgatcttaattctcaagtttagcttaatcttgtatttcattgtttgtcttctaatatgacagcttaaattcagatttttaagtgactcagcaaaataggaggagtgtcccaatttattagtgttgtacatattgaagaaaacctttttgttccttcagatttagaaagaaacagtttaaccatttatttcttggtattctgctgctgtgaataggtttacttattcttttaacatatattgtgtgactacgcaagtataggtcctgttgtattgcattaatctttaccagtaactaaacatcacaaggttaatattggtttggctgaaagaattatgcagtaaagttatttataagggaacatgatgactttattcaatatttttcttctttgaaacatctcattactaacttttaagattatttcataatcccttatacatgagccaatgaaatattttgagctctacttaagaagcatgaagtctatattataaatctaaacaacaaaagcacttgtaacttgtttagtaaattccatgccttattttccatttttgacaccgtaaagtgcattttctgtcgactgtgagcaaatttcccttttgcctttaatgaaaatagtgcattaagtagccaattgctgcagaattataaagcaaattagctaacagtgggtcacattggactaccactcaaagaaacaagatgcataacagatgatggaaggtacatgtggtgtggcttagggagagcgcacctgtgccagatgcatgccactttcagtagctgccaaatgtgcctttaattaagaacatctctaatttttttcttcagatcaagtcagcatttggggtcgggatttgggcagggaactttggggtgcaaatatctggtgaaaccaccagagaatttgtttgtcaaagtgacatgtataattttagttgagacgtgtttgtgtatatatgtgtatttgcctttgtttagtagcacggttatttgctaaaataattgtcaaaaaattgctctgtcggtcggtctttgatgtaagaacaaagtgtggtctatacatctaatatggcctttgtacctaaccatgttcataggtaatctttgtactctgtgtgcagcagtatttggtttgcatttaaagtgaaaataacggctgttatttttctggcattactaagataaactgaaaaataataaagaaaaatgccttacatagccc

SEQ ID NO: 279101 - protein, 731 aa, Artificial Sequence
  derived and/or modified sequence
MDEQAGPGVFFSNNHPGAGGAKGLGPLAGAARAQYSLPGILHFLQHEWARFEVERAQWEVERAELQAQIAFLQGERKGQENLKKDLVRRIKMLEYALKQERAKYHKLKYGTELNQGDMKPPSYDSDEGNETEVQPQQNSQLMWKQGRQLLRQYLQEVGYTDTILDVKSKRVRALLGFSSDVTDREDDKNQDSVVNGTEAEVKETAMIAKSELTDSASVLDNFKFLESAAADFSDEDEDDDVDGREKSVIDTSTIVRKKALPDSGEDRDTKEALKEFDFLVTSEEGDNESRSAGDGTDWGPNRSKLQDMLANLRDVDELPSLQPSVGSPSRPSSSRLPEHEINRADEVEALTFPPSSGKSFIMGADEALESELGLGELAGLTVANEADSLTYDIANNKDALRKTWNPKFTLRSHFDGIRALAFHPIEPVLITASEDHTLKMWNLQKTAPAKKSTSLDVEPIYTFRAHKGPVLCVVMSSNGEQCYSGGTDGLIQGWNTTNPNIDPYDSYDPSVLRGPLLGHTDAVWGLAYSAAHQRLLSCSADGTLRLWNTTEVAPALSVFNDTKELGIPASVDLVSSDPSHMVASFSKGYTSIFNMETQQRILTLESNVDTTANSSCQINRVISHPTLPISITAHEDRHIKFYDNNTGKLIHSMVAHLEAVTSLAVDPNGLYLMSGSHDCSIRLWNLESKTCIQEFTAHRKKFEESIHDVAFHPSKCYIASAGADALAKVFV

SEQ ID NO: 279102 - DNA, 2196 bp, Artificial Sequence
  derived and/or modified sequence
atggacgagcaggccggccccggcgtgttcttcagcaacaaccaccccggcgccggcggcgccaagggcctgggccccctggccggcgccgccagagcccagtacagcctgcccggcatcctgcacttcctgcagcacgagtgggccagattcgaggtggagagagcccagtgggaggtggagagagccgagctgcaggcccagatcgccttcctgcagggcgagagaaagggccaggagaacctgaagaaggacctggtgagaagaatcaagatgctggagtacgccctgaagcaggagagagccaagtaccacaagctgaagtacggcaccgagctgaaccagggcgacatgaagccccccagctacgacagcgacgagggcaacgagaccgaggtgcagccccagcagaacagccagctgatgtggaagcagggcagacagctgctgagacagtacctgcaggaggtgggctacaccgacaccatcctggacgtgaagagcaagagagtgagagccctgctgggcttcagcagcgacgtgaccgacagagaggacgacaagaaccaggacagcgtggtgaacggcaccgaggccgaggtgaaggagaccgccatgatcgccaagagcgagctgaccgacagcgccagcgtgctggacaacttcaagttcctggagagcgccgccgccgacttcagcgacgaggacgaggacgacgacgtggacggcagagagaagagcgtgatcgacaccagcaccatcgtgagaaagaaggccctgcccgacagcggcgaggacagagacaccaaggaggccctgaaggagttcgacttcctggtgaccagcgaggagggcgacaacgagagcagaagcgccggcgacggcaccgactggggccccaacagaagcaagctgcaggacatgctggccaacctgagagacgtggacgagctgcccagcctgcagcccagcgtgggcagccccagcagacccagcagcagcagactgcccgagcacgagatcaacagagccgacgaggtggaggccctgaccttcccccccagcagcggcaagagcttcatcatgggcgccgacgaggccctggagagcgagctgggcctgggcgagctggccggcctgaccgtggccaacgaggccgacagcctgacctacgacatcgccaacaacaaggacgccctgagaaagacctggaaccccaagttcaccctgagaagccacttcgacggcatcagagccctggccttccaccccatcgagcccgtgctgatcaccgccagcgaggaccacaccctgaagatgtggaacctgcagaagaccgcccccgccaagaagagcaccagcctggacgtggagcccatctacaccttcagagcccacaagggccccgtgctgtgcgtggtgatgagcagcaacggcgagcagtgctacagcggcggcaccgacggcctgatccagggctggaacaccaccaaccccaacatcgacccctacgacagctacgaccccagcgtgctgagaggccccctgctgggccacaccgacgccgtgtggggcctggcctacagcgccgcccaccagagactgctgagctgcagcgccgacggcaccctgagactgtggaacaccaccgaggtggcccccgccctgagcgtgttcaacgacaccaaggagctgggcatccccgccagcgtggacctggtgagcagcgaccccagccacatggtggccagcttcagcaagggctacaccagcatcttcaacatggagacccagcagagaatcctgaccctggagagcaacgtggacaccaccgccaacagcagctgccagatcaacagagtgatcagccaccccaccctgcccatcagcatcaccgcccacgaggacagacacatcaagttctacgacaacaacaccggcaagctgatccacagcatggtggcccacctggaggccgtgaccagcctggccgtggaccccaacggcctgtacctgatgagcggcagccacgactgcagcatcagactgtggaacctggagagcaagacctgcatccaggagttcaccgcccacagaaagaagttcgaggagagcatccacgacgtggccttccaccccagcaagtgctacatcgccagcgccggcgccgacgccctggccaaggtgttcgtgtag

SEQ ID NO: 279103 - DNA, 2196 bp, Artificial Sequence
  derived and/or modified sequence
atggatgaacaggccggccctggcgtttttttttccaataaccatcccggcgctggcggagcaaagggcctcggcccgcttgccggcgccgcaagggcacagtatagcctgcctggcattctgcattttctgcaacacgaatgggctcgtttcgaggtggaacgggctcagtgggaggtcgaaagggctgagctgcaggcccagatagcattcttacagggcgagaggaaaggccaagagaatctgaagaaagacctcgtgagaagaatcaagatgctcgagtacgccctgaagcaagaacgcgcaaaatatcacaagttgaaatacggaaccgaactcaatcaaggtgatatgaagcctccctcttacgactcggatgaggggaatgagacagaggtccagccacaacaaaacagtcagctcatgtggaagcagggccggcagcttctgcgacagtacctccaggaggtcggatacactgacactatcttggatgtgaaaagcaagagggtgagggccctgttaggctttagtagcgacgtgaccgacagagaagacgacaagaaccaggactcagtagtcaatggaacggaggcagaagtcaaagaaactgcgatgattgccaaatctgagctgactgactccgcttcagtcctggataactttaaattcttggaatcggccgcagccgattttagcgatgaggacgaggatgacgatgtggatggaagagagaagagtgttatagacacatctacaatcgtgagaaagaaagctttgccagattcgggcgaagatcgagacaccaaagaggccttaaaggaattcgactttttagtgacatccgaagaaggcgataatgaatcaagatccgctggcgacggcacagactggggtcccaatagaagtaaactgcaagacatgctcgcgaaccttagggatgtggatgagctcccgagcctgcaaccatcagtcggcagcccatcccggccctcttcttctcgattacccgagcacgaaattaatagagctgacgaggtagaggctctgacttttccaccctcaagcggaaaatctttcatcatgggagccgatgaggcacttgagagcgaacttgggttgggtgaactggctggactcactgtcgccaacgaggcggacagcctcacctacgacattgccaataataaggatgcactcaggaaaacatggaaccccaaatttactctgaggtcacacttcgacggcatccgggccttagctttccatcctatcgaaccagtgttaatcacagcctccgaggaccacactctgaaaatgtggaatcttcaaaagaccgcccccgccaagaaatccacttctctcgacgttgagcctatctacaccttccgcgcgcataagggcccggtcctgtgcgtagtaatgtcaagtaatggggagcagtgctattcaggcggtaccgacggtctgatacagggttggaacactacaaaccctaacatcgatccctacgatagctatgacccttccgtgctgcgcgggccccttctgggtcatacagacgctgtctggggactggcctacagtgctgcccatcagaggttactgagttgcagtgccgacggcaccctgaggttatggaacactactgaagtcgctcccgcactatcagtgttcaacgacacaaaggaactcggaattccagcatcagtggaccttgtgagttctgacccctcacatatggtggcctcattctctaaggggtacacctccatcttcaacatggagactcaacagaggattcttaccctggagtcaaatgtggacactaccgcaaacagctcgtgccagataaatcgggtgatctcacatcctactctgcctatcagtattaccgcacacgaagacagacacatcaaattttatgataataatactggaaagcttatccacagtatggttgctcacctggaagccgtgacctctctggcagtcgacccaaatggattgtatttgatgtcagggtcccatgactgctcgattcgcctgtggaacctggaatccaaaacttgcatccaggagttcaccgcccaccggaagaagttcgaagaaagcatccatgatgtggcctttcacccgtcgaagtgctatatcgcaagcgccggggccgatgctcttgcaaaagtattcgtgtag

SEQ ID NO: 279104 - DNA, 2196 bp, Artificial Sequence
  derived and/or modified sequence
atggatgagcaggccggccctggggtcttcttcagcaacaaccaccctggggccggcggggccaagggcctgggccccctggccggggccgcccgggcccagtacagcctgcccggcatcctgcacttcctgcagcacgagtgggccaggtttgaggtggagcgggcccagtgggaggtggagagagctgagctgcaggcccagatcgccttcctgcagggcgagaggaagggccaggagaacctgaagaaggacctggtgcggcgcatcaagatgctggagtatgccctgaagcaggagcgggccaagtaccacaagctgaagtatggaacagagctgaaccagggcgacatgaagccacccagctatgacagtgatgagggcaatgaaacagaggtgcagccccagcagaacagccagctgatgtggaagcagggccggcagctgctgcggcagtacctgcaggaggtgggctacacagacaccatcctggatgtgaagagcaagagggtgcgggccctgctgggcttcagcagtgatgtgacagacagagaagatgacaagaaccaggacagcgtggtgaatggaacagaagctgaggtgaaggagacagccatgattgccaagtctgagctgacagattctgcctctgtgctggacaacttcaagttcctggagagcgctgctgctgacttcagtgatgaagatgaagatgatgatgtggatggccgggagaagtctgtgattgacaccagcaccatcgtgaggaagaaggccctgcctgattctggagaagatcgggacaccaaggaggccctgaaggagtttgacttcctggtgaccagcgaggagggggacaatgaaagccgctctgctggagatggaacagactggggccccaacagaagcaagctgcaggacatgctggccaacctgagagatgtggatgagctgcccagcctgcagcccagcgtgggcagccccagccggcccagcagcagccggctgcctgagcacgagatcaacagagcagatgaggtggaggccctgaccttcccccccagcagcggcaagagcttcatcatgggcgcagatgaggccctggagagcgagctgggcctgggggagctggccggcctgactgtggccaatgaggccgacagcctgacctatgacatcgccaacaacaaggatgccctgaggaagacctggaaccccaagttcaccctgcggagccactttgatggcatccgggccctggccttccaccccatcgagcctgtgctgatcacagccagcgaggaccacaccctgaagatgtggaacctgcagaagacagccccagccaagaagagcaccagcctggatgtggagcccatctacaccttccgggcccacaagggccctgtgctgtgtgtggtgatgagcagcaatggagagcagtgctacagcggcggcacagatggcctcatccagggctggaacaccaccaaccccaacatcgacccctatgacagctatgaccccagcgtgctgcggggccccctgctgggccacacagatgctgtgtggggcctggcctacagcgctgcccaccagaggctgctgagctgcagcgcagatggcaccctgcggctgtggaacaccacagaggtggccccagccctgtctgtgttcaatgacaccaaggagctgggcatcccagcctctgtggacctggtgtccagtgaccccagccacatggtggccagcttcagcaagggctacaccagcatcttcaacatggagacccagcagaggatcctgaccctggagagcaatgtggacaccacagccaacagcagctgccagatcaacagagtcatcagccaccccaccctgcccatcagcatcacagcccatgaagatagacacatcaagttctatgacaacaacacaggcaagctgatccacagcatggtggcccacctggaggccgtgaccagcctggccgtggaccccaacggcctgtacctgatgagcggcagccatgactgcagcatccggctgtggaacctggagagcaagacctgcatccaggagttcaccgcccacaggaagaagtttgaggagagcatccatgatgtggccttccaccccagcaagtgctacatcgccagcgctggagcagatgccctggccaaggtgtttgtgtag

SEQ ID NO: 279105 - DNA, 2196 bp, Artificial Sequence
  derived and/or modified sequence
atggacgagcaggccggccccggcgtgttcttcagcaacaaccaccccggagcagggggcgccaagggactgggacctcttgcaggggcagcccgtgcacagtattccttgccgggtattctgcactttctgcagcatgaatgggcccgcttcgaagttgagagggcccaatgggaggtggagcgcgccgagctccaggcccaaattgcttttctgcagggtgaacgcaaaggacaagagaacctgaagaaagacctggtcagacgtattaagatgctggagtacgcactgaagcaagaaagggccaagtaccacaaactcaagtacggaactgaactgaaccagggcgacatgaaaccccccagctacgactctgacgagggaaatgagaccgaggtgcagccccagcagaatagtcagctcatgtggaagcaggggaggcagctgttgcgccagtacctacaggaggtcgggtatacagacactatcctggacgtgaaaagcaagagggtgcgggcacttctgggcttctcgtcagacgtcaccgaccgcgaggacgataagaaccaagattctgtcgtcaatggcaccgaggccgaggtgaaagaaaccgccatgatagctaaaagcgagctcaccgacagcgcctccgtgctagacaacttcaaatttttggagtccgctgccgccgatttctcggatgaggatgaggatgacgatgtggacggtagagagaaatctgtcatcgatacctcgaccatcgtgaggaaaaaggcgctccccgatagcggggaggacagagatacaaaagaagctttgaaagagtttgactttctcgtgactagtgaggaaggtgataatgaaagtcgcagcgctggtgatggtaccgattggggacccaacaggagtaagcttcaggatatgctcgccaatctgcgcgatgtggatgagctgccatctctgcagccttcagttgggagtccaagccgccccagcagcagtcggcttccagagcacgaaatcaatcgggccgatgaagtagaagccttgacttttccccccagcagcggcaagagctttataatgggagcagatgaggctctagagtcagagctgggccttggcgagttagcaggactgactgtagctaacgaagcggatagtttaacttacgacattgcaaacaataaggacgcgctacggaagacctggaatcctaaatttacactcagaagccactttgacgggattcgtgccctggccttccatccaatcgagccggtgcttataacagcgagcgaagatcacacactgaagatgtggaatcttcagaagaccgctcctgccaagaagagtacatcgctggacgtggagcctatctacacattcagagcccacaaaggcccagtactgtgtgtggtcatgtctagtaacggggaacagtgttacagtggcggcacggacggcctgatccagggctggaacactacgaaccccaatatcgatccctacgactcctatgacccatctgttctgcgaggcccactgctaggacacacagatgctgtgtggggtctagcgtattctgccgcccatcaaagactcctctcatgctccgcagacggaaccttgagactatggaacaccactgaggtggctccagctctctctgtgttcaacgacaccaaagagctaggcatccccgcgtcagtcgacctcgtttcaagcgacccctcgcatatggtagcttcattctcaaagggatacacttctatttttaatatggaaacacagcagcgcatcctcacgctcgaaagcaatgtggatacgacggcaaacagttcctgtcagattaaccgggtgatttcccatcctaccctgccgatctctattaccgctcatgaggatcgtcacatcaaattctatgataacaacaccggtaagctgatacattcaatggtcgcccatctcgaagcggtgaccagcctggccgtcgatcccaatggcctctacctcatgagtggatcgcacgactgctctattcgactctggaatctcgagtcgaaaacctgtatccaggaattcacggcccacagaaagaagtttgaggagagcatacacgacgtcgcatttcacccttctaaatgctacatagcctcagccggcgcagatgcattggccaaggtctttgtatag

SEQ ID NO: 279106 - DNA, 2196 bp, Artificial Sequence
  derived and/or modified sequence
atggatgaacaggctggcccaggtgtgtttttttccaacaaccaccctggggcaggaggagccaaaggactgggcccactggccggtgcagcacgggctcagtattccttgccagggatactacatttccttcaacacgagtgggcgcgtttcgaagtggagcgcgctcagtgggaggtggaaagggctgagcttcaggctcagattgcgtttctgcaaggagagcgcaagggtcaggagaatctcaaaaaggacctggttcggcgtattaaaatgttggaatacgctctaaaacaggagcgtgctaagtaccacaagctgaagtatgggaccgagctcaaccaaggggacatgaaaccgccaagttacgatagcgacgaaggcaatgagacagaagtgcagccacagcagaattcacagctgatgtggaaacagggtaggcaactgcttcgacagtatctgcaggaggtcggatatacggatacaatcctggacgttaagtctaaaagggttagggctctattgggcttcagtagcgacgtgacagatcgcgaggacgacaagaatcaggatagtgtggtcaatgggacagaggccgaggtgaaagagacggccatgatcgcgaagagcgaactcacagacagcgcatccgtattagacaactttaagttccttgaatcagcagcggcagacttcagtgacgaggatgaggatgatgatgtggacggcagagaaaagtcagtcatcgatacaagtacaattgttcggaagaaggcattaccagattcaggagaagaccgtgatactaaggaggccctgaaagaatttgacttcctggtgacctctgaggaaggcgataacgagagtcgaagcgcaggtgatggcacggactggggtccaaatcgcagcaaactccaggatatgctcgcaaatctgcgtgatgtggacgaacttccctcactacagcccagcgtcgggagcccttcgcgaccaagcagttcccgcttaccggagcacgagattaatcgtgccgacgaagttgaagctcttaccttccctccgagcagcggaaaaagttttatcatgggtgccgatgaagcattggaaagcgagttgggcctgggcgagttggcaggacttaccgtggccaacgaggctgattctctgacttatgacatcgctaacaacaaagatgctctcagaaagacttggaaccccaagtttaccttacggagccactttgacggaataagggccctcgcttttcatcctattgagccagttctcatcactgcatctgaagaccacactttgaaaatgtggaacctgcagaagaccgctccggctaagaaatctaccagcctggacgtagaaccaatatatacatttagggcgcacaaggggccagtgttgtgtgtcgttatgtcctcaaatggcgagcagtgctactccgggggaactgacggcctgattcaggggtggaatactaccaatccaaacattgacccatatgactcatatgacccctctgttcttcgcggaccattactggggcacaccgacgctgtctggggcctggcctattcagctgctcaccagcggcttctgtcttgtagcgcggatggtacactgagattatggaataccactgaggtggccccagccctgagtgtgttcaatgataccaaagaactcgggatccctgcttccgttgacctggtgagctctgatccaagccacatggtggccagtttttcaaaaggttacacatctatctttaacatggagacgcagcagcgcatcctgaccttggaaagcaacgttgacaccaccgcgaattcatcatgtcagatcaatcgggttattagtcatccaaccttgcctatttccataactgctcacgaggatagacacataaagttttacgacaacaacaccgggaagttgattcattccatggtggcccacctggaggctgtaacttctcttgccgttgatcctaacggactctatcttatgtcgggtagtcacgactgttctatcagactttggaacctcgaaagtaaaacatgtatccaggaattcactgcacacaggaaaaagttcgaggaatccatacatgacgtcgctttccacccatcaaagtgttacatcgcaagcgcaggagcagacgctcttgcgaaggtatttgtctag

SEQ ID NO: 279107 - DNA, 3323 bp, Artificial Sequence
  derived and/or modified sequence
atggacgagcaggcgggtcccggcgtcttcttcagcaacaaccacccgggcgccggcggtgccaaggggctcgggcctctggcgggggcggcccgagcccagtacagtctcccggggatcctgcacttcctgcagcacgagtgggcccgcttcgaggtggagagagcccagtgggaggtggagcgggcggagctgcaggcccagattgccttcctgcagggagaaaggaagggccaagaaaatttgaagaaggatcttgtgaggaggatcaaaatgttggagtatgctcttaaacaggaaagagccaaataccacaagttgaaatacgggacagaattgaatcagggagatatgaagcctccaagctatgattctgatgaaggtaatgaaacagaagtgcagccacaacaaaacagccagttaatgtggaaacaaggtcgacaactactcagacagtatctacaggaggtgggttatacagatactattctagatgtgaaatctaaacgagtgcgagctttgttgggcttttcaagtgatgtcacggacagggaagatgacaaaaatcaggactcagttgtaaatggcacagaggctgaagttaaagagacagcaatgattgcaaaatctgagttaacagattctgcctccgtgctggataatttcaaattccttgaaagtgcagctgcagatttcagtgatgaagatgaagatgatgatgttgatggaagagagaaaagcgtcattgatacttcaacaattgttaggaaaaaagcattgcctgacagcggtgaagatcgagatacaaaagaagctctaaaggagtttgacttcttggttacatcagaggaaggagacaatgaatctagaagtgcaggcgatggaacagactgggggcccaataggtcaaaactacaagatatgcttgctaatttgagagatgttgatgaacttccttcattgcagccatctgtgggttcaccttccagacccagcagctccaggcttcctgaacatgaaattaatagggcagatgaagtggaagcattgacatttcctccttcttctggaaagtcattcatcatgggagcagatgaagcccttgaaagtgaactgggacttggagaactagcaggccttacggtggccaatgaagcagactcactaacttatgatatagcaaacaataaagatgcattgaggaagacatggaaccctaagtttacattgagaagtcactttgatggcatccgagcccttgctttccatcccattgagcctgttttgataacagcatcagaggatcacacattaaaaatgtggaatttacagaaaacagccccagccaaaaagagcacttctcttgatgtagaacctatctatacattcagagcccataaaggtccagtgctttgtgtggtaatgagcagcaatggtgagcagtgttacagtggtggtactgatggactgatccagggctggaataccactaatcccaacatcgacccctatgattcttatgatccttctgttttacgaggccctctgctaggccacacggatgcagtctggggtttggcttatagtgcagcacatcagcgtttgttgtcctgttcagcagatggcactctgcgtttatggaatacaactgaggttgctccagcactaagtgtatttaatgatactaaagaactgggaatccctgcctctgtggatctagtgagcagtgacccgagccatatggtagcatcattcagcaagggatatacaagcatttttaacatggaaacacaacaacgcattctcactttagaatccaatgtagatacaacagccaactcttcctgccaaataaatagagtcatcagtcatcctactcttccgatcagcatcactgctcatgaagacaggcacatcaaattctatgataacaatacaggcaaactgatccactcgatggtagcccacctagaagctgttacaagtttagcagttgatcccaatggcctttacttgatgtctggcagtcatgactgttcaatacgtttatggaatctagaaagtaagacgtgtatccaagaattcacagctcatcgaaaaaagtttgaagaatcgattcatgatgtagctttccacccatccaaatgctatatagccagtgctggagctgacgcactggctaaagtctttgtatgacgcaatgcatcatcttcaccttctagctgtttataagtaatcaactgcacacaagagatacagaagacgagggcaagaatcatctcgtcctgcccttttgttctgctgaaggagcacagagaacatttgttgaagtatagttttgcaattcatatactgttttctaaaactaaggtttgttcaggttgctgcaagctcagctgaatctgtgagcctgaggtctgtttcaaatttctccccaataggcgcctttatttctgaggtggttctaattcgctaggcaggcctgagcgaatacaagtttagcttgtccctgttgagtaagtagggcatgctacaatggataatttaaaagcttgatagctgggactgaatagaagaaaacgggaaacttagaccaagttctcccctgagaaatcttgttaaaacacattaagtagtcaaaatagtaatctttatcatatctgccatattaacccctttgtgtataatgaccaggcagtgttaaactgagtttttaatttgactctcctttcagctgttcacataaagcacctggcaaagcattttacctgttagggggagaaaaatgcaataatatgttaaatatattattattcagaaatgctagacaaatagtttgcaagcagatttctatattgtattacagttttgaaaacagatttggtatcattctaaagtttagctatcaagcactcaccattgtgaagaatagttgatcgactctgcttttactaacagatttaacttattcaggtttgaaattctgtttatttttaagggtaaacagggcatatctctttaataatttctattttaaaattcactttattcatgtgacatttatagtaccagagtgattatttcataccaatgaaatcttacttttcagtgactgaaaagatagaatttatttgctaataatcatttatcaacacccacctaatcatgcttcagatgatctgtgctctttcttctttgtcacgttcaagttatctgacatctaccaagaacagttcataattattaatagcccaaagagtatggttaacttcacgcagctgcttttgcagaagcactaataaaaacaaatattttgtacccta

SEQ ID NO: 279108 - DNA, 73 bp, Artificial Sequence
  derived and/or modified sequence
aatggaatcgaatggaatcatcatcaaatggaatctaatggaatcattgaacggaattggatggaatcgtcat

SEQ ID NO: 279109 - DNA, 98 bp, Artificial Sequence
  derived and/or modified sequence
aggaaaatttaatcagcaggaatagaaacacacttgagaaatccatgtggaatgaaaagagaatggctgagcagcaacagattgtcaaaaaggaaatc

SEQ ID NO: 279110 - DNA, 1494 bp, Artificial Sequence
  derived and/or modified sequence
atgagccaggacggcgccagccagttccaggaggtgatcagacaggagctggagctgagcgtgaagaaggagctggagaagatcctgaccaccgccagcagccacgagttcgagcacaccaagaaggacctggacggcttcagaaagctgttccacagattcctgcaggagaagggccccagcgtggactggggcaagatccagagaccccccgaggacagcatccagccctacgagaagatcaaggccagaggcctgcccgacaacatcagcagcgtgctgaacaagctggtggtggtgaagctgaacggcggcctgggcaccagcatgggctgcaagggccccaagagcctgatcggcgtgagaaacgagaacaccttcctggacctgaccgtgcagcagatcgagcacctgaacaagacctacaacaccgacgtgcccctggtgctgatgaacagcttcaacaccgacgaggacaccaagaagatcctgcagaagtacaaccactgcagagtgaagatctacaccttcaaccagagcagataccccagaatcaacaaggagagcctgctgcccgtggccaaggacgtgagctacagcggcgagaacaccgaggcctggtacccccccggccacggcgacatctacgccagcttctacaacagcggcctgctggacaccttcatcggcgagggcaaggagtacatcttcgtgagcaacatcgacaacctgggcgccaccgtggacctgtacatcctgaaccacctgatgaacccccccaacggcaagagatgcgagttcgtgatggaggtgaccaacaagaccagagccgacgtgaagggcggcaccctgacccagtacgagggcaagctgagactggtggagatcgcccaggtgcccaaggcccacgtggacgagttcaagagcgtgagcaagttcaagatcttcaacaccaacaacctgtggatcagcctggccgccgtgaagagactgcaggagcagaacgccatcgacatggagatcatcgtgaacgccaagaccctggacggcggcctgaacgtgatccagctggagaccgccgtgggcgccgccatcaagagcttcgagaacagcctgggcatcaacgtgcccagaagcagattcctgcccgtgaagaccaccagcgacctgctgctggtgatgagcaacctgtacagcctgaacgccggcagcctgaccatgagcgagaagagagagttccccaccgtgcccctggtgaagctgggcagcagcttcaccaaggtgcaggactacctgagaagattcgagagcatccccgacatgctggagctggaccacctgaccgtgagcggcgacgtgaccttcggcaagaacgtgagcctgaagggcaccgtgatcatcatcgccaaccacggcgacagaatcgacatcccccccggcgccgtgctggagaacaagatcgtgagcggcaacctgagaatcctggaccactag

SEQ ID NO: 279111 - DNA, 453 bp, Artificial Sequence
  derived and/or modified sequence
atgagccaggacggcgccagccagttccaggaggtgatcagacaggagctggagctgagcgtgaagaaggagctggagaagatcctgaccaccgccagcagccacgagttcgagcacaccaagaaggacctggacggcttcagaaagctgttccacagattcctgcaggagaagggccccagcgtggactggggcaagatccagagaccccccgaggacagcatccagccctacgagaagatcaaggccagaggcctgcccgacaacatcagcagcgtgctgaacaagctggtggtggtgaagctgaacggcggcctgggcaccagcatgggctgcaagggccccaagagcctgatcggcgtgagaaacgagaacaccttcctggacctgaccgtgcagcagatcgagcacctgaacaagacctacaacaccgacgtgcccctggtgctgtag

SEQ ID NO: 279112 - DNA, 516 bp, Artificial Sequence
  derived and/or modified sequence
atgagccaggacggcgccagccagttccaggaggtgatcagacaggagctggagctgagcgtgaagaaggagctggagaagatcctgaccaccgccagcagccacgagttcgagcacaccaagaaggacctggacggcttcagaaagctgttccacagattcctgcaggagaagggccccagcgtggactggggcaagatccagagaccccccgaggacagcatccagccctacgagaagatcaaggccagaggcctgcccgacaacatcagcagcgtgctgaacaagctggtggtggtgaagctgaacggcggcctgggcaccagcatgggctgcaagggccccaagagcctgatcggcgtgagaaacgagaacaccttcctggacctgaccgtgcagcagatcgagcacctgaacaagacctacaacaccgacgtgcccctggtgctgatgaacagcttcaacaccgacgaggacaccaagaagatcctgcagaagtacaaccactgcagatag

SEQ ID NO: 279113 - DNA, 318 bp, Artificial Sequence
  derived and/or modified sequence
atgagccaggacggcgccagccagttccaggaggtgatcagacaggagctggagctgagcgtgaagaaggagctggagaagatcctgaccaccgccagcagccacgagttcgagcacaccaagaaggacctggacggcttcagaaagctgttccacagattcctgcaggagaagggccccagcgtggactggggcaagatccagagaccccccgaggacagcatccagccctacgagaagatcaaggccagaggcctgcccgacaacatcagcagcgtgctgaacaagctggtggtggtgaagctgaacggcggctag

SEQ ID NO: 279114 - DNA, 408 bp, Artificial Sequence
  derived and/or modified sequence
atgagccaggacggcgccagccagttccaggaggtgatcagacaggagctggagctgagcgtgaagaaggagctggagaagatcctgaccaccgccagcagccacgagttcgagcacaccaagaaggacctggacggcttcagaaagctgttccacagattcctgcaggagaagggccccagcgtggactggggcaagatccagagaccccccgaggacagcatccagccctacgagaagatcaaggccagaggcctgcccgacaacatcagcagcgtgctgaacaagctggtggtggtgaagctgaacggcggcctgggcaccagcatgggctgcaagggccccaagagcctgatcggcgtgagaaacgagaacaccttcctggacctgaccgtgcagcagatctag

SEQ ID NO: 279115 - DNA, 642 bp, Artificial Sequence
  derived and/or modified sequence
atgagccaggacggcgccagccagttccaggaggtgatcagacaggagctggagctgagcgtgaagaaggagctggagaagatcctgaccaccgccagcagccacgagttcgagcacaccaagaaggacctggacggcttcagaaagctgttccacagattcctgcaggagaagggccccagcgtggactggggcaagatccagagaccccccgaggacagcatccagccctacgagaagatcaaggccagaggcctgcccgacaacatcagcagcgtgctgaacaagctggtggtggtgaagctgaacggcggcctgggcaccagcatgggctgcaagggccccaagagcctgatcggcgtgagaaacgagaacaccttcctggacctgaccgtgcagcagatcgagcacctgaacaagacctacaacaccgacgtgcccctggtgctgatgaacagcttcaacaccgacgaggacaccaagaagatcctgcagaagtacaaccactgcagagtgaagatctacaccttcaaccagagcagataccccagaatcaacaaggagagcctgctgcccgtggccaaggacgtgagctacagcggcgagaacaccgaggcctggtacccccccggccacggctag

SEQ ID NO: 279116 - DNA, 1494 bp, Artificial Sequence
  derived and/or modified sequence
atgtctcaggacggcgcaagccagtttcaagaagtaatcaggcaggagctggagctcagtgtgaaaaaagagctggagaagattctcacaacagcaagctcacacgagttcgaacacaccaagaaggacctggatggctttcgcaaactgtttcaccgctttttgcaggaaaaggggccctccgtggactggggcaagatccagcgccccccagaggactcaatccagccatatgagaagattaaggcccggggactacccgacaatatctctagcgtcctgaataagctggtagtagtgaagcttaacggcggcctcgggaccagtatgggctgtaagggcccaaagagcttgattggcgtaagaaacgaaaatactttcctggacctgaccgtgcaacagatagaacatcttaacaagacctacaacaccgacgtgccacttgtgctcatgaattcattcaacacagacgaggatacaaagaagatcctccaaaagtacaatcattgtagagtaaagatatatacctttaaccagtccagatatcccagaattaacaaggaatccttactgccggtcgccaaggacgtcagctacagtggtgagaacacagaggcttggtatcctcctggtcatggcgacatttacgcaagtttctataattcaggcctgctggacaccttcataggggaagggaaggagtatatattcgtgagtaacatcgacaatcttggtgcaacagtggacctgtatatcctgaaccatctgatgaacccccccaatggaaaacgatgtgaattcgtgatggaggtaacgaacaaaaccagagccgacgtcaaggggggaaccctaacgcaatacgaaggcaagttaagacttgtcgagatagcacaagtacccaaggcccacgtagatgagttcaaatctgtctccaaattcaagatattcaataccaacaatctgtggattagtctggctgcagtgaaacggttgcaggaacagaatgctattgacatggaaatcatagtgaatgcgaaaaccctggacggcgggctaaacgtaattcagctcgagaccgccgttggcgctgcgatcaagagctttgagaattcacttgggatcaacgtgccccgctcgagattcctacctgtcaagacaacatcagatcttctacttgttatgagcaacctgtactcacttaacgctgggtccctcaccatgagcgaaaagcgcgagtttccaacggtgcccctggtaaaactgggatcgtctttcacgaaagtgcaggattaccttcgacgcttcgagtctataccagacatgttggagctggatcatctgaccgtctcaggagacgtgactttcggcaagaacgtgtcgctcaagggcacagtgatcattattgcaaatcacggtgacaggattgatattccaccaggggctgtcctggaaaacaaaatagtctctggaaaccttcgaatccttgaccactag

SEQ ID NO: 279117 - DNA, 1494 bp, Artificial Sequence
  derived and/or modified sequence
atgagccaggacggtgcatcccagtttcaggaagtgattcggcaggagctcgaattgtccgtgaaaaaggaactggaaaagatcttgaccactgcgtcgtcacatgagtttgagcacaccaaaaaagacctcgatggattccggaagctctttcatcgttttttgcaggagaagggcccgtccgtggattgggggaagatccaacgtccccctgaggactctattcagccttacgaaaagatcaaagcccggggcctaccggataacatatcaagcgtgctgaataaactagtagtcgtgaagctgaacgggggtctgggaacaagcatgggatgcaaaggccccaaatccctgatcggagtgcgcaacgagaatacattcctggatcttacggtgcaacagattgagcacctgaataagacctataacaccgacgttcctctggtgttaatgaattcttttaataccgacgaggatactaagaagatactccagaagtataatcattgtagggtcaagatctacacctttaaccaaagccgttacccaagaatcaacaaagagtctctgctgcccgtagcaaaagatgtgtcttattcaggcgagaatacagaggcctggtaccccccaggacatggcgacatctatgcctcattctataattcagggttgcttgatactttcataggggaggggaaggagtacattttcgttagtaatatagacaacctgggcgcaaccgtggacctgtacatactaaaccacctgatgaacccgcccaacggtaagaggtgcgaattcgtgatggaggtgacaaataaaactcgcgcagacgtgaagggcggaacccttacgcagtacgaagggaagctccggcttgtggagatcgcgcaagttccgaaagcccacgtcgatgaattcaaatccgtgtctaagttcaagatcttcaatacaaacaatttgtggatcagcttggcagccgttaaacgactacaggagcaaaacgcaatcgacatggaaatcattgtcaacgccaagactctcgatggtggcctgaatgtcatccaattggagacagctgtcggggcagcaattaagtcgttcgagaactcacttggcataaacgtgcccagatcgcgatttcttcccgtgaagaccacatccgacctcctgttggtgatgtcaaacttatactccctgaacgctgggagcctcaccatgtcggagaagcgggagttccccaccgtcccactggtgaagctgggctctagttttacgaaagtgcaggattatctgaggcggttcgagagtatccctgacatgctcgagctagaccaccttaccgtgtcgggagatgtgacgttcggcaaaaacgtttcgctcaaaggaaccgtgattattatcgcgaaccacggtgatcgcattgatataccccccggggcagtcttagagaataagatcgttagcggcaatcttcgcatccttgatcattag

SEQ ID NO: 279118 - DNA, 453 bp, Artificial Sequence
  derived and/or modified sequence
atgagccaggacggggcgtcacagttccaggaggttatcagacaggaactggagttatcggtgaaaaaagagctcgagaagatcctgaccactgcctcttcccacgaatttgaacacacaaagaaagatctggacggcttccgcaagctgtttcacagattcctccaggagaaggggcctagcgtggattggggaaagatacagaggccaccagaggactctattcagccctacgaaaagatcaaggccagaggactcccggataacatatctagcgtgctaaataaattggttgttgtgaaactgaacggagggctgggcacctccatggggtgtaagggacctaagtcccttatcggggtgcggaacgagaacactttcttggacttaaccgtacaacagattgagcacttgaacaaaacatataacacagatgtacccctggtgctttag

SEQ ID NO: 279119 - DNA, 516 bp, Artificial Sequence
  derived and/or modified sequence
atgtcacaagacggcgcttctcaattccaagaagtgatccgccaggaacttgaacttagtgtgaaaaaagagctcgagaaaattttgactactgcctcttctcacgaattcgagcacacgaagaaggacctagatggcttccgtaaactgttccaccggttcctgcaagaaaaggggcctagcgttgattggggtaagattcagcgccccccggaggacagtatccagccttacgaaaagatcaaggcccgtggactgcccgataatataagcagtgtgttgaataaattggtcgtcgtcaaattaaacggcggtctggggacgtcaatgggctgcaaaggcccgaaaagcttaatcggtgtgcgaaacgaaaacacctttctcgacttaactgtccagcagatcgaacacctcaacaaaacttataacaccgacgtgccactggtgctcatgaactcctttaacactgacgaggacactaagaaaatactccagaagtacaatcattgtcggtag

SEQ ID NO: 279120 - DNA, 318 bp, Artificial Sequence
  derived and/or modified sequence
atgagccaggacggtgccagtcagttccaggaagtgattcgtcaggaacttgaattatcagtgaagaaggagctggagaaaatcctgacgaccgcctcaagccatgaattcgagcacaccaaaaaggacctggatggcttcaggaaactcttccacagattcctgcaggagaagggtccttccgtcgactggggcaaaatacagcgccccccggaggacagtatccagccctacgagaagatcaaggcccgagggctgcctgataacatcagcagtgtgctaaataagcttgtggtggtgaaactcaacggtggatag

SEQ ID NO: 279121 - DNA, 408 bp, Artificial Sequence
  derived and/or modified sequence
atgtctcaggacggtgccagccagttccaggaggtgatccgccaggagttggaactgagcgtgaagaaagaacttgaaaagatcctcactacagcctcctcccatgagtttgaacataccaagaaggacctagatggcttccgtaagctgttccatcgctttctgcaggagaaagggccatcagtggattggggcaagatccagcggccacctgaagattctatccagccgtacgagaagatcaaagcacgcggcttaccggataatatctcatccgtgctaaataagctggtagtagttaagttaaacggggggcttgggactagcatgggttgcaaaggcccaaagagcctgattggcgtacgcaacgagaatacttttctcgatctgacagtgcagcagatctag

SEQ ID NO: 279122 - DNA, 642 bp, Artificial Sequence
  derived and/or modified sequence
atgtcacaagatggggcttcacagtttcaggaggttattaggcaggaattggagctgagtgttaaaaaggagcttgagaaaattctcaccaccgcaagcagtcatgaattcgaacacacaaaaaaggatctggatggattcaggaaactctttcacagatttctgcaagagaaaggcccttcagtcgattgggggaaaatccagcgcccccctgaagattctatccaaccgtatgagaaaattaaagctaggggactgcccgataacattagtagtgtgttaaacaagttggtggtcgtgaaactgaacggggggctcggtaccagtatgggttgtaagggccctaaatcattaattggcgtcaggaatgagaacacgttccttgatcttaccgtgcaacagattgagcacctgaacaaaacttacaacacagatgtgcccttagtgttaatgaactccttcaacacagacgaggacacaaagaaaatcttacaaaaatacaatcactgtagggtcaagatctatacatttaaccagagcaggtaccctcggataaacaaagaatctcttctcccagtggctaaggatgttagctatagcggtgaaaatactgaggcatggtatccaccagggcacggctag

SEQ ID NO: 279123 - DNA, 1494 bp, Artificial Sequence
  derived and/or modified sequence
atgagccaggatggagccagccagttccaggaggtgatccggcaggagctggagctgtctgtgaagaaggagctggagaagatcctgaccacagccagcagccatgaatttgagcacaccaagaaggacctggatggcttcaggaagctgttccaccgcttcctgcaggagaagggccccagcgtggactggggcaagatccagaggcctcctgaggacagcatccagccctatgagaagatcaaggcccggggcctgcctgacaacatcagctctgtgctgaacaagctggtggtggtgaagctgaatggaggcctgggcacctccatgggctgcaagggccccaagagcctgattggagtgagaaatgaaaacaccttcctggacctgactgtgcagcagatcgagcacctgaacaagacctacaacacagatgtgcccctggtgctgatgaacagcttcaacacagatgaggacaccaagaagatcctgcagaagtacaaccactgccgggtgaagatctacaccttcaaccagagccgctacccccgcatcaacaaggagagcctgctgcctgtggccaaggatgtgtcctacagcggggagaacacagaggcctggtacccacctggccacggggacatctatgccagcttctacaacagcggcctgctggacaccttcatcggggagggcaaggagtacatctttgtgagcaacatcgacaacctgggcgccaccgtggacctgtacatcctgaaccacctgatgaaccccccaaatggcaagagatgtgaatttgtgatggaggtgaccaacaagaccagggcagatgtgaagggcggcaccctgacccagtatgagggcaagctgcggctggtggagatcgcccaggtgcccaaggcccacgtggatgagttcaagtctgtgtccaagttcaagatcttcaacaccaacaacctgtggatcagcctggccgctgtgaagaggctgcaggagcagaatgccatcgacatggagatcatcgtgaatgccaagaccctggatggcggcctgaatgtcatccagctggagacagctgtgggcgccgccatcaagagctttgagaacagcctgggcatcaacgtgcccaggagccgcttcctgcctgtgaagaccaccagtgacctgctgctggtgatgagcaacctgtacagcctgaatgccggcagcctgaccatgtctgagaagcgggagttccccaccgtgcccctggtgaagctgggcagcagcttcaccaaggtgcaggactacctgcggagatttgagagcatcccagacatgctggagctggaccacctgactgtgtctggagatgtgaccttcggcaagaatgtgtccctgaagggcaccgtcatcatcatcgccaaccacggggacagaattgacatccccccaggagctgtgctggagaacaagatcgtgtctggcaacctgcgcatcctggaccactag

SEQ ID NO: 279124 - DNA, 453 bp, Artificial Sequence
  derived and/or modified sequence
atgagccaggatggagccagccagttccaggaggtgatccggcaggagctggagctgtctgtgaagaaggagctggagaagatcctgaccacagccagcagccatgaatttgagcacaccaagaaggacctggatggcttcaggaagctgttccaccgcttcctgcaggagaagggccccagcgtggactggggcaagatccagaggcctcctgaggacagcatccagccctatgagaagatcaaggcccggggcctgcctgacaacatcagctctgtgctgaacaagctggtggtggtgaagctgaatggaggcctgggcacctccatgggctgcaagggccccaagagcctgattggagtgagaaatgaaaacaccttcctggacctgactgtgcagcagatcgagcacctgaacaagacctacaacacagatgtgcccctggtgctgtag

SEQ ID NO: 279125 - DNA, 516 bp, Artificial Sequence
  derived and/or modified sequence
atgagccaggatggagccagccagttccaggaggtgatccggcaggagctggagctgtctgtgaagaaggagctggagaagatcctgaccacagccagcagccatgaatttgagcacaccaagaaggacctggatggcttcaggaagctgttccaccgcttcctgcaggagaagggccccagcgtggactggggcaagatccagaggcctcctgaggacagcatccagccctatgagaagatcaaggcccggggcctgcctgacaacatcagctctgtgctgaacaagctggtggtggtgaagctgaatggaggcctgggcacctccatgggctgcaagggccccaagagcctgattggagtgagaaatgaaaacaccttcctggacctgactgtgcagcagatcgagcacctgaacaagacctacaacacagatgtgcccctggtgctgatgaacagcttcaacacagatgaggacaccaagaagatcctgcagaagtacaaccactgcaggtag

SEQ ID NO: 279126 - DNA, 318 bp, Artificial Sequence
  derived and/or modified sequence
atgagccaggatggagccagccagttccaggaggtgatccggcaggagctggagctgtctgtgaagaaggagctggagaagatcctgaccacagccagcagccatgaatttgagcacaccaagaaggacctggatggcttcaggaagctgttccaccgcttcctgcaggagaagggccccagcgtggactggggcaagatccagaggcctcctgaggacagcatccagccctatgagaagatcaaggcccggggcctgcctgacaacatcagctctgtgctgaacaagctggtggtggtgaagctgaatggaggatag

SEQ ID NO: 279127 - DNA, 408 bp, Artificial Sequence
  derived and/or modified sequence
atgagccaggatggagccagccagttccaggaggtgatccggcaggagctggagctgtctgtgaagaaggagctggagaagatcctgaccacagccagcagccatgaatttgagcacaccaagaaggacctggatggcttcaggaagctgttccaccgcttcctgcaggagaagggccccagcgtggactggggcaagatccagaggcctcctgaggacagcatccagccctatgagaagatcaaggcccggggcctgcctgacaacatcagctctgtgctgaacaagctggtggtggtgaagctgaatggaggcctgggcacctccatgggctgcaagggccccaagagcctgattggagtgagaaatgaaaacaccttcctggacctgactgtgcagcagatctag

SEQ ID NO: 279128 - DNA, 642 bp, Artificial Sequence
  derived and/or modified sequence
atgagccaggatggagccagccagttccaggaggtgatccggcaggagctggagctgtctgtgaagaaggagctggagaagatcctgaccacagccagcagccatgaatttgagcacaccaagaaggacctggatggcttcaggaagctgttccaccgcttcctgcaggagaagggccccagcgtggactggggcaagatccagaggcctcctgaggacagcatccagccctatgagaagatcaaggcccggggcctgcctgacaacatcagctctgtgctgaacaagctggtggtggtgaagctgaatggaggcctgggcacctccatgggctgcaagggccccaagagcctgattggagtgagaaatgaaaacaccttcctggacctgactgtgcagcagatcgagcacctgaacaagacctacaacacagatgtgcccctggtgctgatgaacagcttcaacacagatgaggacaccaagaagatcctgcagaagtacaaccactgccgggtgaagatctacaccttcaaccagagccgctacccccgcatcaacaaggagagcctgctgcctgtggccaaggatgtgtcctacagcggggagaacacagaggcctggtacccacctggccacggctag

SEQ ID NO: 279129 - DNA, 1494 bp, Artificial Sequence
  derived and/or modified sequence
atgagccaggacggcgccagccagttccaggaggtgatccggcaggaactcgagctgagtgtgaagaaagagctggagaaaattctgacaactgcaagctcacatgaatttgagcatactaagaaagacttagacgggtttagaaagctgtttcaccgctttctccaggagaagggccccagtgtagattggggaaagatccagagacctcctgaggattctattcaaccctatgaaaagattaaggccagaggacttccggataacatctctagcgtgcttaataagctagtcgtcgtcaagcttaatggagggctagggacctcaatgggttgtaaaggcccaaaatccctgatcggcgtcaggaatgaaaatacgtttctcgacctgacagtgcagcagatcgaacatctgaacaagacgtataacacagatgtgcccctggtgctgatgaattcgttcaacacagatgaggacacaaaaaaaatccttcagaagtataaccattgccgcgtcaagatctacacatttaaccagagtcgataccccaggattaacaaggagagcttgttgcccgtagccaaggatgtgagttactctggcgagaatacagaggcttggtatccgcctggccacggggatatctacgcgagcttttacaactctggactccttgacacttttattggagaaggcaaagagtacatttttgtgtcaaatattgacaacctgggcgcaactgttgatctgtacatcttgaatcacttaatgaatccccccaatggcaagcgctgtgagttcgtgatggaagtgacaaacaagacacgcgctgacgttaaagggggtacactgactcagtacgagggtaagctgaggctggtggagatagctcaggtccctaaggcgcacgtggatgagttcaagtcagtgtccaaattcaaaatctttaacaccaacaacctctggatctctttggctgccgtgaaaagactgcaggagcagaacgccatagatatggagatcatcgtgaacgctaaaacccttgacggcggcttgaacgtgatccagttagagacggccgtgggagccgctattaagtcgttcgagaacagtctgggcataaacgtgccgcgctcccgattcctccccgtgaagacaacatcagatcttctgttagtaatgtcaaatttgtacagtttgaatgcagggagcctgacaatgtctgagaagagggagttcccaacagtccctctggttaagctgggctcctctttcaccaaagtccaggattatctgagacgtttcgagagtattcctgatatgttagagctcgaccacctgacagtgagcggagatgtcacctttgggaaaaatgtcagcttgaaaggaaccgtcattatcattgccaaccacggcgaccgaattgacattcccccgggtgctgtgttggagaacaaaatcgttagtggtaatctacggatccttgaccattag

SEQ ID NO: 279130 - DNA, 1494 bp, Artificial Sequence
  derived and/or modified sequence
atgagccaggacggcgccagccagttccaggaggtgatccggcaggaattagagctcagcgtgaaaaaagagctggagaagattctgactacagcctccagccacgagttcgagcacacaaaaaaagatcttgacggtttcagaaaactgttccacagattcctccaggaaaaaggcccgtcagtggactggggtaagatccagcgaccccctgaagactccatccagccctatgagaaaatcaaggctcgcgggcttcccgataatattagttctgttttaaataaactcgtggttgtaaaacttaacggaggccttgggaccagtatgggatgcaaagggcctaagagcctcatcggtgtcagaaatgagaacaccttcctcgacctgactgtgcaacagattgagcatctgaacaaaacctacaacacagatgtacccttggtgctgatgaacagttttaacactgatgaggacacgaagaagatcctccagaagtacaatcattgtcgcgtgaagatctataccttcaatcagagtcggtaccccagaatcaataaggaaagcttactgccggtggctaaggacgtttcttactctggtgaaaacacagaggcatggtacccgccaggtcatggcgacatctacgcatctttttacaattccggactgctggacacatttatcggggagggcaaagagtacatcttcgtatctaacatcgataatctgggggctaccgtagacttatatatcctcaaccatctgatgaatccgccaaatggtaagaggtgtgagttcgtgatggaggtcactaataaaacccgcgccgacgtcaaagggggcactctgacacagtatgaggggaagctgagattagttgaaatcgctcaggtccctaaggcccacgtggatgaatttaaatcagtgtcgaagttcaagatttttaacacgaataacctttggatcagtctggccgccgttaagcgcctgcaggagcagaacgcaattgatatggagataatcgtcaatgccaagaccctggatggaggcctcaacgtcattcagctcgagactgcggtcggcgctgcaatcaagagcttcgagaactctctgggaataaatgtgcctcggtctcggttcctccccgtcaagacgacatcagatctcctcctggtgatgtccaatctgtactctctgaacgccggatcactgactatgtcagaaaaaagagaatttcccacggtgcccctggtcaaactgggaagcagcttcaccaaggttcaggattaccttcggcgctttgagagcatcccagacatgctcgagctggaccacctgaccgtttccggcgatgtgacattcggaaaaaatgtctccctgaaaggtacggtcatcatcattgcgaaccacggcgataggatcgacataccaccaggtgcagttctggaaaacaaaatcgtatctggaaatctcagaattctcgaccattag

SEQ ID NO: 279131 - DNA, 453 bp, Artificial Sequence
  derived and/or modified sequence
atgagccaggacggcgccagccagttccaggaggtgatccggcaggaattggaactctccgtaaaaaaggagctggagaagatcctcacaacagcaagctctcatgagtttgagcataccaagaaagacttggatgggtttcgcaaactgttccatcgatttcttcaggagaagggtccaagtgtggactggggtaagatacaaagacctccagaagattctatccaaccttacgagaagatcaaggctcgcgggctgcccgacaatatctccagcgtgctcaacaagctggtcgtggtgaagctgaatggagggctggggacctcaatgggctgcaagggtcctaagtcactgataggagtgagaaacgagaacaccttcttagatctcacagtccaacagatcgaacacctgaacaagacctacaacaccgacgtgccactggtcctctag

SEQ ID NO: 279132 - DNA, 516 bp, Artificial Sequence
  derived and/or modified sequence
atgagccaggacggcgccagccagttccaggaggtgatccggcaggaactagagctgagtgtgaagaaggaactagagaagattcttactaccgcttcatcccacgaattcgaacacaccaagaaagacctcgacggcttcagaaagctgttccaccggtttctacaggagaagggcccctcggttgactggggcaagatccagagacctccggaagattctatccagccatacgagaagatcaaagcccggggccttcccgataacatctcatcagtgctgaacaaacttgtagtggtgaagctgaacggtggactcggcacatctatgggatgcaagggccccaagtccttgatcggcgtgcgcaatgagaacacatttctcgacctgaccgtgcaacaaattgagcaccttaacaagacatacaacaccgacgtcccactggtgttgatgaactctttcaacactgatgaggacactaaaaaaattctgcaaaaatataatcactgtcgttag

SEQ ID NO: 279133 - DNA, 318 bp, Artificial Sequence
  derived and/or modified sequence
atgagccaggacggcgccagccagttccaggaggtgatccggcaggaactcgaactgtccgtgaagaaagagttggaaaagattttaacgacagctagcagtcatgaatttgaacacacaaaaaaagacttggatggcttcagaaaactgttccatcgcttcctgcaggagaaaggcccgagtgtcgactgggggaaaattcaacgcccgccagaggattcaattcaaccttatgagaaaattaaggcacggggtctcccggacaacatcagctcagtcctgaacaagctcgtggtggttaagctgaatggcggttag

SEQ ID NO: 279134 - DNA, 408 bp, Artificial Sequence
  derived and/or modified sequence
atgagccaggacggcgccagccagttccaggaggtgatccggcaggaactggaactgtccgtgaaaaaggagctggaaaagattttaactaccgccagctcccacgaattcgaacacactaagaaggacctcgacgggttccggaagttgttccaccgcttcctccaagaaaagggaccctctgtggattggggtaaaattcagaggcctccagaggattccatccagccttacgagaagatcaaggcccgggggctgcctgataacattagctcagtgctgaataaactggtcgtagtaaaattgaatggtggactgggcacgagtatgggctgtaaagggcccaaatcacttataggcgtgcgcaatgaaaacactttcttagacctgacagtacagcagatctag

SEQ ID NO: 279135 - DNA, 642 bp, Artificial Sequence
  derived and/or modified sequence
atgagccaggacggcgccagccagttccaggaggtgatccggcaggagttagaattaagtgtgaagaaggagctggaaaaaattctcaccacggctagctcccatgaatttgagcacacaaagaaggatctggacgggttcaggaagctttttcaccgcttcttgcaggagaaaggcccttctgtggattggggaaagattcagcgcccaccggaggacagtatacaaccatacgaaaagataaaggcccgaggcttgcccgataacatctctagcgtcctgaataagttagttgtcgtaaagctcaacggtggcttaggcaccagtatgggatgcaaaggcccaaagagcttgatcggcgtcagaaacgagaatacatttctagatcttaccgtgcaacaaatcgagcaccttaataagacctataacaccgatgtaccactggtgctgatgaactcattcaatacggacgaggacacgaagaagatcctgcagaaatacaaccactgccgtgtcaagatttacacgtttaaccagtcacgctatccaagaatcaacaaagaatcgttactgcccgttgctaaggacgtgagctacagcggcgagaatacagaggcttggtatccacccgggcacgggtag

SEQ ID NO: 279136 - DNA, 1494 bp, Artificial Sequence
  derived and/or modified sequence
atgagtcaggacggcgcatcccagtttcaagaggttattaggcaggagctggagctgtcagtgaaaaaggaactggagaaaatcctgaccaccgcatcctctcacgagtttgaacataccaaaaaggatctggacggcttcaggaagctttttcataggttcttacaggaaaagggaccctctgtcgactggggaaagatccaaaggccacccgaagattcaatccagccctatgaaaaaatcaaggcacgaggtttgcctgacaatatcagcagcgttctgaataagttggtcgtggttaagctaaacgggggtctagggacttctatggggtgcaagggaccaaagagtctgattggcgtgcggaacgagaacaccttcttggatctcaccgtacagcaaatcgaacatctgaataagacctataatacggatgtcccactggtgctgatgaactccttcaataccgatgaggacactaagaaaatcctgcagaaatataatcactgccgcgtgaagatctataccttcaaccagtctcgctaccccaggatcaacaaggagagcttattgccagtggcaaaagatgtctcttattcgggggaaaatacagaggcatggtatcctcccggacatggtgacatctatgcaagcttctataattccggactgctcgacacgttcattggcgaaggtaaggaatacatatttgtgtcgaacatcgataacctcggagcaacagtggacctctacatactaaaccacctcatgaacccccctaacggcaagagatgcgagtttgtgatggaggtaaccaacaaaacgagggccgacgtcaaagggggaactctcacccagtacgaaggtaagctgagacttgtggaaatcgctcaagtgccaaaggcccacgtggacgagtttaagtccgtttcaaaatttaaaattttcaataccaacaatctgtggatttccctggcggctgtcaagagactgcaggagcaaaacgcaatcgacatggagatcattgttaatgcgaaaacactggatggtgggctgaacgtgatccagctcgaaacagctgtaggtgctgccataaagagcttcgagaactctttggggataaatgtgccacgcagcagattcctcccggtcaagaccacttcagacctattgctggtgatgtcaaacttgtacagtctcaatgccggttctctgacgatgtcggaaaagcgcgaatttccgactgttcctctagtgaagctaggatcatctttcacaaaagtgcaggattatctccgacgcttcgagtcaatcccagatatgctggagcttgaccatctgacagtgtcaggggatgtaaccttcggtaagaatgtatctctgaagggcaccgtcatcatcattgctaaccacggcgaccggattgacattccccctggcgctgtgctggaaaataaaatagtgagcggtaatttgcggatactggaccattag

SEQ ID NO: 279137 - DNA, 1494 bp, Artificial Sequence
  derived and/or modified sequence
atgtcccaggacggagcgtcccagtttcaagaggttatacggcaggaacttgagctatcggtcaagaaggagctcgagaaaattcttactaccgcctcctcacacgagtttgagcatacaaaaaaggatttagatgggttccgtaagctgttccataggttccttcaggaaaaaggccctagcgtagactggggcaaaatccagagacctcccgaagatagcatccagccgtatgagaaaatcaaggcgcgtggactgcctgacaacataagctccgtgctcaacaagctcgtggtggtgaagctgaatggcggactgggtacctccatggggtgtaaaggccctaagtctctgatcggcgtgcgaaacgaaaacactttcctggacttgacagtccagcaaatcgaacacctcaataaaacatacaataccgatgtgcctctggtgttgatgaactcttttaacacagatgaagatactaagaagatcctccagaagtacaatcattgcagggtcaagatctatactttcaatcagagtcgctaccccaggatcaataaggagtccctgctgcctgttgccaaggacgtttcctactccggggaaaatacagaagcttggtatcctcccggacatggagacatttacgcctccttttataattccggcctgctggacacctttatcggagagggcaaggagtatatcttcgtttctaacatcgacaacttaggcgctacagtggatctgtatatcctaaatcatcttatgaacccccctaacgggaaaagatgtgagtttgtaatggaagtcactaataaaacccgggcagacgtgaaggggggaacactgacccaatacgagggcaagctgaggctggtcgaaatcgcacaggtgcctaaggcacatgtggacgagttcaagtccgtgtccaagttcaaaatcttcaatacgaacaacctctggatcagcctggcggcagtgaaaagattgcaggaacagaatgccatcgacatggagattatcgttaatgccaaaacactggatggcggacttaacgtcattcaactggaaactgcagtgggtgccgcaattaagagtttcgaaaattctcttggcatcaacgtccccagatctcgatttctgcccgtaaaaaccacaagcgacctccttctggttatgtctaacctatactctctcaatgcgggaagcctgacaatgtccgaaaaaagagagttccccacagtgcctctggtgaagctgggctctagcttcacaaaagttcaggactatcttagacggttcgagagcatcccagatatgctggaactggaccacctgacagtgtcaggtgacgtgaccttcggaaagaacgtgtccctgaaagggacagtgatcatcatcgctaatcatggtgatcgcatcgatatccccccaggggctgtgttagagaacaaaatcgtgtcagggaatctccggatactggaccactag

SEQ ID NO: 279138 - DNA, 453 bp, Artificial Sequence
  derived and/or modified sequence
atgagtcaagatggcgctagtcagttccaggaggttatcaggcaggaactggaattatccgtgaagaaagaattagaaaaaattctgacaaccgcctctagtcacgagttcgaacacacaaagaaagaccttgacgggttcagaaaattattccaccgattccttcaagagaagggcccaagcgtcgattggggaaagatccagcgaccgcctgaagatagcatccagccatacgagaagattaaggctagaggactaccagataacatttccagcgtgctgaacaagctggtggtcgtaaaactcaatggagggctgggcacgagtatggggtgcaaaggacccaaatcactcattggcgtccgaaacgagaatacatttctagatctgaccgtacaacaaattgaacacttgaacaagacgtacaacactgatgtgcccctggtcctgtag

SEQ ID NO: 279139 - DNA, 516 bp, Artificial Sequence
  derived and/or modified sequence
atgtcccaggacggagcttcgcagtttcaagaagttattcgacaagaattagagctgtccgtgaaaaaggaactcgaaaagattctgaccaccgcatcaagtcacgaatttgaacacacaaaaaaggatctggatgggttcagaaagctgtttcaccgatttttacaggagaaaggtcctagtgtcgactggggcaagatccagaggcctcccgaagattccatccagccatacgaaaaaattaaggcaagaggcctgcccgacaatatatcgtccgtgctgaacaagctcgtagtcgttaagttgaatggcggactgggcactagtatgggatgtaagggccctaagtcccttattggggtccgtaacgaaaatacattcctcgatctgaccgtgcagcagattgagcacttgaacaaaacgtataataccgacgtgcctctcgtgctgatgaacagcttcaacaccgacgaggacaccaagaaaatcctgcaaaagtataaccattgtaggtag

SEQ ID NO: 279140 - DNA, 318 bp, Artificial Sequence
  derived and/or modified sequence
atgagccaagacggagcttcccaattccaggaagttatccggcaggaattagagctgtcggtgaagaaggaactggagaagatcctgaccacagcttcatctcatgaattcgaacacacaaagaaagatctagacggcttcaggaaactgtttcaccgattcttacaggagaaaggaccctctgtggattggggaaagatacagcgacccccagaagacagcatccaaccctacgagaagataaaggccaggggactgccagataacattagctcagtgttaaacaagctggtggtggtgaagctgaacgggggatag

SEQ ID NO: 279141 - DNA, 408 bp, Artificial Sequence
  derived and/or modified sequence
atgagtcaagatggtgcgtctcaattccaggaggtgattcgacaggagctggagttgtccgtcaaaaaagaactggagaaaattctcacaaccgcctcatcgcacgagtttgaacatacaaaaaaggacctggacggttttcgaaagctgtttcacagattcctgcaggaaaaaggcccttccgtcgattggggcaagatacagaggccacctgaggatagcattcagccctacgaaaaaatcaaggccaggggattacccgacaatatcagtagtgtgctgaacaagttagtagtggtgaagctcaatggcggactgggcacgtccatggggtgtaaagggccaaagtccttgatcggtgtgcgcaacgagaatacattccttgatctgacagtgcagcagatctag

SEQ ID NO: 279142 - DNA, 642 bp, Artificial Sequence
  derived and/or modified sequence
atgtctcaagacggtgctagccagtttcaggaggtgattaggcaagagctagagctaagcgtaaaaaaggaactcgaaaagatactaacaacggccagctcacacgagttcgagcatacaaagaaggatctggatgggttccgcaaactttttcataggtttttgcaggagaaaggaccttccgtggattgggggaagatccagagaccacccgaggattccattcagccatatgaaaaaataaaggccagaggtctgccggacaatatcagctctgtgttgaacaaactggtagtggtgaaactgaatggagggttggggacaagtatgggttgcaaaggtccgaaaagcctgattggggtcagaaacgaaaatacctttctcgatctaacagtccagcaaattgaacacctgaacaagacatacaacacggacgtgcctctggttctgatgaattcattcaacactgacgaagataccaaaaagatcctgcagaaatacaaccactgccgggtgaaaatttacactttcaaccagagtagatacccccgtatcaacaaggagagcctgctcccagtcgcaaaagacgtgtcctatagcggcgaaaatacggaggcatggtatccacctggacacggctag

SEQ ID NO: 279143 - protein, 383 aa, Artificial Sequence
  derived and/or modified sequence
MRVAAGARGENIEHLKLRLEARPPTLLLFTEPSEPLPEESKPVEMPFHHCHRDPLPPPGLTPERLHARRQLYAACAVCFVFMAGEVVGGYLAHSLAIMTDAAHLLADVGSMMGSLFSLWLSTRPATRTMTFGWHRSETLGALASVVSLWMVTGILLYLAFVRLLHSDYHIEGGAMLLTASIAVCANLLMAFVLHQAGPPHSHGSRGAEYAPLEEGPEEPLPLGNTSVRAAFVHVLGDLLQSFGVLAASILIYFKPQYKAADPISTFLFSICALGSTAPTLRDVLRILMEGTPRNVGFEPVRDTLLSVPGVRATHELHLWALTLTYHVASAHLAIDSTADPEAVLAEASSRLYSRFGFSSCTLQVEQYQPEMAQCLRCQEPPQA

SEQ ID NO: 279144 - DNA, 1152 bp, Artificial Sequence
  derived and/or modified sequence
atgcgcgttgccgccggagccagaggcgagaacatcgagcatttaaagcttcgcctcgaggcccggccgccaactctactgctcttcaccgagccaagcgagcccctacccgaagaatccaagccagtggagatgccatttcaccactgtcaccgtgaccccctgccgcctccgggactcactcctgagcgactgcacgctcgaaggcaactatacgctgcctgtgccgtgtgtttcgtgtttatggccggcgaggtggtcggaggatacctggcccactccctggcgataatgacagacgctgctcacctactcgccgatgtgggatctatgatgggcagcttatttagcttatggctctccactcgtccagctacgaggacgatgaccttcggatggcaccgaagcgagacactcggcgctttagcctccgtggtgtcattgtggatggtgacaggcattctcctctatctggctttcgtgcggctcttacactccgactatcatatagagggtggtgcgatgttgttgaccgccagtatcgccgtttgtgccaatctgctgatggcatttgtgctgcatcaggctggacctcctcacagccacggatcacgtggagccgaatacgcacccctagaggaagggccggaggaaccacttccacttgggaatacaagtgttagagccgcgtttgtacatgtgctgggtgatctgctccagagtttcggggttctcgccgcttctattctgatctatttcaagccacaatataaagccgctgatcctatctctacctttttattcagtatctgtgcactggggtctacagccccaaccctgcgggacgttttacgaattcttatggaggggactcccaggaatgtgggatttgagcctgttagagacaccctgctttccgtgccaggagtccgcgctacgcacgagctgcacctgtgggccttgacactaacctaccatgtagccagtgctcacctagccattgatagcactgcagatccggaagcagtcctcgcggaggcctcaagcagactttactcacggtttggtttctcgtcgtgtacactgcaggtggagcagtaccagccagaaatggcccaatgtctgaggtgccaggagcctcctcaagcgtag

SEQ ID NO: 279145 - DNA, 1152 bp, Artificial Sequence
  derived and/or modified sequence
atgagggtggccgccggggcccggggggagaacatcgagcacctgaagctgcggctggaggcccggccccccaccctgctgctcttcacagagcccagcgagcccctgcctgaggagagcaagcctgtggagatgcccttccaccactgccaccgggaccccctgcccccacctggcctgaccccagagcggctgcacgcccggcggcagctgtatgctgcctgtgctgtgtgctttgtgttcatggccggggaggtggtgggcggctacctggcccacagcctggccatcatgacagatgctgcccacctgctggctgatgtgggctccatgatgggcagcctcttcagcctgtggctgagcaccaggcctgccaccaggaccatgaccttcggctggcacaggtctgagaccctgggcgccctggcctctgtggtgtccctgtggatggtgacaggcatcctgctgtacctggcctttgtgcggctgctgcacagcgactaccacatcgagggcggggccatgctgctgacagccagcattgctgtgtgtgccaacctgctgatggcctttgtgctgcaccaggccggccccccccacagccacggcagcagaggagcagaatatgcccccctggaggagggccctgaggagcccctgcccctgggcaacacctctgtgcgggccgcctttgtgcacgtgctgggggacctgctgcagagctttggagtgctggccgccagcatcctgatctacttcaagccccagtacaaggctgctgaccccatcagcaccttcctgttcagcatctgtgccctgggcagcacagcccccaccctgagagatgtgctgcgcatcctgatggagggcaccccaagaaatgtgggctttgagcctgtgcgggacaccctgctgtctgtgcctggggtgcgggccacccatgagctgcacctgtgggccctgaccctgacctaccacgtggccagcgcccacctggccatcgacagcacagctgaccctgaggccgtgctggccgaggccagcagccggctgtacagcagatttggcttcagcagctgcaccctgcaggtggagcagtaccagcctgagatggcccagtgcctgcgctgccaggagcccccccaggcctag

SEQ ID NO: 279146 - DNA, 1152 bp, Artificial Sequence
  derived and/or modified sequence
atgcgggtggccgccggcgcccggggcgagaacatcgagcacctgaaactgcgcctggaagcacgtccaccgaccttgctgctattcactgaaccaagcgagcccctccccgaggaatccaagcccgtcgagatgccattccaccactgccaccgagatcccctgcctccacctgggctgactccagagaggcttcacgctcggcggcagctgtatgccgcttgcgctgtctgttttgtgttcatggctggggaggtagttggcgggtacttagctcactctctggccataatgactgatgccgcacatctacttgccgacgtgggcagtatgatgggctctctgttctccctgtggctgagcacccgcccagcaacccggactatgacctttggctggcatcgctccgagactttaggcgcactggccagcgtagtgtctctgtggatggtcacagggatcctgctgtacctagccttcgtgcgcctgctgcacagtgactaccatatagaagggggcgccatgctgttgaccgcgagcattgcagtttgcgctaatctgctcatggcctttgtgctgcaccaagctggacctccacactcacatggcagccgaggggccgaatacgcccccctggaggagggacccgaggaacccctgccactggggaacacatctgtaagggcagcgtttgtgcatgttctgggcgatttacttcaatcattcggagtgctcgcggcatccatcctgatctactttaagccacagtataaagctgctgatccaatatctaccttcctgttttccatctgcgccctcggctcgacggcccccacactgcgcgacgtattgaggatcctaatggagggcacaccccggaatgttgggtttgaaccggtccgggatacccttttatccgtgcctggagtgagagcaacacatgaactgcatctatgggccttgacccttacctaccacgtggctagtgcgcatcttgccatcgactccactgcagaccccgaagccgtgttggccgaggcttcttctcggctgtacagccgttttggcttcagctcttgcacactccaggtggagcagtaccaacctgagatggcccagtgtctcagatgtcaggaacccccacaggcgtag

SEQ ID NO: 279147 - DNA, 1152 bp, Artificial Sequence
  derived and/or modified sequence
atgcgagtggcggctggggctcgcggagaaaatatcgagcatcttaaattaagactcgaggctaggccccctacacttcttctattcaccgaaccgagcgagccattgcctgaagaatccaaacccgtggagatgccttttcatcattgtcacagagatccactgccacccccaggcctgaccccagagcgtttgcatgcgagacgacaactgtacgcggcttgtgcagtatgcttcgtctttatggcaggcgaagtggttggagggtatttggcccatagcctggcaatcatgaccgacgccgcacacctgcttgccgacgtggggagcatgatgggctcactgttcagtctctggctatctaccagacctgcgacaaggactatgacattcgggtggcaccgctctgagaccttgggcgcactggctagcgtggtgagcctgtggatggtgactggcatactgctgtacttggctttcgttcggttgctgcacagcgattaccacatagaggggggagccatgcttctcacagcgagtattgccgtgtgcgccaacctgttaatggcctttgtcctacaccaggctggcccaccacatagccacggcagccgtggcgctgagtatgccccattggaggaagggccagaagagcccctgcctctcggaaatacctctgtgcgggctgcttttgtccacgttttgggagacctcctccagtcctttggcgtgctggctgcctccatactgatctacttcaaacctcagtacaaagcagcagaccccatcagcacgtttctcttctccatttgtgccctggggtcaaccgcaccgacacttagggacgttcttcgcatccttatggaagggacgcccagaaacgtcgggtttgaacctgtccgggacactctcctcagtgtgccgggagtgcgcgctacacatgagctgcacctgtgggccctgactctcacatatcacgtggcgagtgctcacctggctattgattcaacagcagatcctgaagccgtactggccgaagcatctagccgactgtatagtcgttttgggttctcatcctgtaccttacaagtggagcagtaccagcctgagatggcccagtgtcttcgctgtcaagaaccaccgcaggcctag

SEQ ID NO: 279148 - DNA, 590 bp, Artificial Sequence
  derived and/or modified sequence
gagggcttagcaggcctgcggcccaaggcagcgtaggagcgttgctgccaggccttggggcagggattcccaccgagcccctcttccccagcaggagggcaccacccatcttgatggcccaactcactccaggaaacacaatgggtttgctgaccgtggcggatgagagtggcggcaggtgcgaggggagagaacattgagcatttgaagcttcgacttgaggctcggccaccgactttgcttctcttcacagagccctcagagcccctccctgaggagtccaaacctgtggagatgcccttccaccactgccacagggacccccttccgccgccgggccttacccctgagaggctgcatgcacggaggcagctatatgctgcctgtgccgtttgctttgtcttcatggctggggaggtggtcggcgggtatctggcacacagcctggccatcatgaccgatgcagcccacttgctggcggatgtgggcagcatgatgggcagcctcttctccctctggctctccacccgtccagccacccgcaccatgacctttggctggcaccgttcagagactctgggggctttggc

SEQ ID NO: 279149 - DNA, 899 bp, Artificial Sequence
  derived and/or modified sequence
gactgtcacagcttcgagtgcacaatcctcttcccaccccctcccattctacagtggcggcaggtgcgaggggagagaacattgagcatttgaagcttcgacttgaggctcggccaccgactttgcttctcttcacagagccctcagagcccctccctgaggagtccaaacctgtggagatgcccttccaccactgccacagggacccccttccgccgccgggccttacccctgagaggctgcatgcacggaggcagctatatgctgcctgtgccgtttgctttgtcttcatggctggggaggtggtcggcgggtatctggcacacagcctggccatcatgaccgatgcagcccacttgctggcggatgtgggcagcatgatgggcagcctcttctccctctggctctccacccgtccagccacccgcaccatgacctttggctggcaccgttcagagactctgggggctttggcctctgtggtctccctctggatggtcactggcatcctcctgtacctggccttcgtccgcctgctgcacagcgactaccacatcgaggggggtgccatgctgctgaccgccagcatcgcagtctgtgccaacctgttaatggcctttgtgctgcaccaggctgggcccccccacagccacgggtctaggggagcagagtatgcaccgctggaggaggggcctgaagagcccctgcccctggggaacaccagcgtccgggcggcatttgtgcacgtgctgggggacctcctgcagagctttggggtactggctgcctccatcctcatctacttcaagcctcaatacaaggcagccgaccccatcagcaccttcctcttctccatctgtgcccttggatccaccgctcccaccctccgagacgttctt

SEQ ID NO: 279150 - DNA, 1504 bp, Artificial Sequence
  derived and/or modified sequence
aggcagcgtaggagcgttgctgccaggccttggggcagggattcccaccgagcccctcttccccagcaggagggcaccacccatcttgatggcccaactcactccaggaaacacaatgggtttgctgaccgtggcggatgagagtggcggcaggtgcgaggggagagaacattgagcatttgaagcttcgacttgaggctcggccaccgactttgcttctcttcacagagccctcagagcccctccctgaggagtccaaacctgtggagatgcccttccaccactgccacagggacccccttccgccgccgggccttacccctgagaggctgcatgcacggaggcagctatatgctgcctgtgccgtttgctttgtcttcatggctggggaggtggtcggcgggtatctggcacacagcctggccatcatgaccgatgcagcccacttgctggcggatgtgggcagcatgatgggcagcctcttctccctctggctctccacccgtccagccacccgcaccatgacctttggctggcaccgttcagagactctgggggctttggcctctgtggtctccctctggatggtcactggcatcctcctgtacctggccttcgtccgcctgctgcacagcgactaccacatcgaggggggtgccatgctgctgaccgccagcatcgcagtctgtgccaacctgttaatggcctttgtgctgcaccaggctgggcccccccacagccacgggtctaggggagcagagtatgcaccgctggaggaggggcctgaagagcccctgcccctggggaacaccagcgtccgggcggcatttgtgcacgtgctgggggacctcctgcagagctttggggtactggctgcctccatcctcatctacttcaagcctcaatacaaggcagccgaccccatcagcaccttcctcttctccatctgtgcccttggatccaccgctcccaccctccgagacgttcttcgaatcctcatggaaggtaccccccgcaatgtggggttcgaacctgtgcgggatacgctgttgtcggtgccaggagtccgggcaacccatgagctgcacctgtgggcccttacgctcacttaccatgttgcctctgcacacctggccatcgactccaccgctgaccctgaagccgtcctggctgaagcctcatcccggctctactcccggtttggattctccagctgcaccctgcaggtcgagcagtatcagccggagatggcccagtgcctgcgctgccaggaacccccccaagcctgagccatggccctgccctcaccccactgccaggccgaggctcagccccagactctcagcatctgctgccctgatcacagagacgggaccgagccaggtccataccccttcctctctccctcctaccacctgccagtttccccagcctcagccccagccccagccccagtgggcaagaccaaagtgtggcggggagtggggtgggagtcaggggaata

SEQ ID NO: 279151 - DNA, 1152 bp, Artificial Sequence
  derived and/or modified sequence
atgagagtggccgccggcgccagaggcgagaacatcgagcacctgaagctgagactggaggccagaccccccaccctgctgctgttcaccgagcccagcgagcccctgcccgaggagagcaagcccgtggagatgcccttccaccactgccacagagaccccctgcccccccccggcctgacccccgagagactgcacgccagaagacagctgtacgccgcctgcgccgtgtgcttcgtgttcatggccggcgaggtggtgggcggctacctggcccacagcctggccatcatgaccgacgccgcccacctgctggccgacgtgggcagcatgatgggcagcctgttcagcctgtggctgagcaccagacccgccaccagaaccatgaccttcggctggcacagaagcgagaccctgggcgccctggccagcgtggtgagcctgtggatggtgaccggcatcctgctgtacctggccttcgtgagactgctgcacagcgactaccacatcgagggcggcgccatgctgctgaccgccagcatcgccgtgtgcgccaacctgctgatggccttcgtgctgcaccaggccggccccccccacagccacggcagcagaggcgccgagtacgcccccctggaggagggccccgaggagcccctgcccctgggcaacaccagcgtgagagccgccttcgtgcacgtgctgggcgacctgctgcagagcttcggcgtgctggccgccagcatcctgatctacttcaagccccagtacaaggccgccgaccccatcagcaccttcctgttcagcatctgcgccctgggcagcaccgcccccaccctgagagacgtgctgagaatcctgatggagggcacccccagaaacgtgggcttcgagcccgtgagagacaccctgctgagcgtgcccggcgtgagagccacccacgagctgcacctgtgggccctgaccctgacctaccacgtggccagcgcccacctggccatcgacagcaccgccgaccccgaggccgtgctggccgaggccagcagcagactgtacagcagattcggcttcagcagctgcaccctgcaggtggagcagtaccagcccgagatggcccagtgcctgagatgccaggagcccccccaggcctag

SEQ ID NO: 279152 - DNA, 834 bp, Artificial Sequence
  derived and/or modified sequence
ggtctccgctcaacgatccttcctcaaagcatggttgctgagtacccagagttgcgaggagttttttaactgatttagccaggtggcaatcatgagtgaatggatgaagaaaggccccttagaatggcaagattacatttacaaagaggtccgagtgacagccagtgagaagaatgagtataaaggatgggttttaactacagacccagtctctgccaaggttctactgtcacccaggctggaatgcagtggcgagatctcggctctttgtaacctccacctcgcaggttcaagcgattctcctgccttagcctcccgagtagctgggactacaggcatttgccaccacgtctggctaatttttgtattttttgtggagacggggcttcgccatgttgcccagtattgtccttgtgaacttccttgaagatggcagcatgtctgtgaccggaattatgggacatgctgtgcagactgttgaaactatgaatgaaggggaccatagagtgagggagaagctgatgcatttgttcacgtctggagactgcaaagcatacagcccagaggatctggaagagagaaagaacagcctaaagaaatggcttgagaagaaccacatccccatcactgaacagggagacgctccaaggactctctgtgtggctggggtcctgactatagacccaccatatggtccagaaaattgcagcagctctaatgagattattctgtcgcgtgttcaggatcttattgaaggacatcttacagcttcccaatgagaggccaggaagtgtgaacatactgatagaaaaagactatattttatccctcata

SEQ ID NO: 279153 - protein, 707 aa, Artificial Sequence
  derived and/or modified sequence
MSRGYSENNNFLNNNNQMVLDMILYPLIGIPQTINWETIARLVPGLTPKECAKRFDELKSSGSSPVDNQYNSLMAAGESPVETLATYIKSSLLDIHGEFQETPVGHDAVSKTGRHSIASTRNCSSESENCTTHNGGEMTEESEGPNMVIHVCDEAKNLKEDFTCPRDLLISEMKYFAEYLSMDAQRWEEVDISVHCDVHIFNWLIKYIKRNTKENKDCEMPTLEPGNVISILISSEFLKMDSLVEQCIQYCHKNMNAIVATPCNMNCINANLLTRIADLFSHNEVDDLKDKKDKFKSKLFCKKIERLFDPEYLNPDSRSNAATLYRCCLCKKLLTKETERRIPCIPGKINVDRRGNIVYIHIRDKTWDVHEYLNSLFEELKSWRDVYWRLWGTINWLTCSRCYQAFLCIEFSHCQYHSETVVYPTAASSLNTVGTGIYPCCNQKVLRFDPTQLTKGCKVRDHMVTLRDQGEGGDLPSCPTARMLDDLHKYRDVIVVPFSKDTVSDVGVGLCDEKGIECDVLLEPNTPWGPKTGELNAFLSLKNWTLQLKQQSLFSEEEEYTTGSEVTEDEVGDEEEVSKKQRKKEKPKKFTRQPKKQVSSPCAQRKEKALEKSASRDVSPFVMSMQKNKWDATRSLRFNQDAQREDDQRRMTEITGHLIKMRLGDLDRVKSKEAKETDKLRPRDGTVSKSNRKSGLSSVLLMTVLLC

SEQ ID NO: 279154 - DNA, 2124 bp, Artificial Sequence
  derived and/or modified sequence
atgagcagaggctacagcgagaacaacaacttcctgaacaacaacaaccagatggtgctggacatgatcctgtaccccctgatcggcatcccccagaccatcaactgggagaccatcgccagactggtgcccggcctgacccccaaggagtgcgccaagagattcgacgagctgaagagcagcggcagcagccccgtggacaaccagtacaacagcctgatggccgccggcgagagccccgtggagaccctggccacctacatcaagagcagcctgctggacatccacggcgagttccaggagacccccgtgggccacgacgccgtgagcaagaccggcagacacagcatcgccagcaccagaaactgcagcagcgagagcgagaactgcaccacccacaacggcggcgagatgaccgaggagagcgagggccccaacatggtgatccacgtgtgcgacgaggccaagaacctgaaggaggacttcacctgccccagagacctgctgatcagcgagatgaagtacttcgccgagtacctgagcatggacgcccagagatgggaggaggtggacatcagcgtgcactgcgacgtgcacatcttcaactggctgatcaagtacatcaagagaaacaccaaggagaacaaggactgcgagatgcccaccctggagcccggcaacgtgatcagcatcctgatcagcagcgagttcctgaagatggacagcctggtggagcagtgcatccagtactgccacaagaacatgaacgccatcgtggccaccccctgcaacatgaactgcatcaacgccaacctgctgaccagaatcgccgacctgttcagccacaacgaggtggacgacctgaaggacaagaaggacaagttcaagagcaagctgttctgcaagaagatcgagagactgttcgaccccgagtacctgaaccccgacagcagaagcaacgccgccaccctgtacagatgctgcctgtgcaagaagctgctgaccaaggagaccgagagaagaatcccctgcatccccggcaagatcaacgtggacagaagaggcaacatcgtgtacatccacatcagagacaagacctgggacgtgcacgagtacctgaacagcctgttcgaggagctgaagagctggagagacgtgtactggagactgtggggcaccatcaactggctgacctgcagcagatgctaccaggccttcctgtgcatcgagttcagccactgccagtaccacagcgagaccgtggtgtaccccaccgccgccagcagcctgaacaccgtgggcaccggcatctacccctgctgcaaccagaaggtgctgagattcgaccccacccagctgaccaagggctgcaaggtgagagaccacatggtgaccctgagagaccagggcgagggcggcgacctgcccagctgccccaccgccagaatgctggacgacctgcacaagtacagagacgtgatcgtggtgcccttcagcaaggacaccgtgagcgacgtgggcgtgggcctgtgcgacgagaagggcatcgagtgcgacgtgctgctggagcccaacaccccctggggccccaagaccggcgagctgaacgccttcctgagcctgaagaactggaccctgcagctgaagcagcagagcctgttcagcgaggaggaggagtacaccaccggcagcgaggtgaccgaggacgaggtgggcgacgaggaggaggtgagcaagaagcagagaaagaaggagaagcccaagaagttcaccagacagcccaagaagcaggtgagcagcccctgcgcccagagaaaggagaaggccctggagaagagcgccagcagagacgtgagccccttcgtgatgagcatgcagaagaacaagtgggacgccaccagaagcctgagattcaaccaggacgcccagagagaggacgaccagagaagaatgaccgagatcaccggccacctgatcaagatgagactgggcgacctggacagagtgaagagcaaggaggccaaggagaccgacaagctgagacccagagacggcaccgtgagcaagagcaacagaaagagcggcctgagcagcgtgctgctgatgaccgtgctgctgtgctag

SEQ ID NO: 279155 - DNA, 2124 bp, Artificial Sequence
  derived and/or modified sequence
atgtccagggggtactcggagaataataacttcctcaacaataacaaccagatggtgttggatatgatcctgtatccgttgattggcatcccacagacaattaactgggagaccatagccaggctcgttccgggactgacccccaaggagtgcgctaaacgcttcgatgaacttaagagctcaggctccagtccagtggataaccagtataattcactgatggctgccggcgagagtcctgtcgagacgctcgcaacttacattaagtcatcactcctcgatatacacggggaatttcaagagaccccggtcggccacgacgctgtgtcgaagacaggacgccacagtatcgcctctacacggaattgctcttcagaatccgagaactgcactactcataatggcggcgagatgaccgaggaatctgaggggcctaacatggtgatccacgtgtgcgacgaggctaagaacctgaaggaggatttcacatgccctagggatctgctgatatcagaaatgaagtacttcgcggaatacttaagcatggacgcgcagcgatgggaagaggttgacatatctgtgcactgcgacgtccacatttttaactggctcatcaaatatatcaagagaaataccaaagaaaataaggattgtgaaatgcctaccttggagcctggaaacgtgatttctatcctgatctcctctgagttcctcaagatggatagtctggtggagcagtgcattcaatactgtcacaagaacatgaatgcaattgtggctaccccttgtaacatgaactgcattaatgcgaatttgttaacgaggatcgctgatctgttctcccataacgaggtcgacgatttgaaagataagaaagacaagtttaagtccaagctgttttgcaagaaaatcgagaggctattcgatcccgagtacctgaaccccgacagtcggtccaacgcagctacattatacaggtgctgcctgtgcaagaagctcctgactaaagagacagagaggcgcattccatgtattccaggcaaaatcaacgtcgaccgccgtggaaatatcgtgtatatacacatccgggacaaaacgtgggacgttcacgagtacctaaattccctgttcgaggaacttaaatcctggagggacgtgtactggcggctttgggggaccattaactggctaacttgtagcagatgctaccaggcttttctttgcattgagttctcgcactgccagtaccattctgagaccgtagtttacccaaccgccgcctccagcctgaataccgttggcacgggaatctatccttgctgcaatcaaaaagtgttgcggttcgatcctacccaactcacaaagggctgtaaagttagagaccacatggtcactctgagggaccagggggagggcggtgacctgcccagttgtccaactgctaggatgttagacgaccttcacaagtatcgcgatgtgattgtcgtcccattctccaaggatacagtatctgacgtgggtgtagggctttgtgatgagaaagggatcgaatgtgacgtcttgctagaaccgaataccccttggggaccaaagactggagagctgaacgcgtttctgtcccttaagaactggacactccaactgaaacagcaatccctcttctcagaggaggaggaatataccactggtagtgaggtgaccgaagacgaggtcggggacgaggaggaggtctcaaagaaacagcggaaaaaagagaagcctaagaaatttacaagacagccaaagaagcaagtatctagtccttgcgctcaaaggaaggaaaaggcccttgagaagtcagctagccgggatgtctccccattcgtgatgtcgatgcagaagaacaaatgggatgctacacgcagcttgcgctttaaccaggacgcccagagagaagatgaccagaggagaatgaccgaaattactggacacctgatcaagatgaggctgggagacctggaccgcgtaaagtctaaagaagctaaagagactgacaagctccgaccacgagatggtactgtgtctaagagcaacaggaagagcggtctgtcttcagtcttactcatgacggtgctcctgtgctag

SEQ ID NO: 279156 - DNA, 2124 bp, Artificial Sequence
  derived and/or modified sequence
atgagccggggctacagcgagaacaacaacttcctgaacaacaacaaccagatggtgctggacatgatcctgtaccccctcatcggcatcccccagaccatcaactgggagaccatcgcccggctggtgcccggcctgacccccaaggaatgtgccaagagatttgatgagctgaagagcagcggcagcagccctgtggacaaccagtacaacagcctgatggccgccggggagagccctgtggagaccctggccacctacatcaagagcagcctgctggacatccacggggagttccaggagacccctgtgggccatgatgctgtgtccaagacaggccgccacagcatcgccagcaccaggaactgcagcagcgagagcgagaactgcaccacccacaacggcggggagatgacagaggagagcgagggccccaacatggtgatccacgtgtgtgatgaggccaagaacctgaaggaggacttcacctgcccccgggacctgctgatcagcgagatgaagtactttgctgagtacctgtccatggatgcccagcgctgggaggaggtggacatctctgtgcactgtgatgtgcacatcttcaactggctgatcaagtacatcaagaggaacaccaaggagaacaaggactgtgagatgcccaccctggagcctggaaatgtcatcagcatcctgatcagcagcgagttcctgaagatggacagcctggtggagcagtgcatccagtactgccacaagaacatgaatgccatcgtggccaccccctgcaacatgaactgcatcaatgccaacctgctgaccagaattgctgacctcttcagccacaatgaggtggatgacctgaaggacaagaaggacaagttcaagagcaagctgttctgcaagaagattgaaagactctttgatcctgagtacctgaacccagacagccgcagcaatgctgccaccctgtaccgctgctgcctgtgcaagaagctgctgaccaaggagacagagcggcgcatcccctgcatccctgggaagatcaacgtggacagaagaggcaacatcgtgtacatccacatccgggacaagacctgggatgtgcatgagtacctgaacagcctgtttgaggagctgaagtcctggagagatgtgtactggaggctgtggggcaccatcaactggctgacctgcagccgctgctaccaggccttcctgtgcatcgagttcagccactgccagtaccacagcgagaccgtggtgtaccccacagctgccagcagcctgaacacagtgggcaccggcatctacccctgctgcaaccagaaggtgctgcgctttgaccccacccagctgaccaagggctgcaaggtgcgggaccacatggtgaccctgcgggaccagggcgagggcggggacctgcccagctgccccacagccaggatgctggatgacctgcacaagtacagagatgtgattgtggtgcccttcagcaaggacacagtgtctgatgtgggcgtgggcctgtgtgatgagaagggcattgaatgtgatgtgctgctggagcccaacaccccctggggccccaagacaggagagctgaatgccttcctgagcctgaagaactggaccctgcagctgaagcagcagagcctcttcagcgaggaggaggagtacaccaccggcagcgaggtgacagaagatgaggtgggagatgaggaggaggtgtccaagaagcagaggaagaaggagaagcccaagaagttcacccggcagcccaagaagcaggtgagcagcccctgtgcccagaggaaggagaaggccctggagaagagcgccagcagagatgtgagcccctttgtgatgtccatgcagaagaacaagtgggatgccaccaggagcctgcgcttcaaccaggatgcccagagagaagatgaccagaggaggatgacagagatcaccggccacctgatcaagatgaggctgggggacctggacagagtgaagagcaaggaggccaaggagacagacaagctgcggcccagagatggcaccgtgtccaagagcaacaggaagagcggcctgagctctgtgctgctgatgacagtgctgctgtgctag

SEQ ID NO: 279157 - DNA, 2124 bp, Artificial Sequence
  derived and/or modified sequence
atgagccggggctacagcgagaacaacaacttcctgaacaacaacaaccagatggtcctcgatatgatcctctacccacttattggaatccctcagacaattaattgggaaaccattgctcgtctggttcctggcctcaccccgaaggaatgcgcaaaacgctttgacgagctgaaatccagcggcagcagtccagtggacaaccagtataactcgctgatggcagcaggggagagcccggtcgagactctggccacctacattaagagtagccttctggacatacacggcgagtttcaggaaaccccagtcggccacgatgctgtgagcaagaccggacgccatagcattgcctccacccgtaactgcagcagtgaatctgaaaattgtactacacacaacggtggcgaaatgacagaggagtccgaggggcctaatatggtgatccatgtctgcgacgaggcaaagaatttgaaagaggattttacttgtccacgggacttgcttatctcagagatgaaatacttcgctgagtacttgtctatggatgcccaacgctgggaagaggtagatatctcggtgcactgcgatgtacacatcttcaattggttgattaaatacataaaacgcaacactaaggagaataaagattgcgaaatgccaaccttagagcctggtaatgtgataagcatcctcatttccagcgagtttctgaagatggattctctcgtggaacagtgtattcagtactgccataaaaacatgaatgcaatcgtcgctacaccatgtaatatgaactgcattaatgcgaatctgctgacaaggatcgctgacctgtttagccacaacgaagtggacgatctcaaggacaaaaaggacaagttcaaaagtaaactgttctgcaagaaaattgaaaggctttttgatcccgagtatcttaacccagactcccggtccaatgcagccacactgtatcgatgctgcctctgcaaaaagctcctgactaaagagacagaaagacgtattccatgcattccaggcaaaataaatgtagaccgccgaggcaacatagtttacatacatatacgggacaaaacatgggacgttcacgagtatctgaattctttgtttgaagagctgaagagttggcgcgatgtttattggagactttggggcaccatcaattggctgacctgcagtaggtgctaccaggcgtttttgtgcatagaatttagtcactgccaataccactccgagactgtagtgtatccaacagccgctagctcgcttaatactgtgggtactggaatctacccctgttgtaaccagaaggtgctccgcttcgaccctacccagttgactaagggctgcaaagtgagagatcatatggtgacactgagagatcagggggagggaggggatctgccttcctgtcctaccgccaggatgttggacgatctccataaatacagggatgtgatcgttgttccattctccaaggatacggtgagcgatgtgggggtagggctgtgtgacgagaaagggatcgaatgcgacgtcctgctggaacctaatactccttggggaccgaaaactggagaacttaatgctttcctgtccctgaagaattggacactacaactaaagcaacagagtctgttctcagaggaggaggagtataccacaggatccgaggtgactgaggatgaggtgggggacgaggaggaggtctccaagaagcagaggaagaaggagaagccaaaaaaatttactaggcagcctaaaaaacaggtaagttccccctgtgcccagcgcaaggagaaagccctggagaaatcagcctctcgggacgtctcacccttcgtgatgagtatgcagaaaaacaagtgggatgcgacaaggtctcttcgcttcaaccaagacgctcagcgcgaggatgaccagcgcagaatgacagaaataaccggccatctgatcaaaatgcggttaggggatctggatcgggtcaagagcaaggaagccaaggagactgacaagctgcggccccgggacgggactgtatctaaatcgaatcggaaaagtggactgagctccgttttgctgatgacagtgctcctttgctag

SEQ ID NO: 279158 - DNA, 2124 bp, Artificial Sequence
  derived and/or modified sequence
atgtcaagaggatactccgaaaacaacaattttcttaataataataatcagatggtcttggacatgattctctaccccctgataggtattcctcaaactataaattgggagacgatcgccagattagtgccgggtctgacccccaaggaatgtgccaagcgctttgatgaactcaagtcgtctggctctagtcctgtggataaccagtataattctctcatggccgcaggagaaagcccagtcgaaacgttggcaacatacattaagtcctccctgctggacattcatggagaatttcaggaaacccccgtaggacacgacgccgtgtcaaaaacgggccgtcatagcatcgccagtaccaggaattgcagcagcgagagcgaaaactgtactacacataacggcggagagatgactgaggagtcggaggggccaaatatggtgattcacgtctgcgatgaggcgaaaaatcttaaggaagactttacttgcccacgcgatctgctaatatctgagatgaaatattttgcggaatatctcagtatggatgctcagcgctgggaagaagttgatatctccgtgcattgcgacgtccacatttttaactggctcatcaagtacatcaagaggaacaccaaagaaaataaggactgtgagatgccgactctcgaacctggcaatgtcatctccattctgattagttccgagtttctcaagatggacagcctggtggagcagtgtattcagtattgccacaagaacatgaacgccatcgttgccacgccctgcaatatgaactgtatcaatgccaatcttttaactcgcatcgccgacctattctcgcacaatgaggttgacgacctcaaggacaagaaggacaaattcaaatctaagcttttctgtaagaagattgagagactctttgaccctgagtacctgaatcccgatagcaggtcaaatgctgcgacgctgtataggtgctgcctgtgcaaaaaattgctgaccaaggaaactgaacgaaggataccgtgcatacccggaaaaatcaatgttgaccgcagaggaaacattgtgtacattcacatcagggataaaacatgggatgtgcatgagtatttaaacagtctctttgaagagctaaagtcttggcgagatgtctattggagactttggggtactatcaactggctgacctgctctagatgctaccaggcattcctctgcatcgaattcagtcactgccagtaccactcagaaacagtagtgtaccccacagccgcaagcagcctcaataccgtcggcactggaatatacccctgttgcaaccagaaagtcctgagattcgacccaacacaattgaccaaagggtgcaaggtcagggatcacatggtgactttgagagaccagggggagggtggagatctccccagctgcccaaccgccagaatgcttgatgatctacacaagtatagagacgtcatcgtggtgccattttctaaggatacagtcagcgacgtaggggtcggactttgcgatgaaaagggtattgaatgtgacgtgttgctggaacctaatacaccgtggggtcccaaaaccggtgagctgaacgcttttttatccctgaaaaattggacattgcagctgaaacagcagtcattgttctctgaagaagaggagtacaccacaggatctgaagtaaccgaagacgaggtgggggacgaggaggaggtgtccaaaaagcagcggaaaaaggaaaagccgaagaaattcacaagacagccaaagaagcaggttagtagcccttgtgcccagcggaaagagaaagccctcgagaagagcgctagccgcgatgtgagccccttcgtgatgagcatgcagaagaacaagtgggatgctacgcgctctctgcggtttaatcaagatgcccaacgggaagacgatcaacgtcggatgacagaaataacgggccacctgatcaagatgaggctgggcgatctcgaccgtgtgaaatcgaaagaggcgaaggagactgacaagctaagaccccgtgatggcactgttagcaagagtaatcggaagagtgggctgagcagtgtcctgctcatgactgtgctcctctgctag

SEQ ID NO: 279159 - DNA, 3116 bp, Artificial Sequence
  derived and/or modified sequence
acccgcccggtccatgtccctgcagaccgtcccgcccgcgcacagcggcgggaaccccagcttctgcgcgcccggccgcgccccgggcctctgccccgcctcgctcccgctgcccggcgcctttgtccgctctgcgcccctggagtttctgtgcctccacgggcgggagcggggcgcgaaggtctgggggtgccccgaggacgcgccgcgtagtgagcctccgggcccaagatgaggaaattgaggcacagagattaactaatctgaaccagataatgccataagtagtagaactgcgatgcaaacttggacagtctgactccagagtctgcacacttaaccactccactattctggccttctacaagttccaaaagatgagtcgtggatattcagaaaacaacaatttcctgaacaataataaccaaatggtattggacatgatcctttatccattaattggaatccctcagactatcaactgggaaactatagcaaggctcgtgcctggattaacaccaaaagagtgtgcaaaaaggtttgatgaattaaagagcagtggaagctcgcctgttgacaaccagtataattccctaatggctgctggagagagtcctgttgaaactttagccacatatatcaaatcctcacttcttgacatacatggagaatttcaggagactccagttggacatgatgcagtttccaaaactggaagacatagtatagcttccacaaggaattgttcttcagaaagtgaaaattgtactactcataatggtggagaaatgactgaagaatctgaagggccaaacatggtgatccatgtgtgtgatgaagcaaaaaacttgaaagaagattttacttgcccgcgagatcttttgatatcagaaatgaagtactttgctgaatatttatctatggatgcccagcgctgggaagaggtggacatttcagttcattgcgacgttcacattttcaactggttgataaaatacattaaaaggaacactaaggagaataaagattgtgagatgcccactttagagccaggaaatgtcatttcaattcttatttcttcggagtttttaaaaatggattcactagttgaacagtgtattcagtattgccacaaaaatatgaatgccatagtagctaccccatgcaacatgaactgtattaatgcaaatcttctcacacgtatagctgatctgttctcacacaatgaagttgatgatttaaaggacaaaaaagataaatttaaaagcaaacttttttgtaagaagattgaaagactgtttgatcctgagtacttgaatccagattctcggagtaatgcagcaacattgtatagatgctgtttgtgtaagaaacttttaacaaaagaaacagaaagaagaattccttgcattcctggaaaaatcaatgtggatcgacgtggaaatattgtctatattcacataagagataagacatgggatgttcatgagtatttgaatagtcttttcgaagaattaaaatcttggagagatgtatactggcgattgtggggaacaatcaattggctgacttgttcaagatgttatcaggcctttctctgtattgaattttcacattgtcaataccactcagaaacagtggtttatcctactgcagcaagttcattgaatactgttggcactggaatttatccctgctgtaaccaaaaggttcttcggtttgatcctactcagcttacaaagggctgtaaagtgagggaccacatggttacacttcgtgatcaaggtgaaggcggagatttgccgtcctgtcccactgctagaatgttggacgatttgcacaagtacagagatgtcattgttgtgcctttttcaaaagatacagttagtgatgttggggttggcctctgtgatgaaaagggtatagaatgtgatgttttactggagccaaatacaccatggggtcccaaaactggggagctcaatgctttcttgtcattgaaaaactggactctacaactgaaacaacagtcactgttttcagaagaagaagaatataccactggatctgaggtcactgaagatgaagttggagatgaagaagaagtatccaagaaacaaaggaaaaaggagaagccaaagaagttcactagacaaccaaaaaagcaggtatcttcaccctgtgcccagaggaaagaaaaggcattggagaagtcagcttctagagatgtgtctcctttcgttatgagtatgcagaagaataagtgggatgccacaagatccttgagattcaaccaggatgcacaaagagaagacgatcaacggcgaatgactgaaattacagggcacctaataaaaatgagattgggggatctggaccgagtcaagtcaaaggaagcaaaagaaacagacaaactgagacccagagacggcactgtgtctaagagcaacagaaaaagtggtttgagcagtgtgctcttgatgacagtgttgctgtgttaaacgaattaatacatgaaaggacttggaatactgcttgacatatcgtgaggcagagacacaaagatatggaagaacattggacagatttacatcgatatattaattaaggtgatttcagagttggagcaggagaggaagccttatagatatttttttttctttttgcttgcttgtattttctttttaattattattcagtatttcaagtagacagaaaagtacagaggataatacaacaaatatccaggtacccaccacccagcatttttacatagtagcatttgatgttttgaaataagacataaaacattccaaataccctatcaccgaggatcctgcatcctcttcttttcccagaagtgaacatttctctgaatttgatgcttattatgcccatgcatgttgttatacttttactacatattttatgtagctacagcataatatgctatgtttactttatatagtgacctcatactatacatatcctcatgcaattttttagactctgtttgagaattatatattttgattcaggtagcttaagtttattttagctactcagtagtaatgtattctattaatctactaatatatatttcttgtctatggaca

SEQ ID NO: 279160 - protein, 1441 aa, Artificial Sequence
  derived and/or modified sequence
MSGLGDSSSDPANPDSHKRKGSPCDTLASSTEKRRREQENKYLEELAELLSANISDIDSLSVKPDKCKILKKTVDQIQLMKRMEQEKSTTDDDVQKSDISSSSQGVIEKESLGPLLLEALDGFFFVVNCEGRIVFVSENVTSYLGYNQEELMNTSVYSILHVGDHAEFVKNLLPKSLVNGVPWPQEATRRNSHTFNCRMLIHPPDEPGTENQEACQRYEVMQCFTVSQPKSIQEDGEDFQSCLICIARRLPRPPAITGVESFMTKQDTTGKIISIDTSSLRAAGRTGWEDLVRKCIYAFFQPQGREPSYARQLFQEVMTRGTASSPSYRFILNDGTMLSAHTKCKLCYPQSPDMQPFIMGIHIIDREHSGLSPQDDTNSGMSIPRVNPSVNPSISPAHGVARSSTLPPSNSNMVSTRINRQQSSDLHSSSHSNSSNSQGSFGCSPGSQIVANVALNQGQASSQSSNPSLNLNNSPMEGTGISLAQFMSPRRQVTSGLATRPRMPNNSFPPNISTLSSPVGMTSSACNNNNRSYSNIPVTSLQGMNEGPNNSVGFSASSPVLRQMSSQNSPSRLNIQPAKAESKDNKEIASILNEMIQSDNSSSDGKPLDSGLLHNNDRLSDGDSKYSQTSHKLVQLLTTTAEQQLRHADIDTSCKDVLSCTGTSNSASANSSGGSCPSSHSSLTERHKILHRLLQEGSPSDITTLSVEPDKKDSASTSVSVTGQVQGNSSIKLELDASKKKESKDHQLLRYLLDKDEKDLRSTPNLSLDDVKVKVEKKEQMDPCNTNPTPMTKPTPEEIKLEAQSQFTADLDQFDQLLPTLEKAAQLPGLCETDRMDGAVTSVTIKSEILPASLQSATARPTSRLNRLPELELEAIDNQFGQPGTGDQIPWTNNTVTAINQSKSEDQCISSQLDELLCPPTTVEGRNDEKALLEQLVSFLSGKDETELAELDRALGIDKLVQGGGLDVLSERFPPQQATPPLIMEERPNLYSQPYSSPSPTANLPSPFQGMVRQKPSLGTMPVQVTPPRGAFSPGMGMQPRQTLNRPPAAPNQLRLQLQQRLQGQQQLIHQNRQAILNQFAATAPVGINMRSGMQQQITPQPPLNAQMLAQRQRELYSQQHRQRQLIQQQRAMLMRQQSFGNNLPPSSGLPVQMGNPRLPQGAPQQFPYPPNYGTNPGTPPASTSPFSQLAANPEASLANRNSMVSRGMTGNIGGQFGTGINPQMQQNVFQYPGAGMVPQGEANFAPSLSPGSSMVPMPIPPPQSSLLQQTPPASGYQSPDMKAWQQGAIGNNNVFSQAVQNQPTPAQPGVYNNMSITVSMAGGNTNVQNMNPMMAQMQMSSLQMPGMNTVCPEQINDPALRHTGLYCNQLSSTDLLKTEADGTQQVQQVQVFADVQCTVNLVGGDPYLNQPGPLGTQKPTSGPQTPQAQQKSLLQQLLTE

SEQ ID NO: 279161 - DNA, 6895 bp, Artificial Sequence
  derived and/or modified sequence
ttccagttacagctatatcagagaatgagttaatctcctcagaaatcactaaatactactctgaggggcttagaaattaacaggttgtttatataattggccttaaatgaggtgagagtgaagagactagagccatctctggaaaacatcattatcccattccccgggaagctaccctctggaactcaagatttgaccatatctgttttgaggattcattatgaacaaagaagtctcccaggtgtgaagtttttcaacatgagtggcctcggggacagttcatccgaccctgctaacccagactcacataagaggaaaggatcgccatgtgacacactggcatcaagcacggaaaagaggcgcagggagcaagaaaataaatatttagaagaactagctgagttactgtctgccaacattagtgacattgacagcttgagtgtaaaaccagacaaatgcaagattttgaagaaaacagtcgatcagatacagctaatgaagagaatggaacaagagaaatcaacaactgatgacgatgtacagaaatcagacatctcatcaagtagtcaaggagtgatagaaaaggaatccttgggacctcttcttttggaggctttggatggatttttctttgttgtgaactgtgaagggagaattgtatttgtgtcagagaatgtaaccagctacttaggttacaatcaggaggaattaatgaatacgagcgtctacagcatactgcacgtgggggatcatgcagaatttgtgaagaatctgctaccaaaatcactagtaaatggagttccttggcctcaagaggcaacacgacgaaatagccatacctttaactgcaggatgctaattcaccctccagatgagccagggaccgagaaccaagaagcttgccagcgttatgaagtaatgcagtgtttcactgtgtcacagccaaaatcaattcaagaggatggagaagatttccagtcatgtctgatttgtattgcacggcgattacctcggcctccagctattacgggtgtagaatcctttatgaccaagcaagatactacaggtaaaatcatctctattgatactagttccctgagagctgctggcagaactggttgggaagatttagtgaggaagtgcatttatgcttttttccaacctcagggcagagaaccatcttatgccagacagctgttccaagaagtgatgactcgtggcactgcctccagcccctcctatagattcatattgaatgatgggacaatgcttagcgcccacaccaagtgtaaactttgctaccctcaaagtccagacatgcaacctttcatcatgggaattcatatcatcgacagggagcacagtgggctttctcctcaagatgacactaattctggaatgtcaattccccgagtaaatccctcggtcaatcctagtatctctccagctcatggtgtggctcgttcatccacattgccaccatccaacagcaacatggtatccaccagaataaaccgccagcagagctcagaccttcatagcagcagtcatagtaattctagcaacagccaaggaagtttcggatgctcacccggaagtcagattgtagccaatgttgccttaaaccaaggacaggccagttcacagagcagtaatccctctttaaacctcaataattctcctatggaaggtacaggaatatccctagcacagttcatgtctccaaggagacaggttacttctggattggcaacaaggcccaggatgccaaacaattcctttcctcctaatatttcgacattaagctctcccgttggcatgacaagtagtgcctgtaataataataaccgatcttattcaaacatcccagtaacatctttacagggtatgaatgaaggacccaataactccgttggcttctctgccagttctccagtcctcaggcagatgagctcacagaattcacctagcagattaaatatacaaccagcaaaagctgagtccaaagataacaaagagattgcctcaattttaaatgaaatgattcaatctgacaacagctctagtgatggcaaacctctggattcagggcttctgcataacaatgacagactttcagatggagacagtaaatactctcaaaccagtcacaaactagtgcagcttttgacaacaactgccgaacagcagttacggcatgctgatatagacacaagctgcaaagatgtcctgtcttgcacaggcacttccaactctgcctctgctaactcttcaggaggttcttgtccctcttctcatagctcattgacagaacggcataaaattctacaccggctcttacaggagggtagcccctcagatatcaccactttgtctgtcgagcctgataaaaaggacagtgcatctacttctgtgtcagtgactggacaggtacaaggaaactccagtataaaactagaactggatgcttcaaagaaaaaagaatcaaaagaccatcagctcctacgctatcttttagataaagatgagaaagatttaagatcaactccaaacctgagcctggatgatgtaaaggtgaaagtggaaaagaaagaacagatggatccatgtaatacaaacccaaccccaatgaccaaacccactcctgaggaaataaaactggaggcccagagccagtttacagctgaccttgaccagtttgatcagttactgcccacgctggagaaggcagcacagttgccaggcttatgtgagacagacaggatggatggtgcggtcaccagtgtaaccatcaaatcggagatcctgccagcttcacttcagtccgccactgccagacccacttccaggctaaatagattacctgagctggaattggaagcaattgataaccaatttggacaaccaggaacaggcgatcagattccatggacaaataatacagtgacagctataaatcagagtaaatcagaagaccagtgtattagctcacaattagatgagcttctctgtccacccacaacagtagaagggagaaatgatgagaaggctcttcttgaacagctggtatccttccttagtggcaaagatgaaactgagctagctgaactagacagagctctgggaattgacaaacttgttcaggggggtggattagatgtattatcagagagatttccaccacaacaagcaacgccacctttgatcatggaagaaagacccaacctttattcccagccttactcttctccttctcctactgccaatctccctagccctttccaaggcatggtcaggcaaaaaccttcactggggacgatgcctgttcaagtaacacctccccgaggtgctttttcacctggcatgggcatgcagcccaggcaaactctaaacagacctccggctgcacctaaccagcttcgacttcaactacagcagcgattacagggacaacagcagttgatacaccaaaatcggcaagctatcttaaaccagtttgcagcaactgctcctgttggcatcaatatgagatcaggcatgcaacagcaaattacacctcagccacccctgaatgctcaaatgttggcacaacgtcagcgggaactgtacagtcaacagcaccgacagaggcagctaatacagcagcaaagagccatgcttatgaggcagcaaagctttgggaacaacctccctccctcatctggactaccagttcaaatggggaacccccgtcttcctcagggtgctccacagcaattcccctatccaccaaactatggtacaaatccaggaaccccacctgcttctaccagcccgttttcacaactagcagcaaatcctgaagcatccttggccaaccgcaacagcatggtgagcagaggcatgacaggaaacataggaggacagtttggcactggaatcaatcctcagatgcagcagaatgtcttccagtatccaggagcaggaatggttccccaaggtgaggccaactttgctccatctctaagccctgggagctccatggtgccgatgccaatccctcctcctcagagttctcttctccagcaaactccacctgcctccgggtatcagtcaccagacatgaaggcctggcagcaaggagcgataggaaacaacaatgtgttcagtcaagctgtccagaaccagcccacgcctgcacagccaggagtatacaacaacatgagcatcaccgtttccatggcaggtggaaatacgaatgttcagaacatgaacccaatgatggcccagatgcagatgagctctttgcagatgccaggaatgaacactgtgtgccctgagcagataaatgatcccgcactgagacacacaggcctctactgcaaccagctctcatccactgaccttctcaaaacagaagcagatggaacccagcaggtgcaacaggttcaggtgtttgctgacgtccagtgtacagtgaatctggtaggcggggacccttacctgaaccagcctggtccactgggaactcaaaagcccacgtcaggaccacagaccccccaggcccagcagaagagcctccttcagcagctactgactgaataaccacttttaaaggaatgtgaaatttaaataatagacatacagagatatacaaatatattatatatttttctgagatttttgatatctcaatctgcagccattcttcaggtcgtagcatttggagcaaaaaaaaaaaaaaaaaaaaaaaaaggagtttgcttttgtcgggagattgaaagatgtttttgtttctttctttgtaaaggccttggatattgaaaaaataccaaggcagaacagttggacaatctatttcttgagccaaatttaattattcttatttttgtaatcagtcattggcttcttatctggatgaaggcttttggaggagaaccaaaacgacaagttccaagaagaagatgaagctccgcctccgccgcttagtcccaaccctgcccaggaagaagggcccgtggggctttgcctgtgcccgtccaccaaaggctgtcatgtgtctcgaaatcagcagccctccccatcccaatcccaggcagcttgtgtgtacaatcagcttctctagcaactctgtatctgttggcttcaagagaatattttgcctccacatatgtaccccttctcctttttttaaagatggatttaaaccaagatgcctccaggaaagaggacgaaatgagtatattcacagaggaatccaaaaaatacagtttgggggaaaatgcaataatttttgatgagatgggtgaaggacaagaagtgagttgtgtcaattattgtagatacaattttctgattaaatctggaaaaataaaaggcagcctgttttttctgcttttattgtattaacagctgaggtagctaaagttatttaaaataaaattaaatttatgatccaagtagcttatttttccctttaaatctcattgtaaatatatttgatttcttgtagaaattgatttccttctgtttaattttatgcttttattatactcttgatttttctaaatttgtgtgtgaaatataacattgattgaattgcagttacatttggttagtaatatttcattattttaataactgtgatgtcatgtatggatttactttggggttcaaatcaaaatgtcactgccagaaagagctgttccagctgatctagagcatactgccctagagtgtccctgggatcatctgaacagaagtgcacaggctacttgtacagagaaaaaattaatactcaaaggaaatcttcattttttagattgactttgggaatttgaattttcatcagtgcaaatataaatttctctatcctgctctgaggctaattggtaccatattttccctttgtgtcttgtgactctgccacatcccatctcatcctggcctctgagtcaagaacccagtgaactgactttctagttctagaagttccgctgcaaggccaggaaagcttgagaaaggtattgtggaagaagcaaaggtagacccccatcactcacctttgtctgcatccctgggcctgtgaatgatgacagcacctgacattctgcaccagctacctctgcctccatggcagagaaaaggccataagaacagtggaagaggagcatggactcagacttcaaggaagaagccatttccccaggtccttccttctgcatctcaccacccctagttacaaataactccattgaacagcatctattcagaaactatgccgaataaaaagattggtggaagggctcatgtggttagcaactatgaaacagaaataggacactcagttacaaacattatctcctttagtttttcagaaaatgcatccctgatttcattcatttccagcttgaaagccagccatattactctagtccctaccaaactgctctagaaggtcatttccattttgtttgtgatatttagacgcgcagacttcaggaagttcacctttaacttcagcattccagatgaagtttcctgactcagtgcttttgcataaggaactagaaaaaaaaagtaaggaaaattggagatgctaacatcctcccccatcccaactgcaccttaaaatatgcatgtcaccttcaaggttttataattgcactgtttgttttatgtatgtacagattaaaattattgctacatttgaggaaaataaaattgcttgcttctatgtaattcctgtcattccacaggaaattcacttttccagctactgaatagaatttgtttaacaacctcatgggttgcctcttcatttacagggaagaaatgaaatgtacatctgcagaaattgccaaagcccaaattaacgagtattataaaaggataataaagcatccctgaagccaaa

SEQ ID NO: 279162 - DNA, 4326 bp, Artificial Sequence
  derived and/or modified sequence
atgtcgggattaggtgatagctcgtccgatccagcaaacccggactctcacaagcgtaagggatcgccctgcgacacccttgccagcagcactgagaaacgtagacgggaacaagagaacaaatacttggaggagctggcagagttgcttagcgctaacatttccgacatagattccctaagcgtgaagcctgacaagtgcaagattcttaaaaagaccgtggaccagatccagctgatgaagaggatggagcaggagaagagtacgactgacgacgatgttcagaagtccgacatctcatcctccagtcagggcgtgatcgagaaagagtctctgggaccactgctgcttgaagctctcgacggcttcttcttcgttgtgaattgtgagggcaggatcgtgttcgtatccgaaaacgtgacgagttatctcggatataaccaggaggaactgatgaacactagtgtgtacagtatcctacacgtcggagaccacgctgaattcgtaaagaatctcctgccaaaaagtctggtaaacggagtcccatggccacaggaagccactagacgaaatagccacacattcaattgtagaatgctcatccatcccccagacgagccaggtaccgaaaatcaggaggcatgtcaacgctatgaggtgatgcagtgtttcaccgtttcacaacctaagtctattcaggaggacggtgaggacttccaaagctgtctgatttgcatagctcgacgactcccccggccccctgcgatcaccggtgtggagtcctttatgacaaagcaagacactacaggaaaaattatatcaatagacacttcgagcttgagggccgctggaaggaccgggtgggaggatctggtccggaaatgtatatacgctttttttcagcctcaagggcgggagccttcctatgcaagacagctgttccaggaggtgatgactcggggtacagcctcttcgccttcgtataggttcatcctgaatgacggcacaatgctcagcgcccataccaagtgcaagctgtgctatccgcagtcgccagacatgcagccatttataatgggaatacatattattgaccgtgaacactccggcctatctccccaagacgacacaaatagcgggatgtcaatccctcgcgtgaacccctctgttaatccatcaatcagtcccgcccatggagtggctagatcctcaaccctaccacctagcaatagtaatatggtatcgactcgcattaacaggcaacagagcagcgaccttcattcttccagtcactccaacagttctaactcgcagggctccttcgggtgtagtcccgggtcacagatcgttgcaaatgttgccttgaaccaggggcaagcctcctcacagagttctaacccaagtctaaatctaaataactctcctatggagggaacaggcatcagcctggcccagttcatgagtccacggcggcaagtaacgagcggccttgctaccagaccgcgaatgcctaacaacagcttcccacctaatatttctacactgagcagccctgttggtatgacttcatctgcatgcaacaataataatagaagttacagcaatatcccggtgacctctctccaaggtatgaatgaaggccccaacaactccgtaggattcagtgcttcctccccagtcctgaggcagatgagcagtcagaactctccaagcaggctgaacatccaacctgccaaagcagaatcaaaagataacaaggagatcgccagtatcctgaatgaaatgatccagtctgataactctagtagtgacggcaagcctctggattcgggcttattgcataataacgaccgcctctctgatggagacagcaagtattcccagactagtcacaagctcgtacagctgttgactaccacggccgagcaacaactaaggcatgctgacattgacacatcatgtaaggatgtactttcttgcactggcacgtcaaattctgcctcagccaattcttctggagggtcctgcccgagcagccatagttcacttacagagagacataagattctgcatcggttactccaagaaggatctccatcagatatcaccactctgagtgttgagccagataagaaagatagcgcgagcacatcagtgtcggtcaccggtcaggtccaagggaacagctccatcaagttggaattggacgcaagcaagaagaaggaatcaaaagatcaccaacttctaagatatctactggacaaagacgagaaggacctgaggagtaccccgaacctgagcctcgacgacgtcaaggtgaaggtggagaaaaaagaacagatggatccatgcaataccaaccccacccccatgactaagcccacaccagaagagatcaaacttgaggcccagtctcagttcactgccgacttagaccaatttgatcagctgctgccaacacttgagaaggctgcacaattacctgggctgtgtgaaacggaccggatggatggtgcagtaacgtctgttactataaaaagcgagatcttacccgcttcccttcagagcgcaacggccagaccaacgtcccggttaaacagactaccagagctcgaactggaggctattgacaatcagttcggccagccaggcaccggggatcagattccatggactaataatactgttacggcgataaatcagtcgaaatcagaggaccagtgcatctcgtcccagctggacgagctgttatgtccccccaccaccgttgaaggcaggaacgacgagaaagcattgctcgaacaactggtcagcttcttgagcggtaaagacgaaaccgagttggcggagcttgatagggcactggggatcgataaactggtccaagggggaggtctcgacgtactcagtgagcgttttcccccgcaacaagccacaccgcccctcatcatggaggagcggcccaatctgtacagccagccttactcctctccttctccgaccgccaacctgccatctcccttccaagggatggttcggcagaagccctccctcgggaccatgcctgtccaggttactccacccagaggggccttctcccctggaatggggatgcagccaaggcagacactgaataggccacctgcagcccccaaccaactccgcctgcagctgcagcaacgtctgcagggacagcagcagctgatccatcagaaccgccaggccatccttaatcagtttgccgcaacggcccctgtgggaattaacatgcgaagcggaatgcagcagcaaataaccccacagcccccactcaacgctcagatgctggctcaacgccaacgggaactctatagccaacagcatcgccaacgccagctgatccagcagcagcgggcaatgttaatgcgtcagcagagctttggtaacaacttacctccatctagcggactccccgtgcagatggggaatcctagactgccacagggagctccccagcagtttccttacccacctaattatgggaccaaccctgggacaccacccgcaagtacctctcctttcagtcagctggccgcgaaccctgaggcctccttagctaaccgtaattctatggtgtctcggggaatgactgggaacattgggggccagttcggaacaggaatcaacccacaaatgcagcagaacgtctttcagtacccgggagcaggcatggttcctcagggcgaggccaactttgccccctcactttctccagggtcctcgatggttccaatgcctattcccccaccacagagctccctgctgcaacagaccccccctgcctctgggtatcagtctcccgacatgaaggcatggcaacaaggggctattggtaataacaacgtttttagtcaagctgtccagaatcaaccaacccctgctcaaccaggcgtgtacaataatatgagtataacagttagtatggccggtggaaataccaatgttcagaatatgaatcccatgatggctcagatgcaaatgagctccctccaaatgcccggcatgaacacagtgtgcccggaacagattaacgacccagcattgcgccacaccgggttatactgtaatcagctcagttctacggacctgttaaagactgaagccgacggcacccaacaggttcaacaagtccaggttttcgccgacgtgcaatgcactgttaatcttgtcggcggagacccctacctaaatcaacccggcccactggggactcagaagccaactagcggaccccagaccccacaggcacaacagaagagtcttctgcagcaactgctcacagaatag

SEQ ID NO: 279163 - DNA, 4326 bp, Artificial Sequence
  derived and/or modified sequence
atgagcggtcttggggactcttccagcgatcctgctaaccccgactcccacaagaggaagggctccccttgcgataccctggcatcttcgaccgaaaagcgacgtagggagcaggaaaataagtaccttgaagagctggccgagcttctgagcgccaacatctccgatattgattctctcagcgttaaacccgacaagtgtaaaattcttaaaaaaactgtcgaccaaattcagcttatgaaacgcatggaacaggagaagagcaccacagacgatgacgtccagaagtctgacatttcctcctcgtctcagggtgttatcgagaaagaatctctgggccctctgctattggaggcactggacggctttttttttgtggttaactgtgaggggcgcatcgtgtttgtctccgaaaatgtaactagctaccttggctacaaccaggaagagttaatgaacacctcggtgtacagcatattacacgtcggcgaccacgcagagtttgtcaagaatctgttgccaaagtccctggtgaatggcgtgccttggccacaggaagcgactcggagaaattcccacacttttaattgtagaatgctcatacatccgccagacgaacctggcaccgagaaccaggaagcctgccaaagatacgaggtgatgcagtgctttactgtgtcacagcccaagagcattcaggaagacggagaggattttcaatcctgtctcatttgcatcgctcggcggctccctcgaccaccagccataactggggttgagtctttcatgactaagcaagataccacgggaaaaataatcagtatcgatacgagcagtcttcgagccgccggaagaaccggctgggaggatttagtaaggaagtgcatctacgcctttttccagccccagggtagggaacccagctatgccagacagctcttccaagaggttatgacaagggggactgcttcgagtccaagctacaggtttatcctgaacgatggcacgatgctctcagcccacactaagtgcaagctttgttatcctcagtcccctgacatgcagccatttattatggggatacacatcattgatcgggagcattccggcctgtctccacaagatgacacgaattccggcatgagcattcctcgagtgaacccttcagttaacccctctatttctccagcccatggcgtggccaggagttcaaccctgcccccgagtaacagcaatatggtgtccactcgaatcaaccgccaacagagtagtgatttgcatagttcctctcactccaattcgtccaactcacaagggtcctttggttgttcccccgggtctcaaattgtggcgaacgtggcactgaaccagggacaagcctcaagccaaagttccaatccctccctcaatctgaacaactcccctatggaaggcaccgggatttcgttagcccagtttatgagcccacgcagacaggtgacgtccggactcgcaactcgaccgcggatgcctaacaattctttcccccccaacatctccactctgagctccccggtgggaatgaccagttccgcatgcaataacaacaaccggtcatacagcaacattccagtcactagcctacagggcatgaacgaaggccccaataacagcgtggggtttagtgcctcttcgcctgtgctccggcagatgagctctcagaatagcccgagccggttaaatatacagcccgccaaggcggaaagcaaggacaacaaagaaatagcttccatactgaacgagatgattcagagtgacaactccagttcggatggcaaacctttggactccggtttactccacaataatgaccgcctgtctgacggagatagcaagtattcccagacatcccataagctagtccagctcttgacaactacagcggaacagcagctcaggcatgccgatattgacactagttgcaaggatgtactcagctgcacgggcacgagcaatagtgccagcgctaattccagcggcggctcgtgcccttctagccatagtagcctaacagaaagacataaaattcttcacagactgctgcaagaaggctctccaagcgacatcaccacactgtccgtggagcccgacaaaaaggatagtgccagcacgtcggtgtcggtcaccggccaggtgcagggaaattcatccattaaactggaactcgacgcgtccaaaaaaaaggagtccaaggaccatcagttgctgcgctatctgcttgacaaggacgagaaagacctccggagtacgcctaatctctcccttgacgatgttaaggtgaaggttgaaaagaaggagcaaatggatccctgtaacaccaatcccactcctatgactaaacctacaccagaagagattaaactcgaggcgcaatctcagttcacagcagatttggatcagttcgatcaactgttacccactctggaaaaggccgctcagctccccggactatgcgagacagacaggatggacggagcagtcacgtcggtaacaattaagtctgaaatcttgccggcatctctacagtctgcaaccgctcgccccaccagcaggctgaatcggctcccagaactggagctagaggcaattgataaccaatttgggcagccaggaaccggagaccaaattccatggacgaataatacagtaacggcaataaaccaatccaagtccgaggaccagtgtataagctcccagctggacgagctgctgtgccctcccacgaccgtggagggtcgaaacgacgaaaaggcactgctagagcagctggtatcattcctttcaggtaaggacgagacagaactggcggagctggaccgggcactcggcattgacaagctcgtgcaggggggcgggttggatgtgctctctgagcgctttcccccccagcaagcaacaccccccctcatcatggaagaaagaccaaacttgtactctcagccgtacagctcaccctctcctacagcaaatctcccttcaccttttcagggaatggtgcgacaaaaaccctcactcggtaccatgcctgtgcaggttaccccacctcgtggagctttttccccgggaatgggcatgcagccccggcaaacattgaatagaccgcctgctgcccccaaccaactcagactgcaacttcaacagcgcttgcaaggccagcagcagctcatccatcagaatcgtcaggccattctgaaccaattcgcagcaacggcccccgtcgggataaatatgagaagtgggatgcaacaacagattacaccccagcccccgttgaatgcacagatgttggcacagaggcagagggagctctatagccagcagcacaggcagcgccagttaattcaacagcagagggcaatgcttatgcggcagcagtcatttggcaataatctgccacctagttcgggcctccccgtgcagatgggcaatccacgccttccacaaggggctccgcagcagttcccctaccccccaaattatggaacgaacccaggcaccccccctgccagtacaagccctttctcacaactggccgctaatcccgaggcatctcttgccaaccgaaacagcatggtctcaaggggcatgacaggcaacattggtgggcagttcgggaccggtatcaatccgcaaatgcagcagaatgtgtttcaataccctggcgccggcatggtgccacagggagaggcaaactttgccccatccctgtctcctggctctagcatggtgcctatgccaattccaccccctcagtcaagtcttctccagcaaactccccctgcttccggctaccaatccccagacatgaaggcctggcagcagggagccatcggaaacaataacgttttcagtcaggccgtgcagaaccagcccacacccgcccagcctggcgtttacaacaatatgtctattactgtatctatggctggcggtaacacaaatgtgcagaatatgaaccccatgatggctcagatgcagatgtcatccctgcagatgcccggaatgaataccgtttgtccagaacagattaatgacccggctctgagacatacaggactctactgcaatcaactgtcctccactgatttgttgaaaaccgaagccgacggcactcagcaggttcagcaggtgcaagtctttgctgatgtgcagtgcacggtgaatttggtggggggagacccatatctgaatcaacctggaccgcttggtacccaaaagccaacttcaggccctcagacccctcaagctcaacagaagagcctgcttcagcagttacttaccgagtag

SEQ ID NO: 279164 - DNA, 4326 bp, Artificial Sequence
  derived and/or modified sequence
atgagcggcctgggggacagcagcagtgaccctgccaacccagacagccacaagaggaagggcagcccctgtgacaccctggccagcagcacagagaagagaagaagagagcaggagaacaagtacctggaggagctggccgagctgctgagcgccaacatcagtgacatcgacagcctgtctgtgaagccagacaagtgcaagatcctgaagaagacagtggaccagatccagctgatgaagaggatggagcaggagaagagcaccacagatgatgatgtgcagaagagtgacatcagcagcagcagccagggcgtgattgagaaggagagcctgggccccctgctgctggaggccctggatggcttcttctttgtggtgaactgtgagggcagaattgtgtttgtgtctgaaaatgtgaccagctacctgggctacaaccaggaggagctgatgaacacctctgtgtacagcatcctgcacgtgggggaccacgccgagtttgtgaagaacctgctgcccaagagcctggtgaatggagtgccctggccccaggaggccaccaggaggaacagccacaccttcaactgcaggatgctgatccaccccccagatgagcctggaacagagaaccaggaggcctgccagagatatgaggtgatgcagtgcttcaccgtgtcccagcccaagagcatccaggaggatggagaggacttccagagctgcctgatctgcatcgcccggcggctgccccggcccccagccatcactggagtggagagcttcatgaccaagcaggacaccaccgggaagatcatcagcattgacaccagcagcctgcgggctgctggccgcacaggctgggaggacctggtgaggaagtgcatctatgccttcttccagccccagggccgggagcccagctatgcccggcagctgttccaggaggtgatgacccggggcacagccagcagccccagctaccgcttcatcctgaatgatggcaccatgctgagcgcccacaccaagtgcaagctgtgctacccccagagcccagacatgcagcccttcatcatgggcatccacatcatcgaccgggagcacagcggcctgagcccccaggatgacaccaacagcggcatgagcatcccccgggtgaaccccagcgtgaaccccagcatcagccctgcccacggcgtggcccggagcagcaccctgccccccagcaacagcaacatggtgtccacccgcatcaaccggcagcagagcagtgacctgcacagcagcagccacagcaacagcagcaacagccagggcagctttggctgcagccctggcagccagatcgtggccaacgtggccctgaaccagggccaggccagcagccagagcagcaaccccagcctgaacctgaacaacagccccatggagggcaccggcatcagcctggcccagttcatgagcccccggcggcaggtgaccagcggcctggccacccggcccaggatgcccaacaacagcttcccccccaacatcagcaccctgagcagccctgtgggcatgaccagcagcgcctgcaacaacaacaacagaagctacagcaacatccctgtgaccagcctgcagggcatgaatgaaggccccaacaacagcgtgggcttcagcgccagcagccctgtgctgcggcagatgagcagccagaacagccccagccggctgaacatccagcctgccaaggccgagagcaaggacaacaaggagatcgccagcatcctgaatgagatgatccagagcgacaacagcagcagtgatggcaagcccctggacagcggcctgctgcacaacaatgaccggctgagtgatggagacagcaagtacagccagaccagccacaagctggtgcagctgctgaccaccacagctgagcagcagctgcggcatgctgacatcgacaccagctgcaaggatgtgctgagctgcaccggcaccagcaacagcgccagcgccaacagcagcggcggcagctgccccagcagccacagcagcctgacagagcggcacaagatcctgcaccggctgctgcaggagggcagccccagcgacatcaccaccctgtctgtggagccagacaagaaggacagcgccagcacctctgtgtctgtgacaggccaggtgcagggcaacagcagcatcaagctggagctggatgccagcaagaagaaggagagcaaggaccaccagctgctgcgctacctgctggacaaggatgagaaggacctgcggagcacccccaacctgagcctggatgatgtgaaggtgaaggtggagaagaaggagcagatggacccctgcaacaccaaccccacccccatgaccaagcccaccccagaggagatcaagctggaggcccagagccagttcaccgctgacctggaccagtttgaccagctgctgcccaccctggagaaggccgcccagctgcccggcctgtgtgaaacagacaggatggatggagctgtgacctctgtgaccatcaagtctgagatcctgcctgccagcctgcagagcgccacagcccggcccaccagccggctgaaccggctgcctgagctggagctggaggccatcgacaaccagtttggccagcccggcactggagaccagatcccctggaccaacaacacagtgacagccatcaaccagagcaagtctgaggaccagtgcatcagcagccagctggatgagctgctgtgcccccccaccaccgtggagggcagaaatgatgagaaggccctgctggagcagctggtgtccttcctgagcggcaaggatgaaacagagctggccgagctggaccgggccctgggcatcgacaagctggtgcagggcggcggcctggatgtgctgtctgagcgcttccccccccagcaggccaccccacccctcatcatggaggagcggcccaacctgtacagccagccctacagcagccccagccccacagccaacctgcccagccccttccagggcatggtgcggcagaagcccagcctgggcaccatgcctgtgcaggtgaccccacccaggggggccttcagccctggcatgggcatgcagccccggcagaccctgaacagacctcctgctgcccccaaccagctgcggctgcagctgcagcagaggctgcagggccagcagcagctgatccaccagaaccggcaggccatcctgaaccagtttgctgccacagcccctgtgggcatcaacatgaggagcggcatgcagcagcagatcaccccccagccccccctgaatgcccagatgctggcccagaggcagcgggagctgtacagccagcagcaccggcagaggcagctgatccagcagcagagggccatgctgatgaggcagcagagctttggaaacaacctgccccccagcagcggcctgcctgtgcagatgggcaacccccggctgccccagggcgccccccagcagttcccctacccacccaactacggcaccaaccctggcaccccaccagccagcaccagccccttcagccagctggccgccaaccctgaggccagcctggccaacagaaattccatggtgtcccggggcatgacaggcaacattggaggccagtttggaacaggcatcaacccccagatgcagcagaatgtgttccagtacccaggagctggcatggtgccccagggcgaggccaactttgcccccagcctgagccctggcagctccatggtgcccatgcccatccccccaccccagagcagcctgctgcagcagaccccaccagccagcggctaccagagcccagacatgaaggcctggcagcagggcgccatcggcaacaacaacgtgttcagccaggccgtgcagaaccagcccaccccagcccagcccggggtgtacaacaacatgagcatcaccgtgtccatggccggcggcaacaccaacgtgcagaacatgaaccccatgatggcccagatgcagatgagcagcctgcagatgcctggcatgaacacagtgtgcccagagcagatcaatgaccctgccctgcggcacacaggcctgtactgcaaccagctgagcagcacagacctgctgaagacagaagcagatggcacccagcaggtgcagcaggtgcaggtgtttgctgatgtgcagtgcaccgtgaacctggtgggcggggacccctacctgaaccagcccggccccctgggcacccagaagcccaccagcggcccccagaccccccaggcccagcagaagagcctgctgcagcagctgctgacagaatag

SEQ ID NO: 279165 - DNA, 4326 bp, Artificial Sequence
  derived and/or modified sequence
atgagcggcctgggcgacagcagcagcgaccccgccaaccccgacagtcataaacggaagggctcaccctgtgacactctggcttcgtcgacagagaagcgacgccgggagcaggagaataaatatctggaggaactggccgagctgctttctgcgaacattagcgacatagacagccttagcgtaaagcctgacaagtgcaagattctgaagaaaactgtggaccagattcagctgatgaagcggatggagcaggagaaatctaccacagatgacgacgttcaaaaatccgacatctcttcatcgtcccagggggtaattgaaaaggaatctttaggacccctgctgttagaagccttagatggtttcttttttgttgtgaattgtgaggggcgcattgtctttgtgtccgaaaacgtcaccagctatctaggatataatcaagaagaacttatgaacacgtccgtttatagcatactccatgtgggcgatcacgcagagtttgtgaagaacctgcttcctaagagcctggtgaacggcgtgccctggccccaggaagccacccgacgaaatagccacacctttaattgccgcatgctgatacatcccccagacgaacctgggacagagaatcaggaggcctgtcagcgctacgaggtgatgcaatgctttaccgtgtcacaacccaaatccatacaggaggacggcgaggattttcagtcctgcctgatttgtatcgcccgtaggctgccacggccacccgctatcactggggtggagagtttcatgacgaaacaggatacaaccggaaagattatcagcatcgatacatcgtcactgcgagctgcaggaagaacagggtgggaagatctcgtcaggaagtgtatctacgcgtttttccagcctcagggccgagagccctcatacgctcgtcaactgttccaagaggtcatgacccgcgggactgcgagctctccctcctatcgcttcatacttaatgacggcactatgctgagcgcacatactaaatgcaaactctgctatccgcagtctcccgacatgcagcctttcatcatgggtattcatatcattgaccgggagcattcaggcttgtctccccaggacgataccaactccggcatgtccattcctcgggtcaacccgagcgtgaatccatctatctccccagcacatggcgtggctaggagttccacccttcctccatcaaattcaaatatggtgtctacgcggatcaaccgccagcagtccagtgatcttcactccagttctcacagtaattcgagcaactctcaaggctcctttggatgtagcccggggtcgcagattgtagcaaatgtcgccctgaaccagggtcaggctagttcacaatcctctaatccaagtctgaatctgaacaacagtcctatggagggcacaggcatctccctcgcgcagtttatgtcccctaggagacaggtgacttcaggactggccaccagacctagaatgccgaacaacagcttcccccccaacatcagcaccttatcaagccccgtgggcatgacctcctccgcatgcaacaacaacaaccgctcctacagcaatatcccggtgacctctttgcagggaatgaatgaggggccaaacaatagtgtggggtttagtgcctcctccccggtgttaaggcagatgtcaagccagaacagcccgagccgcctgaacattcagcccgcaaaagctgagtccaaagataataaggagatagccagtattctcaacgaaatgatccaatccgacaatagctcctctgatggaaagccactggatagtgggttactccacaacaacgaccgcctatccgacggggactcaaagtatagtcagacaagtcataaactggtgcagctcctgaccacgactgcagaacaacagctcaggcatgcagacatagacacatcttgtaaagacgtcttgagctgcaccgggacctccaatagcgcaagcgccaactcctctggcgggtcatgcccatcaagccattcatccttaaccgagagacacaagatcctacatcgattgcttcaagagggttcaccatctgacatcaccacgctgagcgtagaaccagataaaaaggactccgcttctactagcgtgtccgtcacagggcaagtacaggggaactcaagcattaagctggagctggatgcctccaaaaagaaggagagtaaggatcaccagttattgcgatatctgctagacaaagacgaaaaagatttaaggtcaactccaaacctctcactagacgatgtaaaagttaaagtcgaaaagaaagagcagatggatccctgcaataccaatcccacacccatgaccaaacctacaccggaagaaataaagctggaggcccagagtcagttcacagccgacctcgaccagttcgaccagctccttcctacactcgaaaaggcagcacaattaccagggttgtgcgaaactgatcggatggatggagccgtgacaagcgttactattaaaagcgaaatcctgcctgcaagcctgcaatctgctactgccaggccaacttcacgtcttaatcgcttacccgaacttgaactagaggctattgacaatcagtttggacaacctggcaccggagaccagatcccgtggacaaataataccgtgaccgcaatcaaccaaagcaaatctgaagatcagtgcatcagttcccagctcgacgagcttctttgccccccaacaaccgtggaggggagaaatgatgaaaaggccttgctcgagcagcttgtcagttttctatcaggcaaagatgaaacagagctggctgagctggatcgcgcgctgggaattgacaaattagtgcagggcggcggacttgatgttctgagtgagagattccctcctcaacaggcgaccccacctttaatcatggaggagagaccgaatctctacagccagccatattcatcgccctcaccgacagcaaatctcccctcacctttccagggcatggtccgacaaaaaccatctttaggcacgatgcctgtacaggtaacccccccacgcggggcattcagccccggcatgggcatgcaacctcgccaaacgctgaaccgccctcccgccgcacccaaccaattacggctgcagctgcagcagcgcctccaagggcagcagcaactgattcaccagaaccgccaggccattcttaaccagttcgcggccacggctccagttggtataaatatgcggtctggtatgcagcagcagattacccctcagcctcccctgaacgctcaaatgttggctcagagacaacgcgaactgtactctcaacaacacagacagagacaacttatccagcagcagcgagcaatgttgatgagacagcagtccttcggcaacaacttgcccccctccagcggcttacccgtccagatgggcaacccacggttgccccagggcgcccctcaacagttcccatacccacccaattatgggaccaacccgggcacacccccggcatccacaagccctttctcacaactagcagccaaccccgaggcctcgttagccaaccggaattccatggtatccagaggaatgacagggaacatcggcggccagttcggtacgggcattaatcctcagatgcagcagaacgttttccaataccccggcgctggaatggttcctcagggagaagcgaattttgcacccagcctgtctcctggttcaagtatggtccctatgcccatccctccgccacagagttcgctgttgcagcaaacccctcccgcatctgggtaccagtcccctgacatgaaggcttggcaacagggggcaattggcaacaataatgtgttctcgcaagcagtccaaaaccagcctaccccggcccaacccggcgtctataacaacatgagtatcactgtcagcatggctggcggaaacaccaatgttcagaatatgaaccccatgatggcacagatgcaaatgtctagcctccaaatgcccgggatgaatactgtgtgccccgagcagataaacgatcctgccttacggcatacagggctgtactgcaaccagcttagtagtaccgacttgctaaagacggaggcagatggcacccagcaagttcagcaagttcaggtgtttgccgacgtgcagtgtacggtgaacctcgttggcggagacccatatctcaatcagccagggcccctggggacccagaaacccacttctggaccgcaaaccccccaggctcagcagaagtctctattgcaacagctgcttactgaatag

SEQ ID NO: 279166 - DNA, 4326 bp, Artificial Sequence
  derived and/or modified sequence
atgagcggcctgggcgacagcagcagcgaccccgccaaccccgactctcataaaaggaagggcagtccatgtgacaccctggcctccagcaccgaaaagcggcggagggagcaggagaataagtatctggaagagctggccgagctgcttagtgccaacatatctgacatagatagcctgagtgttaagccggataagtgcaagattctcaaaaagacagttgaccagattcaattaatgaagagaatggaacaggagaagtctaccaccgacgatgatgttcaaaagtcagacataagcagctcatctcaaggcgtcatcgagaaggaaagtttaggccccctgctactggaggccctcgacggctttttctttgttgtcaactgcgaaggcaggatagtgttcgtttctgagaatgtcacatcctatctggggtataaccaggaagaattaatgaacaccagtgtgtacagtattcttcatgtcggcgaccacgccgagtttgttaaaaatctcttgccaaagtctctggtgaatggcgtgccctggcctcaggaggccaccagacggaactcccatacttttaactgtaggatgctaatccacccacccgacgagcccggtaccgaaaaccaagaggcttgccagcgctacgaggtcatgcagtgttttactgtgagtcagcctaagtctatccaagaagatggtgaggattttcaatcctgtctgatctgcattgctcggcggttgccccgcccacccgccattaccggggtggagtcattcatgacaaagcaagacactacaggtaaaattatctcaatcgatacttctagtctgcgagccgctggacgcaccggatgggaagatcttgtgcgtaaatgcatatacgccttcttccagcctcaagggagggaacctagctatgctcgtcaattgttccaggaagtaatgacgaggggtaccgccagctccccatcctacaggttcattttgaatgacgggacaatgctgagtgcccacaccaagtgtaagctgtgttatccccagagtcccgacatgcagccatttataatgggaattcacatcatcgatagagaacactccggcctgtcaccccaggacgataccaattccggcatgtcaatccctcgcgtgaacccatcggtcaacccatctatttctcctgcacacggtgtcgctcgtagtagtacgcttccgcctagcaacagtaatatggtgtctactaggatcaacaggcagcagtccagcgacctccactcctcctcgcactccaattcctctaatagtcagggatctttcgggtgcagccctggaagccagatcgtcgccaatgtggcactgaatcagggacaggcgtcatcccagtcatccaatccttctctgaacttgaataactcacctatggaggggaccggcatatctctggctcagtttatgtctccgaggcgccaggtgactagcggacttgcaacccgccccagaatgcctaacaattcttttccaccaaatataagtacacttagctccccagtaggaatgacaagcagcgcctgcaataataataacagatcctactccaacattcctgtgacgagcctgcaaggaatgaacgagggccctaacaatagcgtgggcttctccgccagctctccagttcttcgccagatgtcttctcaaaattctccatcaagacttaacattcagccagcaaaagccgagagtaaggataacaaggaaatcgcctctatcttaaacgagatgatccagtcagacaactccagtagtgatggcaagccactggactcaggacttctgcataacaatgaccgactttcggatggagacagcaagtacagtcagacctcccataaactcgttcaactgctgaccaccacagccgagcagcagctgcggcacgcagatattgacacatcctgtaaggacgtactgagctgtacaggaacctcaaattcagcgtctgccaattcttcaggcggctcctgcccctcgtctcactcctccctcactgaaagacataagatccttcaccgtttgctgcaagaggggagcccttccgatataaccacgctgagtgtcgagcccgataagaaagattcggcttccacatctgtgagcgtaacaggacaggtgcaggggaattccagcattaagcttgaactggacgcgtctaaaaaaaaggagtccaaagaccaccagctgctgcgctacctcctggacaaagatgaaaaagacctccgcagcacgcccaacctcagcctggacgacgttaaggtgaaggttgagaaaaaggaacagatggatccttgcaacacaaacccgacacctatgacaaaaccgacacccgaagaaatcaaactcgaggcccaatctcagtttaccgccgacttggaccaattcgatcagctgttgcctactctcgagaaagctgcgcaactgccaggtctgtgcgagaccgaccgcatggatggcgccgttacaagtgtgaccattaaatctgagatccttcccgcctctctgcagtcagcaacagccaggcctacctctcggctaaataggctgcctgaactggagctggaggcaatcgataaccaatttggccaaccggggacgggagatcagattccatggaccaacaatacagtgacagccattaaccaaagcaaatcagaggaccagtgtatctcttcgcagctggacgaactcctgtgtcctccaacaacagtggaggggaggaacgacgaaaaggcacttctcgagcaattggtcagcttcctgagcggaaaggatgaaacagagctggcagagctggacagggcgctggggatcgataagcttgtgcagggaggagggctcgatgtgttgtctgagagattccctccacaacaggccaccccacccctcattatggaggagcggccaaatctctattcccaaccatactcctcacctagtccaacggctaatctgccgtccccctttcagggcatggtgcgacagaagcccagtctgggtacgatgccagtgcaggtgacaccgcctaggggggcattttctccggggatgggcatgcagccgcgtcaaaccctgaatcgccccccagcggcccccaatcagctgagactgcagttacaacagcgccttcagggtcagcaacagctgattcaccagaaccgccaggccatccttaatcagttcgccgccacagcacctgttggtattaatatgaggtctggtatgcagcagcaaatcaccccacagccgcccctcaacgctcagatgctcgcccagcgacagagagaactttattctcagcagcaccgccagaggcagctcatacaacagcagagagccatgttgatgcgacagcagtccttcggaaacaacttacctccaagctctgggctgcccgtgcaaatggggaatccacgcctgccccaaggcgcgccacaacagtttccttacccccctaactatgggaccaacccgggcacaccccctgctagtacgagccctttcagccagctcgcagccaaccccgaggccagcctcgccaaccggaactcgatggtatcacgaggcatgaccggcaatataggagggcagttcggtacaggtataaatccgcagatgcagcagaacgtttttcaatacccaggagctggaatggtgcctcagggagaggccaattttgcgccctcactcagtcccggctcttccatggttcccatgcctattccaccacctcagtcttcgctactccagcaaaccccaccagcctctggctatcaaagtcctgatatgaaagcatggcagcagggagcaataggaaacaacaatgtattctcacaggccgttcagaatcagcccacgcctgctcagcctggggtgtacaataatatgagcatcacagtgtcgatggccggagggaatactaatgtccaaaacatgaatccgatgatggcacaaatgcaaatgtcatcactccagatgcccggcatgaacacagtttgccctgagcagataaatgaccctgcattgcgccatactggtctttactgcaatcagctgtcttcgaccgacctcctcaagactgaagcagatggcacgcaacaggtccagcaggtccaggtgttcgctgacgtccagtgcacagtcaacctggtgggaggtgatccttatctcaatcagcctgggcccctgggaacacagaagcccacctccgggccacagacaccacaggcgcagcagaaaagcttacttcaacagctcctcaccgagtag

SEQ ID NO: 279167 - DNA, 7289 bp, Artificial Sequence
  derived and/or modified sequence
gcggccgcctgcccggcgtggggagcgggcgccccgggccgccgccgagagggggagccggaagtcggcgcgggcgcccctcggccccgacgacgccgtgaccttggccggcccgctcacctctcggaatctcgcctgccgggaccgcgaaatgggggcgaccgcggcgtccctctccgtcggcgcagccctcgacggcgcttgggtttgaccccggcgcgcttgctcgccccttctcccgagaaggggtttcggagatctatccatactaatggaaatgtaactggaactgactctgatgataaaatcaaggaccatcaagcaagatcatgcagtaggcaactttgcttccaaaagaagttaccaacatttagaatttctacttattctgaggttccagttacagctatatcagagaatgagttaatctcctcagaaatcactaaatactactctgaggggcttagaaattaacaggttgtttatataattggccttaaatgaggtgagagtgaagagactagagccatctctggaaaacatcattatcccattccccgggaagctaccctctggaactcaagatttgaccatatctgttttgaggattcattatgaacaaagaagtctcccaggtgtgaagtttttcaacatgagtggcctcggggacagttcatccgaccctgctaacccagactcacataagaggaaaggatcgccatgtgacacactggcatcaagcacggaaaagaggcgcagggagcaagaaaataaatatttagaagaactagctgagttactgtctgccaacattagtgacattgacagcttgagtgtaaaaccagacaaatgcaagattttgaagaaaacagtcgatcagatacagctaatgaagagaatggaacaagagaaatcaacaactgatgacgatgtacagaaatcagacatctcatcaagtagtcaaggagtgatagaaaaggaatccttgggacctcttcttttggaggctttggatggatttttctttgttgtgaactgtgaagggagaattgtatttgtgtcagagaatgtaaccagctacttaggttacaatcaggaggaattaatgaatacgagcgtctacagcatactgcacgtgggggatcatgcagaatttgtgaagaatctgctaccaaaatcactagtaaatggagttccttggcctcaagaggcaacacgacgaaatagccatacctttaactgcaggatgctaattcaccctccagatgagccagggaccgagaaccaagaagcttgccagcgttatgaagtaatgcagtgtttcactgtgtcacagccaaaatcaattcaagaggatggagaagatttccagtcatgtctgatttgtattgcacggcgattacctcggcctccagctattacgggtgtagaatcctttatgaccaagcaagatactacaggtaaaatcatctctattgatactagttccctgagagctgctggcagaactggttgggaagatttagtgaggaagtgcatttatgcttttttccaacctcagggcagagaaccatcttatgccagacagctgttccaagaagtgatgactcgtggcactgcctccagcccctcctatagattcatattgaatgatgggacaatgcttagcgcccacaccaagtgtaaactttgctaccctcaaagtccagacatgcaacctttcatcatgggaattcatatcatcgacagggagcacagtgggctttctcctcaagatgacactaattctggaatgtcaattccccgagtaaatccctcggtcaatcctagtatctctccagctcatggtgtggctcgttcatccacattgccaccatccaacagcaacatggtatccaccagaataaaccgccagcagagctcagaccttcatagcagcagtcatagtaattctagcaacagccaaggaagtttcggatgctcacccggaagtcagattgtagccaatgttgccttaaaccaaggacaggccagttcacagagcagtaatccctctttaaacctcaataattctcctatggaaggtacaggaatatccctagcacagttcatgtctccaaggagacaggttacttctggattggcaacaaggcccaggatgccaaacaattcctttcctcctaatatttcgacattaagctctcccgttggcatgacaagtagtgcctgtaataataataaccgatcttattcaaacatcccagtaacatctttacagggtatgaatgaaggacccaataactccgttggcttctctgccagttctccagtcctcaggcagatgagctcacagaattcacctagcagattaaatatacaaccagcaaaagctgagtccaaagataacaaagagattgcctcaattttaaatgaaatgattcaatctgacaacagctctagtgatggcaaacctctggattcagggcttctgcataacaatgacagactttcagatggagacagtaaatactctcaaaccagtcacaaactagtgcagcttttgacaacaactgccgaacagcagttacggcatgctgatatagacacaagctgcaaagatgtcctgtcttgcacaggcacttccaactctgcctctgctaactcttcaggaggttcttgtccctcttctcatagctcattgacagaacggcataaaattctacaccggctcttacaggagggtagcccctcagatatcaccactttgtctgtcgagcctgataaaaaggacagtgcatctacttctgtgtcagtgactggacaggtacaaggaaactccagtataaaactagaactggatgcttcaaagaaaaaagaatcaaaagaccatcagctcctacgctatcttttagataaagatgagaaagatttaagatcaactccaaacctgagcctggatgatgtaaaggtgaaagtggaaaagaaagaacagatggatccatgtaatacaaacccaaccccaatgaccaaacccactcctgaggaaataaaactggaggcccagagccagtttacagctgaccttgaccagtttgatcagttactgcccacgctggagaaggcagcacagttgccaggcttatgtgagacagacaggatggatggtgcggtcaccagtgtaaccatcaaatcggagatcctgccagcttcacttcagtccgccactgccagacccacttccaggctaaatagattacctgagctggaattggaagcaattgataaccaatttggacaaccaggaacaggcgatcagattccatggacaaataatacagtgacagctataaatcagagtaaatcagaagaccagtgtattagctcacaattagatgagcttctctgtccacccacaacagtagaagggagaaatgatgagaaggctcttcttgaacagctggtatccttccttagtggcaaagatgaaactgagctagctgaactagacagagctctgggaattgacaaacttgttcaggggggtggattagatgtattatcagagagatttccaccacaacaagcaacgccacctttgatcatggaagaaagacccaacctttattcccagccttactcttctccttctcctactgccaatctccctagccctttccaaggcatggtcaggcaaaaaccttcactggggacgatgcctgttcaagtaacacctccccgaggtgctttttcacctggcatgggcatgcagcccaggcaaactctaaacagacctccggctgcacctaaccagcttcgacttcaactacagcagcgattacagggacaacagcagttgatacaccaaaatcggcaagctatcttaaaccagtttgcagcaactgctcctgttggcatcaatatgagatcaggcatgcaacagcaaattacacctcagccacccctgaatgctcaaatgttggcacaacgtcagcgggaactgtacagtcaacagcaccgacagaggcagctaatacagcagcaaagagccatgcttatgaggcagcaaagctttgggaacaacctccctccctcatctggactaccagttcaaatggggaacccccgtcttcctcagggtgctccacagcaattcccctatccaccaaactatggtacaaatccaggaaccccacctgcttctaccagcccgttttcacaactagcagcaaatcctgaagcatccttggccaaccgcaacagcatggtgagcagaggcatgacaggaaacataggaggacagtttggcactggaatcaatcctcagatgcagcagaatgtcttccagtatccaggagcaggaatggttccccaaggtgaggccaactttgctccatctctaagccctgggagctccatggtgccgatgccaatccctcctcctcagagttctcttctccagcaaactccacctgcctccgggtatcagtcaccagacatgaaggcctggcagcaaggagcgataggaaacaacaatgtgttcagtcaagctgtccagaaccagcccacgcctgcacagccaggagtatacaacaacatgagcatcaccgtttccatggcaggtggaaatacgaatgttcagaacatgaacccaatgatggcccagatgcagatgagctctttgcagatgccaggaatgaacactgtgtgccctgagcagataaatgatcccgcactgagacacacaggcctctactgcaaccagctctcatccactgaccttctcaaaacagaagcagatggaacccagcaggtgcaacaggttcaggtgtttgctgacgtccagtgtacagtgaatctggtaggcggggacccttacctgaaccagcctggtccactgggaactcaaaagcccacgtcaggaccacagaccccccaggcccagcagaagagcctccttcagcagctactgactgaataaccacttttaaaggaatgtgaaatttaaataatagacatacagagatatacaaatatattatatatttttctgagatttttgatatctcaatctgcagccattcttcaggtcgtagcatttggagcaaaaaaaaaaaaaaaaaaaaaaaaaggagtttgcttttgtcgggagattgaaagatgtttttgtttctttctttgtaaaggccttggatattgaaaaaataccaaggcagaacagttggacaatctatttcttgagccaaatttaattattcttatttttgtaatcagtcattggcttcttatctggatgaaggcttttggaggagaaccaaaacgacaagttccaagaagaagatgaagctccgcctccgccgcttagtcccaaccctgcccaggaagaagggcccgtggggctttgcctgtgcccgtccaccaaaggctgtcatgtgtctcgaaatcagcagccctccccatcccaatcccaggcagcttgtgtgtacaatcagcttctctagcaactctgtatctgttggcttcaagagaatattttgcctccacatatgtaccccttctcctttttttaaagatggatttaaaccaagatgcctccaggaaagaggacgaaatgagtatattcacagaggaatccaaaaaatacagtttgggggaaaatgcaataatttttgatgagatgggtgaaggacaagaagtgagttgtgtcaattattgtagatacaattttctgattaaatctggaaaaataaaaggcagcctgttttttctgcttttattgtattaacagctgaggtagctaaagttatttaaaataaaattaaatttatgatccaagtagcttatttttccctttaaatctcattgtaaatatatttgatttcttgtagaaattgatttccttctgtttaattttatgcttttattatactcttgatttttctaaatttgtgtgtgaaatataacattgattgaattgcagttacatttggttagtaatatttcattattttaataactgtgatgtcatgtatggatttactttggggttcaaatcaaaatgtcactgccagaaagagctgttccagctgatctagagcatactgccctagagtgtccctgggatcatctgaacagaagtgcacaggctacttgtacagagaaaaaattaatactcaaaggaaatcttcattttttagattgactttgggaatttgaattttcatcagtgcaaatataaatttctctatcctgctctgaggctaattggtaccatattttccctttgtgtcttgtgactctgccacatcccatctcatcctggcctctgagtcaagaacccagtgaactgactttctagttctagaagttccgctgcaaggccaggaaagcttgagaaaggtattgtggaagaagcaaaggtagacccccatcactcacctttgtctgcatccctgggcctgtgaatgatgacagcacctgacattctgcaccagctacctctgcctccatggcagagaaaaggccataagaacagtggaagaggagcatggactcagacttcaaggaagaagccatttccccaggtccttccttctgcatctcaccacccctagttacaaataactccattgaacagcatctattcagaaactatgccgaataaaaagattggtggaagggctcatgtggttagcaactatgaaacagaaataggacactcagttacaaacattatctcctttagtttttcagaaaatgcatccctgatttcattcatttccagcttgaaagccagccatattactctagtccctaccaaactgctctagaaggtcatttccattttgtttgtgatatttagacgcgcagacttcaggaagttcacctttaacttcagcattccagatgaagtttcctgactcagtgcttttgcataaggaactagaaaaaaaaagtaaggaaaattggagatgctaacatcctcccccatcccaactgcaccttaaaatatgcatgtcaccttcaaggttttataattgcactgtttgttttatgtatgtacagattaaaattattgctacatttgaggaaaataaaattgcttgcttctatgtaattcctgtcattccacaggaaattcacttttccagctactgaatagaatttgtttaacaacctcatgggttgcctcttcatttacagggaagaaatgaaatgtacatctgcagaaattgccaaagcccaaattaacgagtattataaaaggataataaagcatccctgaagccaaa

SEQ ID NO: 279168 - DNA, 4326 bp, Artificial Sequence
  derived and/or modified sequence
atgagtgggctcggcgactcttcctcagaccccgcaaacccagactcgcataaacgaaagggatccccctgtgacaccctggcatcatctacggagaaacgtcgcagagaacaggagaacaagtatctggaagaactggctgaactgttgagtgccaacatttccgatattgatagcctgtccgtgaagccggataagtgtaagatcctgaaaaaaactgtagatcagattcaacttatgaaacgaatggagcaggagaaaagcactacagacgacgacgtgcagaagagtgacatttcatcctcgtcccagggagttattgaaaaggaatcactgggcccactacttctggaagccttggacgggttttttttcgtagtcaactgtgaggggaggatcgtcttcgtgtctgagaatgtaactagctacctgggctacaatcaggaggaactcatgaatacatccgtttactcgatcttgcatgtaggagatcatgctgagtttgtgaaaaatctgttgccaaagagcctcgttaatggagtcccatggccacaggaggctacacgtcgtaactcacacacatttaattgtcgaatgctgattcaccctcctgatgaaccaggcaccgaaaatcaagaggcttgtcaacgatacgaggttatgcaatgtttcaccgtttcacaaccgaaatctattcaggaggacggcgaagacttccagtcctgtctgatctgtatcgcacggaggctgccgagacccccagctataaccggcgtggaaagcttcatgacaaagcaggatactaccggcaagatcattagtatcgacacctccagcctgagagccgctggacgaactgggtgggaggatctggtgagaaaatgtatctacgcattctttcagccccaggggcgagaaccatcctatgccaggcagctgttccaggaagtcatgacacggggaacggcttcctcaccaagttaccgttttatcctcaatgacggaactatgctgtccgcacatactaagtgcaaactctgctatcctcagagccctgatatgcagccgtttattatgggaattcacatcattgatcgagaacactccggattgtcgccacaggatgacaccaattccgggatgagtatccctcgcgttaacccttccgtgaatccaagtataagtccagcccatggggtggccaggagctcaactttacctccaagcaattcaaatatggtgagcactcgtatcaatcgccagcagtccagtgacctgcactcaagttcccatagtaatagctccaatagccagggcagcttcggatgcagcccaggcagtcagattgttgctaacgtggcgctcaaccagggccaggcttccagccaatcatccaatccttccctgaatttaaacaattcccccatggagggcactggcattagcttggcacagtttatgtcaccacgacgtcaggtcacatcaggcctggctacacgccctcgcatgcccaataactcattccctcccaacatctctacactcagttctccggtcggcatgacgagcagtgcttgtaacaataacaaccgctcttatagcaacatacccgtcaccagccttcaaggcatgaacgagggtcctaacaacagcgtgggttttagtgccagttcccctgtgctaaggcaaatgtccagtcagaatagcccaagtcgtctgaacatccagcccgcaaaggccgagtctaaagataacaaggagatcgccagcatcttgaacgagatgatacagagcgataacagtagctcagacggaaagccccttgattccggactgttacataacaacgaccgcctatccgacggtgacagcaaatacagtcaaacaagccataagctggttcagttgttaacaaccactgccgaacagcaactgaggcacgcagacatagatacatcttgtaaggacgtgcttagctgtaccggcactagtaactccgccagtgccaatagcagcggcggaagctgtccctcatcccactcaagcttaacagaacgtcacaagatcctgcaccggttgctgcaggaaggcagcccctccgacattacaacgctgagtgtggagcccgacaagaaggatagtgcctctacctccgttagtgtgacagggcaggtgcagggaaatagttcaatcaagcttgagctagacgcttctaagaaaaaggagtccaaggaccaccagttacttcggtacctgttggacaaagatgaaaaagacttgcgttccacaccaaatctctctctagacgatgtcaaggtaaaggttgagaagaaagagcaaatggatccctgcaacacaaaccccactccaatgacaaagcctactcccgaggagataaagctggaggcgcagagtcagttcactgcagacttggatcagtttgaccaactactgccgactcttgagaaggctgcacagctccctggcctctgcgaaactgatagaatggatggagcagtgacctctgttactatcaagtcagaaatcctgccagcatccttacagagtgcaactgctcggccaaccagccggctgaaccgattgcccgagcttgagcttgaggccattgacaaccagttcggccagccgggtacgggtgaccaaattccctggaccaataataccgtcactgctattaatcaatctaaatctgaagatcaatgcatttcctctcagctggacgaactgctgtgcccgccaacaacagtggaggggagaaatgacgaaaaggctttgttagaacaactggtttcattcctgagtgggaaagacgagacagagctggcagaattagatcgagcgttgggtattgataagctggtgcagggtggcggattggacgttctgagtgagcgcttccccccacaacaggccactccgcctctgattatggaagaacgacctaatctatattcgcagccgtacagctctccatctcctacagccaatctcccaagtccatttcaaggcatggttcggcaaaagccttctctcggtacaatgcctgtccaagtgaccccacccaggggcgcattctctccaggaatgggtatgcaacccagacagaccctgaataggcctcccgctgcacccaatcagctgaggctccagttgcagcagcgcctccaagggcagcagcagctcatccaccagaatcgtcaggccatcttgaatcagtttgccgctaccgctcctgttgggataaacatgaggagcggcatgcagcagcaaatcacacctcagccgccactcaatgcacagatgctagctcagcgacagagagagttgtattctcagcaacatcgccagagacaactgatacagcagcagagagcaatgctgatgcgtcagcagagcttcggaaacaatcttccgcctagcagtggcctacctgtgcagatgggaaatcctagacttccccagggggctcctcagcagtttccctacccccctaattatgggacgaatcccggaactccaccagccagtacaagccctttcagccagctcgcagctaatccagaggcttccctcgcaaatcgaaactccatggtatccaggggtatgaccggtaatatcgggggacagttcggcaccggaattaacccccagatgcaacagaacgtcttccaatacccgggtgccggaatggtccctcagggggaggcaaacttcgccccttccctctcacctggctcttccatggtccccatgcccatccccccaccacagtctagtctgctacagcagacccccccagcctctggatatcagtctcccgacatgaaggcatggcagcagggcgcaataggcaacaacaatgtattctcacaggccgtgcaaaaccagcccacgccagcccagccaggcgtttataataatatgtctatcacggtttccatggctggaggaaacacaaacgtgcagaatatgaacccaatgatggcccaaatgcagatgtcttccctgcaaatgccagggatgaacactgtgtgtcctgagcagatcaacgatccggctctcagacataccggattatactgtaatcagctgtcttcgaccgatctgttaaaaacagaagccgacggaacacagcaagtgcagcaggtccaggtctttgctgacgtgcagtgtacggtaaacctcgttggtggtgacccctatctaaaccagccgggaccccttgggacgcaaaaacctacctctgggcctcagacgccacaggctcagcaaaaaagcctgctccagcagctcttaaccgagtag

SEQ ID NO: 279169 - DNA, 4326 bp, Artificial Sequence
  derived and/or modified sequence
atgagtggcctaggtgatagctctagcgaccccgcaaatccagactcacacaaaaggaaagggtccccatgcgataccctcgcatcctcgaccgagaagagacggagagagcaggagaataagtacctggaggagctggccgaactgctgagtgctaatatcagcgatatcgacagtctaagtgtgaagccggataagtgcaagatcctaaagaaaactgtcgaccagatccagctgatgaaacgtatggagcaggaaaagagcaccacagacgacgacgtacagaaatctgacatatcgtctagttcacagggagttattgagaaagaaagcctggggccattgctgcttgaagccctcgatgggttcttctttgttgtgaattgtgagggaaggattgtgtttgtctctgagaacgtaaccagttatttgggatacaaccaagaagagctgatgaatacaagcgtctattcaatcctccatgtgggggaccatgccgagtttgtaaagaacctcctccccaaaagtttggtgaatggagttccttggccacaggaggcgacccggaggaatagccatacattcaattgcaggatgctcatccatccccctgatgaacccggaactgaaaaccaggaggcctgtcagcgctatgaagtcatgcagtgctttaccgtgtcgcagccgaaatctattcaggaggacggcgaagatttccagagttgtttaatctgtattgcacggaggctcccccgtcccccagcaattacaggcgtagagtctttcatgaccaagcaagacactactggtaagatcatcagcattgatacatccagcttgagagccgctggtaggactggttgggaggatttagtgcgcaagtgtatctatgcgtttttccagcctcagggtagagagcctagctacgcaaggcagctgttccaggaggtgatgacccgcggaactgcctctagcccatcctaccgattcatactgaatgacggcaccatgctgagtgcccatacaaagtgtaagttatgttacccacagtcccctgacatgcaaccattcataatgggaatccacattattgaccgtgagcactcaggcctttccccgcaagacgataccaattcgggaatgtccatccctcgcgtcaaccctagtgtcaacccaagtatttcacccgcacatggcgttgcacggagctccaccctgccacccagcaatagtaatatggttagcacacgcattaatcgccagcagtcatcggatctgcactctagcagtcattccaattcttccaactcacaaggcagcttcggatgctcccctggctcacagatcgttgctaacgtggcactgaaccaggggcaggcttcatcccaatcctcaaatccgtccctgaaccttaataactccccaatggaaggcactgggatttctctagcccaattcatgtccccaagaaggcaggtgaccagcgggttggctaccaggcccaggatgccgaataattcctttcccccaaacatttccaccctgagtagcccagttggaatgacctcatcagcgtgcaacaataataataggtcgtactccaacattcctgtcacctcactgcaaggcatgaacgagggccctaacaatagcgtaggatttagtgcaagttcccctgtgctgcgccaaatgagtagccagaattccccatcccgattaaatatacagccggcaaaagctgaatcgaaagataacaaagaaatcgccagtatactgaacgagatgatccagtccgataactccagctccgacggaaagccgctggatagtgggttgctccataacaatgatagactgtcggatggagattcaaaatattcgcagacctctcacaaactcgtgcagctcctgaccactacggccgagcagcagctgcggcacgccgatattgacacatcttgtaaggatgtactttcttgcactggaacctctaacagtgcctcagcaaatagcagcggcggttcatgccccagctcccattcctccctaacggagcgccacaagatccttcaccgactgctgcaggaaggatccccaagtgacatcaccacattgtccgtggagcccgacaagaaggactcagcctcaacaagcgtgagcgtcaccggacaggttcaggggaacagctctatcaagctggaactggatgcatcaaaaaagaaggagagcaaggaccatcagctcctccggtatctgcttgacaaagacgagaaagatctgcggtcaacgccgaacctttccctggatgacgtgaaggtgaaggtggaaaagaaggagcagatggacccttgcaacactaacccaactcctatgacaaagcctacgcctgaagagattaagctggaggcccagagtcaattcactgcagacttagaccagtttgaccagctattgccaacgctagagaaggcagctcagctgcctggcctgtgcgaaacagaccgcatggacggagccgttacatcagttacaatcaagtctgagatcctccctgcgagcctgcagtccgccacggctaggcccacctcccgcttgaatcgcctcccagagctcgagttggaggcaatagataaccagtttggtcaaccaggcacgggcgaccagatcccatggaccaacaatacggtgacagctatcaatcagtctaagagtgaggatcagtgcatatctagccaattggacgagcttttatgcccacctaccaccgtagaggggagaaacgacgagaaagccctgctagagcaactagtgagcttcctttctgggaaggacgagaccgaactagcggagttggatcgggctcttggaatcgacaagctcgtccagggcggaggcctcgatgtgctgtccgagcgctttcctccacagcaggcaacaccccctctcattatggaagaaaggccaaacctttacagtcaaccttattcctcccctagccctaccgcaaatctgccttctccattccaggggatggtgagacagaagccgtccctgggaaccatgcccgtgcaagtcacacctccacgaggagcttttagcccaggcatgggcatgcagccgaggcagaccctgaatagaccgcctgcggctccaaaccaactgcggcttcagctgcaacagcgcctgcaggggcagcagcagctgattcaccagaaccgtcaggccatcttaaatcaattcgcagctacagccccagtgggaatcaacatgcggtcaggaatgcaacagcagataacccctcaaccgccacttaatgctcagatgcttgcccagcgacagcgcgaactctacagccagcaacaccgccagaggcagttaatacaacagcagcgagccatgctaatgcggcagcagtctttcggcaataacctcccgccatcaagtggcctgcctgtgcagatggggaacccgaggcttccacagggagctccacagcagttcccttatcccccaaattacgggactaatccaggcacacctcctgccagcacatcccctttcagtcagctcgccgcaaatcccgaggcaagcctggcaaacagaaattccatggtctctaggggtatgacaggtaacataggcggacagttcggaacggggatcaacccccaaatgcaacaaaacgtgtttcagtatcccggagcgggaatggtgcctcagggcgaggctaactttgctccctcccttagtcccggttcctctatggtcccaatgcccatccccccacctcaatcctcactgctgcagcagacacccccagcttccggctaccagtcacccgatatgaaggcctggcaacagggcgctataggaaacaataacgtctttagccaggcggtgcaaaaccagcccaccccagcccaacccggagtatataacaacatgtctatcacagtgagtatggccggtggcaacaccaatgtccagaatatgaatcccatgatggctcagatgcagatgtcttccttgcaaatgcccggaatgaacactgtgtgtccagaacagattaacgatcctgcactaaggcacactggtctgtactgcaatcagctgagcagcactgatctccttaagacggaggccgacggtactcaacaggtgcagcaggtccaggttttcgcagacgtccagtgcacagttaatctcgtagggggagatccttatttgaaccagcccggacctttgggtactcagaagcccacttctggccctcaaacccctcaagctcagcagaaatcgcttttgcaacaactgctgacagaatag

SEQ ID NO: 279170 - DNA, 4326 bp, Artificial Sequence
  derived and/or modified sequence
atgagcggcctgggcgacagcagcagcgaccccgccaaccccgacagccacaagagaaagggcagcccctgcgacaccctggccagcagcaccgagaagagaagaagagagcaggagaacaagtacctggaggagctggccgagctgctgagcgccaacatcagcgacatcgacagcctgagcgtgaagcccgacaagtgcaagatcctgaagaagaccgtggaccagatccagctgatgaagagaatggagcaggagaagagcaccaccgacgacgacgtgcagaagagcgacatcagcagcagcagccagggcgtgatcgagaaggagagcctgggccccctgctgctggaggccctggacggcttcttcttcgtggtgaactgcgagggcagaatcgtgttcgtgagcgagaacgtgaccagctacctgggctacaaccaggaggagctgatgaacaccagcgtgtacagcatcctgcacgtgggcgaccacgccgagttcgtgaagaacctgctgcccaagagcctggtgaacggcgtgccctggccccaggaggccaccagaagaaacagccacaccttcaactgcagaatgctgatccacccccccgacgagcccggcaccgagaaccaggaggcctgccagagatacgaggtgatgcagtgcttcaccgtgagccagcccaagagcatccaggaggacggcgaggacttccagagctgcctgatctgcatcgccagaagactgcccagaccccccgccatcaccggcgtggagagcttcatgaccaagcaggacaccaccggcaagatcatcagcatcgacaccagcagcctgagagccgccggcagaaccggctgggaggacctggtgagaaagtgcatctacgccttcttccagccccagggcagagagcccagctacgccagacagctgttccaggaggtgatgaccagaggcaccgccagcagccccagctacagattcatcctgaacgacggcaccatgctgagcgcccacaccaagtgcaagctgtgctacccccagagccccgacatgcagcccttcatcatgggcatccacatcatcgacagagagcacagcggcctgagcccccaggacgacaccaacagcggcatgagcatccccagagtgaaccccagcgtgaaccccagcatcagccccgcccacggcgtggccagaagcagcaccctgccccccagcaacagcaacatggtgagcaccagaatcaacagacagcagagcagcgacctgcacagcagcagccacagcaacagcagcaacagccagggcagcttcggctgcagccccggcagccagatcgtggccaacgtggccctgaaccagggccaggccagcagccagagcagcaaccccagcctgaacctgaacaacagccccatggagggcaccggcatcagcctggcccagttcatgagccccagaagacaggtgaccagcggcctggccaccagacccagaatgcccaacaacagcttcccccccaacatcagcaccctgagcagccccgtgggcatgaccagcagcgcctgcaacaacaacaacagaagctacagcaacatccccgtgaccagcctgcagggcatgaacgagggccccaacaacagcgtgggcttcagcgccagcagccccgtgctgagacagatgagcagccagaacagccccagcagactgaacatccagcccgccaaggccgagagcaaggacaacaaggagatcgccagcatcctgaacgagatgatccagagcgacaacagcagcagcgacggcaagcccctggacagcggcctgctgcacaacaacgacagactgagcgacggcgacagcaagtacagccagaccagccacaagctggtgcagctgctgaccaccaccgccgagcagcagctgagacacgccgacatcgacaccagctgcaaggacgtgctgagctgcaccggcaccagcaacagcgccagcgccaacagcagcggcggcagctgccccagcagccacagcagcctgaccgagagacacaagatcctgcacagactgctgcaggagggcagccccagcgacatcaccaccctgagcgtggagcccgacaagaaggacagcgccagcaccagcgtgagcgtgaccggccaggtgcagggcaacagcagcatcaagctggagctggacgccagcaagaagaaggagagcaaggaccaccagctgctgagatacctgctggacaaggacgagaaggacctgagaagcacccccaacctgagcctggacgacgtgaaggtgaaggtggagaagaaggagcagatggacccctgcaacaccaaccccacccccatgaccaagcccacccccgaggagatcaagctggaggcccagagccagttcaccgccgacctggaccagttcgaccagctgctgcccaccctggagaaggccgcccagctgcccggcctgtgcgagaccgacagaatggacggcgccgtgaccagcgtgaccatcaagagcgagatcctgcccgccagcctgcagagcgccaccgccagacccaccagcagactgaacagactgcccgagctggagctggaggccatcgacaaccagttcggccagcccggcaccggcgaccagatcccctggaccaacaacaccgtgaccgccatcaaccagagcaagagcgaggaccagtgcatcagcagccagctggacgagctgctgtgcccccccaccaccgtggagggcagaaacgacgagaaggccctgctggagcagctggtgagcttcctgagcggcaaggacgagaccgagctggccgagctggacagagccctgggcatcgacaagctggtgcagggcggcggcctggacgtgctgagcgagagattccccccccagcaggccaccccccccctgatcatggaggagagacccaacctgtacagccagccctacagcagccccagccccaccgccaacctgcccagccccttccagggcatggtgagacagaagcccagcctgggcaccatgcccgtgcaggtgaccccccccagaggcgccttcagccccggcatgggcatgcagcccagacagaccctgaacagaccccccgccgcccccaaccagctgagactgcagctgcagcagagactgcagggccagcagcagctgatccaccagaacagacaggccatcctgaaccagttcgccgccaccgcccccgtgggcatcaacatgagaagcggcatgcagcagcagatcaccccccagccccccctgaacgcccagatgctggcccagagacagagagagctgtacagccagcagcacagacagagacagctgatccagcagcagagagccatgctgatgagacagcagagcttcggcaacaacctgccccccagcagcggcctgcccgtgcagatgggcaaccccagactgccccagggcgccccccagcagttcccctacccccccaactacggcaccaaccccggcaccccccccgccagcaccagccccttcagccagctggccgccaaccccgaggccagcctggccaacagaaacagcatggtgagcagaggcatgaccggcaacatcggcggccagttcggcaccggcatcaacccccagatgcagcagaacgtgttccagtaccccggcgccggcatggtgccccagggcgaggccaacttcgcccccagcctgagccccggcagcagcatggtgcccatgcccatcccccccccccagagcagcctgctgcagcagaccccccccgccagcggctaccagagccccgacatgaaggcctggcagcagggcgccatcggcaacaacaacgtgttcagccaggccgtgcagaaccagcccacccccgcccagcccggcgtgtacaacaacatgagcatcaccgtgagcatggccggcggcaacaccaacgtgcagaacatgaaccccatgatggcccagatgcagatgagcagcctgcagatgcccggcatgaacaccgtgtgccccgagcagatcaacgaccccgccctgagacacaccggcctgtactgcaaccagctgagcagcaccgacctgctgaagaccgaggccgacggcacccagcaggtgcagcaggtgcaggtgttcgccgacgtgcagtgcaccgtgaacctggtgggcggcgacccctacctgaaccagcccggccccctgggcacccagaagcccaccagcggcccccagaccccccaggcccagcagaagagcctgctgcagcagctgctgaccgagtag

SEQ ID NO: 279171 - protein, 1440 aa, Artificial Sequence
  derived and/or modified sequence
MSGLGDSSSDPANPDSHKRKGSPCDTLASSTEKRRREQENKYLEELAELLSANISDIDSLSVKPDKCKILKKTVDQIQLMKRMEQEKSTTDDDVQKSDISSSSQGVIEKESLGPLLLEALDGFFFVVNCEGRIVFVSENVTSYLGYNQEELMNTSVYSILHVGDHAEFVKNLLPKSLVNGVPWPQEATRRNSHTFNCRMLIHPPDEPGTENQEACQRYEVMQCFTVSQPKSIQEDGEDFQSCLICIARRLPRPPAITGVESFMTKQDTTGKIISIDTSSLRAAGRTGWEDLVRKCIYAFFQPQGREPSYARQLFQEVMTRGTASSPSYRFILNDGTMLSAHTKCKLCYPQSPDMQPFIMGIHIIDREHSGLSPQDDTNSGMSIPRVNPSVNPSISPAHGVARSSTLPPSNSNMVSTRINRQQSSDLHSSSHSNSSNSQGSFGCSPGSQIVANVALNQGQASSQSSNPSLNLNNSPMEGTGISLAQFMSPRRQVTSGLATRPRMPNNSFPPNISTLSSPVGMTSSACNNNNRSYSNIPVTSLQGMNEGPNNSVGFSASSPVLRQMSSQNSPSRLNIQPAKAESKDNKEIASILNEMIQSDNSSSDGKPLDSGLLHNNDRLSDGDSKYSQTSHKLVQLLTTTAEQQLRHADIDTSCKDVLSCTGTSNSASANSSGGSCPSSHSSLTERHKILHRLLQEGSPSDITTLSVEPDKKDSASTSVSVTGQVQGNSSIKLELDASKKKESKDHQLLRYLLDKDEKDLRSTPNLSLDDVKVKVEKKEQMDPCNTNPTPMTKPTPEEIKLEAQSQFTADLDQFDQLLPTLEKAAQLPGLCETDRMDGAVTSVTIKSEILPASLQSATARPTSRLNRLPELELEAIDNQFGQPGTGDQIPWTNNTVTAINQSKSEDQCISSQLDELLCPPTTVEGRNDEKALLEQLVSFLSGKDETELAELDRALGIDKLVQGGGLDVLSERFPPQQATPPLIMEERPNLYSQPYSSPSPTANLPSPFQGMVRQKPSLGTMPVQVTPPRGAFSPGMGMQPRQTLNRPPAAPNQLRLQLQQRLQGQQQLIHQNRQAILNQFAATAPVGINMRSGMQQQITPQPPLNAQMLAQRQRELYSQQHRQRQLIQQQRAMLMRQQSFGNNLPPSSGLPVQMGNPRLPQGAPQQFPYPPNYGTNPGTPPASTSPFSQLAANPEASLANRNSMVSRGMTGNIGGQFGTGINPQMQQNVFQYPGAGMVPQGEANFAPSLSPGSSMVPMPIPPPQSSLLQQTPPASGYQSPDMKAWQQGAIGNNNVFSQAVQNQPTPAQPGVYNNMSITVSMAGGNTNVQNMNPMMAQMQMSSLQMPGMNTVCPEQINDPALRHTGLYCNQLSSTDLLKTEADGTQVQQVQVFADVQCTVNLVGGDPYLNQPGPLGTQKPTSGPQTPQAQQKSLLQQLLTE

SEQ ID NO: 279172 - DNA, 4323 bp, Artificial Sequence
  derived and/or modified sequence
atgtctggcctgggtgatagctctagcgatccagctaatcccgacagccacaaacgtaaaggatccccttgcgacacccttgcaagcagcaccgaaaagcgaagaagggaacaggagaacaaatacttggaggagcttgccgagctcctcagtgcaaacatctctgacattgatagcttgtcagtgaagccagacaagtgcaaaatcttgaagaagaccgtcgaccagatccagctgatgaaacgcatggaacaggagaaatccacaactgacgacgatgtgcagaagtctgatatctccagctccagtcagggcgtcattgagaaggagtccctgggcccgctcctgttggaagctctggacggcttcttttttgtagtgaactgtgagggtcgaattgtgtttgtttctgagaacgtgaccagttatctggggtataaccaagaagagctgatgaatacatcagtctacagcattctgcacgtgggtgaccacgctgagtttgtgaaaaatctgctgcccaagagcctcgtgaacggcgtcccttggccacaggaagccaccagacgcaacagtcacactttcaactgtcggatgctgattcatcctccagatgagccaggaacggaaaatcaggaggcttgccagaggtatgaggtaatgcaatgcttcacggttagtcaacctaaaagtatccaagaggacggagaagatttccagtcatgtctgatttgcattgctaggaggctacccaggcctcccgcaatcaccggagttgagagttttatgaccaagcaggacactaccggcaagattatctccatcgatacatcttcgctgagagccgctggaaggacgggttgggaagacctggtgcgcaagtgcatttatgcttttttccaaccgcaaggacgagagccaagctacgcccgccagctgtttcaggaagtgatgactcggggaactgcttcatctccttcgtatcggttcattttaaacgatggaactatgctcagtgcgcacactaagtgcaagctatgttatccccagtcccctgatatgcagccctttatcatgggcatccacatcatcgaccgagagcacagcggattatcaccgcaggacgacaccaactccgggatgagtattccaagagtcaatccatccgtaaaccccagtatttcccctgcacacggtgttgcccgttcatcaacactgccgccctcaaactccaacatggtcagcaccaggatcaatcgccagcagagctctgatctgcacagttccagtcactcaaattcttcaaacagccagggcagcttcgggtgctcacccggtagccaaattgtcgccaacgtggctttaaatcaggggcaggccagcagccagagctccaatccaagcctcaacctgaataatagcccgatggagggtaccggaatcagcctcgctcaattcatgagcccacgacgccaagtgacctcagggctggcaactcggcctaggatgcccaacaactcatttcccccgaacatctcaaccctgtcctctcctgtgggaatgacctcttccgcctgtaacaataacaaccggagttactctaatattcccgtaactagcttgcagggcatgaatgaaggaccgaataatagcgtaggctttagtgcatcctctccagtacttagacagatgtcttcccagaacagcccctctcgtttgaatattcaaccagccaaggcagagtctaaagataataaagaaatcgcctcgatcttaaatgaaatgatacagtccgacaactcgtcgtctgacggcaaaccactggactcaggccttcttcataataacgacagattgagtgacggagactccaagtattctcagacctcccataagctggttcagctgttgaccacaacagctgagcagcagcttcggcatgcagatattgataccagctgcaaggacgttttatcctgtaccggaacgtctaactctgcctctgcaaacagctctggcggctcttgcccctccagccattcatctctgaccgaacgccacaagattcttcaccgtctgttgcaggaagggagcccgtcggacatcaccaccctaagtgtagagcccgacaagaaagactctgcaagtacctcggtgtctgtgactggccaagtccaggggaactcaagcatcaaactggaactggatgcctccaagaagaaagagtctaaagaccaccagttattgagatatttattagataaggacgagaaagatctaagatccactccaaatctgtccctggacgatgtaaaggtaaaagtggagaagaaggaacagatggatccctgtaacaccaacccaacccccatgacaaagccaacacccgaggagattaagctcgaagcacagtcacagttcaccgccgatctggatcagtttgatcaactgcttcccacactggagaaggcagcccaactgcccggcttgtgcgagaccgaccggatggatggcgccgtgacaagcgtaacaattaaatctgaaatcttgccggcgagtctccagtctgcaacagcccggccaacaagcagactgaaccgacttcctgaattagagctggaagcaattgataaccaatttggacagcccggcacaggcgaccagatcccctggacgaataatacagtaacagctataaatcagtcaaagtccgaagaccagtgcatctccagccagctggatgagctcctgtgcccacctactacagtggaaggccgcaatgatgaaaaggcacttctggagcagctggtcagctttttatccgggaaggacgagacggagctcgccgagctggatcgtgccctgggtatagataagctcgttcaaggaggtggattagacgttctgagcgagcgttttcccccccagcaggcaactccccccctaatcatggaagagcgcccaaatctctacagccagccttatagtagtcccagccccacagctaacctgcccagcccatttcaaggaatggtccgccagaagccgtctctcggaacaatgcctgttcaggtgactccacctaggggagctttctcacccggcatgggaatgcaaccccgacagaccctcaaccgccccccagccgcacccaaccagctgcggttgcagctacaacagcgactccagggccagcagcagttaatccatcagaacaggcaggcaatcctcaatcaatttgccgccacagctcctgtcggtatcaacatgcgatcgggcatgcagcagcagatcaccccccagccacctcttaatgctcaaatgcttgctcagagacagagagagctgtactcacagcagcaccggcaacgccagctgattcagcaacagcgggctatgctcatgaggcagcagagctttggcaataatttgcccccatccagcggcctcccagtccaaatgggaaaccctaggctgcctcagggggcccctcagcaattcccctatccccctaattatggtactaatcctggcacaccaccagcatctaccagtcctttttctcagcttgcggcaaacccggaggcctcgcttgccaatcgtaactcaatggtgagcagaggaatgactgggaacatcggcggccagttcggcactggcattaaccctcagatgcagcagaacgtattccagtaccctggcgcgggcatggtgccgcagggagaagccaacttcgcaccctcgcttagtcccggcagtagcatggtccctatgccaataccccccccccagtcaagcctcctgcaacagacccctcctgccagcgggtatcagagccctgatatgaaggcctggcagcagggtgctatcggtaacaataatgtcttttcacaggctgtacagaatcagccaactcccgcgcagccaggcgtttataacaacatgtcaattacagtttctatggcgggagggaatacaaacgttcagaatatgaacccaatgatggcacaaatgcagatgtcttccctgcagatgccggggatgaacaccgtttgcccggaacaaataaatgacccggccctgcgtcatacggggttgtattgtaatcagctgtcctctaccgatctgttaaagacggaagctgatggcacccaggtccagcaagtgcaagtcttcgccgatgttcagtgcactgtcaatttggtcggcggcgatccctatctcaaccagcctggaccgctgggtacccaaaaaccaacgagcggcccacagacccctcaggcccagcaaaaaagtctgctgcagcagctgctgaccgagtag

SEQ ID NO: 279173 - DNA, 4323 bp, Artificial Sequence
  derived and/or modified sequence
atgagcggcctgggggacagcagcagtgaccctgccaacccagacagccacaagaggaagggcagcccctgtgacaccctggccagcagcacagagaagagaagaagagagcaggagaacaagtacctggaggagctggccgagctgctgagcgccaacatcagtgacatcgacagcctgtctgtgaagccagacaagtgcaagatcctgaagaagacagtggaccagatccagctgatgaagaggatggagcaggagaagagcaccacagatgatgatgtgcagaagagtgacatcagcagcagcagccagggcgtgattgagaaggagagcctgggccccctgctgctggaggccctggatggcttcttctttgtggtgaactgtgagggcagaattgtgtttgtgtctgaaaatgtgaccagctacctgggctacaaccaggaggagctgatgaacacctctgtgtacagcatcctgcacgtgggggaccacgccgagtttgtgaagaacctgctgcccaagagcctggtgaatggagtgccctggccccaggaggccaccaggaggaacagccacaccttcaactgcaggatgctgatccaccccccagatgagcctggaacagagaaccaggaggcctgccagagatatgaggtgatgcagtgcttcaccgtgtcccagcccaagagcatccaggaggatggagaggacttccagagctgcctgatctgcatcgcccggcggctgccccggcccccagccatcactggagtggagagcttcatgaccaagcaggacaccaccgggaagatcatcagcattgacaccagcagcctgcgggctgctggccgcacaggctgggaggacctggtgaggaagtgcatctatgccttcttccagccccagggccgggagcccagctatgcccggcagctgttccaggaggtgatgacccggggcacagccagcagccccagctaccgcttcatcctgaatgatggcaccatgctgagcgcccacaccaagtgcaagctgtgctacccccagagcccagacatgcagcccttcatcatgggcatccacatcatcgaccgggagcacagcggcctgagcccccaggatgacaccaacagcggcatgagcatcccccgggtgaaccccagcgtgaaccccagcatcagccctgcccacggcgtggcccggagcagcaccctgccccccagcaacagcaacatggtgtccacccgcatcaaccggcagcagagcagtgacctgcacagcagcagccacagcaacagcagcaacagccagggcagctttggctgcagccctggcagccagatcgtggccaacgtggccctgaaccagggccaggccagcagccagagcagcaaccccagcctgaacctgaacaacagccccatggagggcaccggcatcagcctggcccagttcatgagcccccggcggcaggtgaccagcggcctggccacccggcccaggatgcccaacaacagcttcccccccaacatcagcaccctgagcagccctgtgggcatgaccagcagcgcctgcaacaacaacaacagaagctacagcaacatccctgtgaccagcctgcagggcatgaatgaaggccccaacaacagcgtgggcttcagcgccagcagccctgtgctgcggcagatgagcagccagaacagccccagccggctgaacatccagcctgccaaggccgagagcaaggacaacaaggagatcgccagcatcctgaatgagatgatccagagcgacaacagcagcagtgatggcaagcccctggacagcggcctgctgcacaacaatgaccggctgagtgatggagacagcaagtacagccagaccagccacaagctggtgcagctgctgaccaccacagctgagcagcagctgcggcatgctgacatcgacaccagctgcaaggatgtgctgagctgcaccggcaccagcaacagcgccagcgccaacagcagcggcggcagctgccccagcagccacagcagcctgacagagcggcacaagatcctgcaccggctgctgcaggagggcagccccagcgacatcaccaccctgtctgtggagccagacaagaaggacagcgccagcacctctgtgtctgtgacaggccaggtgcagggcaacagcagcatcaagctggagctggatgccagcaagaagaaggagagcaaggaccaccagctgctgcgctacctgctggacaaggatgagaaggacctgcggagcacccccaacctgagcctggatgatgtgaaggtgaaggtggagaagaaggagcagatggacccctgcaacaccaaccccacccccatgaccaagcccaccccagaggagatcaagctggaggcccagagccagttcaccgctgacctggaccagtttgaccagctgctgcccaccctggagaaggccgcccagctgcccggcctgtgtgaaacagacaggatggatggagctgtgacctctgtgaccatcaagtctgagatcctgcctgccagcctgcagagcgccacagcccggcccaccagccggctgaaccggctgcctgagctggagctggaggccatcgacaaccagtttggccagcccggcactggagaccagatcccctggaccaacaacacagtgacagccatcaaccagagcaagtctgaggaccagtgcatcagcagccagctggatgagctgctgtgcccccccaccaccgtggagggcagaaatgatgagaaggccctgctggagcagctggtgtccttcctgagcggcaaggatgaaacagagctggccgagctggaccgggccctgggcatcgacaagctggtgcagggcggcggcctggatgtgctgtctgagcgcttccccccccagcaggccaccccacccctcatcatggaggagcggcccaacctgtacagccagccctacagcagccccagccccacagccaacctgcccagccccttccagggcatggtgcggcagaagcccagcctgggcaccatgcctgtgcaggtgaccccacccaggggggccttcagccctggcatgggcatgcagccccggcagaccctgaacagacctcctgctgcccccaaccagctgcggctgcagctgcagcagaggctgcagggccagcagcagctgatccaccagaaccggcaggccatcctgaaccagtttgctgccacagcccctgtgggcatcaacatgaggagcggcatgcagcagcagatcaccccccagccccccctgaatgcccagatgctggcccagaggcagcgggagctgtacagccagcagcaccggcagaggcagctgatccagcagcagagggccatgctgatgaggcagcagagctttggaaacaacctgccccccagcagcggcctgcctgtgcagatgggcaacccccggctgccccagggcgccccccagcagttcccctacccacccaactacggcaccaaccctggcaccccaccagccagcaccagccccttcagccagctggccgccaaccctgaggccagcctggccaacagaaattccatggtgtcccggggcatgacaggcaacattggaggccagtttggaacaggcatcaacccccagatgcagcagaatgtgttccagtacccaggagctggcatggtgccccagggcgaggccaactttgcccccagcctgagccctggcagctccatggtgcccatgcccatccccccaccccagagcagcctgctgcagcagaccccaccagccagcggctaccagagcccagacatgaaggcctggcagcagggcgccatcggcaacaacaacgtgttcagccaggccgtgcagaaccagcccaccccagcccagcccggggtgtacaacaacatgagcatcaccgtgtccatggccggcggcaacaccaacgtgcagaacatgaaccccatgatggcccagatgcagatgagcagcctgcagatgcctggcatgaacacagtgtgcccagagcagatcaatgaccctgccctgcggcacacaggcctgtactgcaaccagctgagcagcacagacctgctgaagacagaagcagatggcacccaggtgcagcaggtgcaggtgtttgctgatgtgcagtgcaccgtgaacctggtgggcggggacccctacctgaaccagcccggccccctgggcacccagaagcccaccagcggcccccagaccccccaggcccagcagaagagcctgctgcagcagctgctgacagaatag

SEQ ID NO: 279174 - DNA, 4323 bp, Artificial Sequence
  derived and/or modified sequence
atgagcggcctgggcgacagcagcagcgaccccgccaaccccgactcccacaagcgcaagggcagcccgtgcgacactctcgcgtccagtaccgagaagcggaggcgggagcaagagaacaaatatctagaggaactcgccgaattactctccgctaacatttcagatatcgattctctatccgtgaagccagataagtgcaagattttgaagaagacagtggatcagattcagttgatgaagcgtatggaacaagagaagagcactactgatgatgacgtccagaaaagtgacatcagctcctcctctcagggcgttatcgaaaaggagtcgctcggcccccttttactggaagccctggatggattcttcttcgtcgtgaattgcgaagggagaatcgttttcgtgtctgagaatgtcacctcatacctgggatataaccaagaggagctgatgaatacatctgtgtattctatcctccacgtcggcgaccacgccgaattcgtgaagaacctgttacccaaaagtctagtgaacggtgtgccctggccgcaggaggccaccagaaggaactctcacacttttaactgccggatgctgatccatccaccagacgaaccaggaactgaaaaccaggaagcgtgtcaacgatacgaggtgatgcaatgctttactgtttctcagccaaagagcatccaggaagatggagaggattttcaatcttgtctgatatgtatcgccaggaggctaccacgcccccctgctattacaggcgtggagtctttcatgacaaaacaggacacgaccggcaagattatctccattgacacgtcttctcttagagccgccggtcgcaccggctgggaagatttggtgcggaagtgtatatatgcattctttcagccccaaggtagggaaccatcctacgccagacagctgtttcaagaagtgatgactagggggactgcatccagcccctcttatagattcattcttaacgatgggactatgctgtctgcccacactaagtgtaagctgtgctatcctcagtctccagacatgcagccattcatcatgggaatccatattatcgaccgcgagcactctggcctgagcccccaggatgacacaaacagtgggatgtctattccccgcgtgaacccatcagtcaacccttctatcagccctgcccacggggtcgctcggtcatcgactctcccaccatccaacagcaacatggtgtcgacccgcattaacaggcaacagagcagcgacctgcactcaagctcacattccaacagtagcaattcccaaggctcttttgggtgcagcccggggtctcaaattgttgccaacgtggctttgaaccagggccaggctagctcacaatcttctaatccttctttaaacctaaacaactccccaatggagggaacaggaatatcgttggcccagttcatgagtcccaggagacaagtcacatccggcctggccaccagaccaagaatgccaaacaactctttcccaccaaatatttcaactttgagctcacctgttggtatgacttcctccgcatgcaataataacaaccgatcatactccaatattcctgtgacctcccttcagggcatgaacgagggacccaataactccgtcggtttcagtgcttcgtcaccagtgctgcggcaaatgagcagtcagaatagcccctctcgcttgaacatccagccggcaaaagctgagtctaaagacaacaaggaaattgctagcatcctaaacgagatgatccagtcagataactcaagcagcgatggaaagcctttagattccggactgctgcacaataatgaccgcctgtcagatggcgacagtaagtactctcagacctcccacaagctagttcagttgctgacaactacagctgagcagcagctgcgtcacgccgacattgacacctcatgcaaagacgttctttcttgcacgggtacctctaatagcgccagcgctaattcgagtggcggctcttgtccaagctcccatagctcccttaccgagcgacacaaaatcctgcaccggctgctgcaggaaggctccccctctgatattactacgctgagcgtggaacctgacaagaaggactcagcttctacaagcgtttccgtgacaggtcaggtgcagggaaattcttcgattaaattagagttggacgcgtctaaaaaaaaggagtcgaaggatcaccagctgctccgatacttactagacaaggatgaaaaggatctccgatcgacacctaatctgtcactggacgacgttaaggtgaaggttgagaagaaggagcagatggacccctgcaatacgaatcccaccccgatgaccaagcccacccccgaagagataaagctggaggcccaaagtcaattcacagccgacctggatcagtttgaccagctattgccgaccctcgaaaaggctgctcagctgcctgggctctgcgagaccgaccgcatggacggggccgtgacatcagtcacaatcaagtcagaaattttacccgctagccttcagtcggccactgccaggcccacgagtcgcttgaacagactgcctgagctggagctcgaagctatcgacaaccagttcggccagcccgggacgggcgatcagatcccatggactaacaatacggtgacggcaattaatcagtccaagtcagaggaccaatgtatcagtagccaactagatgaactactatgccctcccaccactgtggaggggaggaatgatgagaaggctctgttggaacaactggtttcattcctgtccggaaaagatgaaactgagcttgccgagttagacagggctctggggatagacaagttggtccagggcggcggtcttgatgtgctctccgagcgtttcccaccgcaacaggccacaccgccactgattatggaggagaggccaaatctgtactctcaaccctattccagtccatcgcccacagctaatcttccaagccccttccagggcatggtcagacagaagcccagccttgggactatgccagtgcaggtcacccctcctcgcggcgctttctcgccgggtatggggatgcaaccccgacagacattaaatcggcccccagcagctcccaaccagctgagactccagttacagcagcgcctgcaaggccagcagcaacttatccatcagaataggcaggctattctgaaccagttcgctgcaactgctcccgtgggtatcaatatgcgctcaggcatgcagcagcagattaccccacagcccccactcaacgctcagatgctcgcccagaggcagagagagctctactcccagcaacaccgtcagaggcagcttatccagcaacagagggccatgctcatgaggcaacagtcctttggaaacaacctgccgccctcctctggcctccctgtgcagatgggaaacccacgcctgcctcagggcgcgccgcagcagttcccctatcctcccaactacggcaccaatccaggaaccccgcctgcgtccacctcaccattttcccagcttgccgccaaccccgaagcctccctggcaaacagaaattctatggtgagcagaggaatgactggaaatatcggcggacagtttggtactggtataaatcctcagatgcagcagaacgtgttccagtatcccggagcagggatggtcccacagggagaagcaaacttcgccccatctctctcccccgggagctctatggtgccgatgccaataccacccccgcagagcagccttttgcagcaaacacccccggcctcaggttaccagtcccccgacatgaaagcttggcagcagggagctatcgggaataacaatgtcttttctcaagcagtgcaaaaccagccaacccccgcacaacccggagtatataataacatgtctattacagtctcaatggcgggggggaacaccaacgtgcagaacatgaaccccatgatggcacagatgcagatgtccagcctgcaaatgcccgggatgaatacagtgtgccccgaacagattaacgatccagccctacgacatacagggctctactgcaaccagctttcatccacagacctgcttaaaactgaggcagacggaacccaggtgcagcaggtgcaggtgttcgcagacgtgcagtgcacagtcaatttggtggggggggatccatacctgaaccagccggggccactggggactcaaaaaccgaccagcggccctcaaactccccaggcccagcaaaaatctctgctgcagcaactgcttacggagtag

SEQ ID NO: 279175 - DNA, 6952 bp, Artificial Sequence
  derived and/or modified sequence
ttccagttacagctatatcagagaatgagttaatctcctcagaaatcactaaatactactctgaggggcttagaaattaacaggttgtttatataattggccttaaatgaggtgagagtgaagagactagagccatctctggaaaacatcattatcccattccccgggaagctaccctctggaactcaagatttgaccatatctgttttgaggattcattatgaacaaagaagtctcccaggtgtgaagtttttcaacatgagtggcctcggggacagttcatccgaccctgctaacccagactcacataagaggaaaggatcgccatgtgacacactggcatcaagcacggaaaagaggcgcagggagcaagaaaataaatatttagaagaactagctgagttactgtctgccaacattagtgacattgacagcttgagtgtaaaaccagacaaatgcaagattttgaagaaaacagtcgatcagatacagctaatgaagagaatggaacaagagaaatcaacaactgatgacgatgtacagaaatcagacatctcatcaagtagtcaaggagtgatagaaaaggaatccttgggacctcttcttttggaggctttggatggatttttctttgttgtgaactgtgaagggagaattgtatttgtgtcagagaatgtaaccagctacttaggttacaatcaggaggaattaatgaatacgagcgtctacagcatactgcacgtgggggatcatgcagaatttgtgaagaatctgctaccaaaatcactagtaaatggagttccttggcctcaagaggcaacacgacgaaatagccatacctttaactgcaggatgctaattcaccctccagatgagccagggaccgagaaccaagaagcttgccagcgttatgaagtaatgcagtgtttcactgtgtcacagccaaaatcaattcaagaggatggagaagatttccagtcatgtctgatttgtattgcacggcgattacctcggcctccagctattacgggtgtagaatcctttatgaccaagcaagatactacaggtaaaatcatctctattgatactagttccctgagagctgctggcagaactggttgggaagatttagtgaggaagtgcatttatgcttttttccaacctcagggcagagaaccatcttatgccagacagctgttccaagaagtgatgactcgtggcactgcctccagcccctcctatagattcatattgaatgatgggacaatgcttagcgcccacaccaagtgtaaactttgctaccctcaaagtccagacatgcaacctttcatcatgggaattcatatcatcgacagggagcacagtgggctttctcctcaagatgacactaattctggaatgtcaattccccgagtaaatccctcggtcaatcctagtatctctccagctcatggtgtggctcgttcatccacattgccaccatccaacagcaacatggtatccaccagaataaaccgccagcagagctcagaccttcatagcagcagtcatagtaattctagcaacagccaaggaagtttcggatgctcacccggaagtcagattgtagccaatgttgccttaaaccaaggacaggccagttcacagagcagtaatccctctttaaacctcaataattctcctatggaaggtacaggaatatccctagcacagttcatgtctccaaggagacaggttacttctggattggcaacaaggcccaggatgccaaacaattcctttcctcctaatatttcgacattaagctctcccgttggcatgacaagtagtgcctgtaataataataaccgatcttattcaaacatcccagtaacatctttacagggtatgaatgaaggacccaataactccgttggcttctctgccagttctccagtcctcaggcagatgagctcacagaattcacctagcagattaaatatacaaccagcaaaagctgagtccaaagataacaaagagattgcctcaattttaaatgaaatgattcaatctgacaacagctctagtgatggcaaacctctggattcagggcttctgcataacaatgacagactttcagatggagacagtaaatactctcaaaccagtcacaaactagtgcagcttttgacaacaactgccgaacagcagttacggcatgctgatatagacacaagctgcaaagatgtcctgtcttgcacaggcacttccaactctgcctctgctaactcttcaggaggttcttgtccctcttctcatagctcattgacagaacggcataaaattctacaccggctcttacaggagggtagcccctcagatatcaccactttgtctgtcgagcctgataaaaaggacagtgcatctacttctgtgtcagtgactggacaggtacaaggaaactccagtataaaactagaactggatgcttcaaagaaaaaagaatcaaaagaccatcagctcctacgctatcttttagataaagatgagaaagatttaagatcaactccaaacctgagcctggatgatgtaaaggtgaaagtggaaaagaaagaacagatggatccatgtaatacaaacccaaccccaatgaccaaacccactcctgaggaaataaaactggaggcccagagccagtttacagctgaccttgaccagtttgatcagttactgcccacgctggagaaggcagcacagttgccaggcttatgtgagacagacaggatggatggtgcggtcaccagtgtaaccatcaaatcggagatcctgccagcttcacttcagtccgccactgccagacccacttccaggctaaatagattacctgagctggaattggaagcaattgataaccaatttggacaaccaggaacaggcgatcagattccatggacaaataatacagtgacagctataaatcagagtaaatcagaagaccagtgtattagctcacaattagatgagcttctctgtccacccacaacagtagaagggagaaatgatgagaaggctcttcttgaacagctggtatccttccttagtggcaaagatgaaactgagctagctgaactagacagagctctgggaattgacaaacttgttcaggggggtggattagatgtattatcagagagatttccaccacaacaagcaacgccacctttgatcatggaagaaagacccaacctttattcccagccttactcttctccttctcctactgccaatctccctagccctttccaaggcatggtcaggcaaaaaccttcactggggacgatgcctgttcaagtaacacctccccgaggtgctttttcacctggcatgggcatgcagcccaggcaaactctaaacagacctccggctgcacctaaccagcttcgacttcaactacagcagcgattacagggacaacagcagttgatacaccaaaatcggcaagctatcttaaaccagtttgcagcaactgctcctgttggcatcaatatgagatcaggcatgcaacagcaaattacacctcagccacccctgaatgctcaaatgttggcacaacgtcagcgggaactgtacagtcaacagcaccgacagaggcagctaatacagcagcaaagagccatgcttatgaggcagcaaagctttgggaacaacctccctccctcatctggactaccagttcaaatggggaacccccgtcttcctcagggtgctccacagcaattcccctatccaccaaactatggtacaaatccaggaaccccacctgcttctaccagcccgttttcacaactagcagcaaatcctgaagcatccttggccaaccgcaacagcatggtgagcagaggcatgacaggaaacataggaggacagtttggcactggaatcaatcctcagatgcagcagaatgtcttccagtatccaggagcaggaatggttccccaaggtgaggccaactttgctccatctctaagccctgggagctccatggtgccgatgccaatccctcctcctcagagttctcttctccagcaaactccacctgcctccgggtatcagtcaccagacatgaaggcctggcagcaaggagcgataggaaacaacaatgtgttcagtcaagctgtccagaaccagcccacgcctgcacagccaggagtatacaacaacatgagcatcaccgtttccatggcaggtggaaatacgaatgttcagaacatgaacccaatgatggcccagatgcagatgagctctttgcagatgccaggaatgaacactgtgtgccctgagcagataaatgatcccgcactgagacacacaggcctctactgcaaccagctctcatccactgaccttctcaaaacagaagcagatggaacccaggacaagaagacagaagagttcttctctgtggtgactacagactagaggaatgctctacaggtgcaacaggttcaggtgtttgctgacgtccagtgtacagtgaatctggtaggcggggacccttacctgaaccagcctggtccactgggaactcaaaagcccacgtcaggaccacagaccccccaggcccagcagaagagcctccttcagcagctactgactgaataaccacttttaaaggaatgtgaaatttaaataatagacatacagagatatacaaatatattatatatttttctgagatttttgatatctcaatctgcagccattcttcaggtcgtagcatttggagcaaaaaaaaaaaaaaaaaaaaaaaaaggagtttgcttttgtcgggagattgaaagatgtttttgtttctttctttgtaaaggccttggatattgaaaaaataccaaggcagaacagttggacaatctatttcttgagccaaatttaattattcttatttttgtaatcagtcattggcttcttatctggatgaaggcttttggaggagaaccaaaacgacaagttccaagaagaagatgaagctccgcctccgccgcttagtcccaaccctgcccaggaagaagggcccgtggggctttgcctgtgcccgtccaccaaaggctgtcatgtgtctcgaaatcagcagccctccccatcccaatcccaggcagcttgtgtgtacaatcagcttctctagcaactctgtatctgttggcttcaagagaatattttgcctccacatatgtaccccttctcctttttttaaagatggatttaaaccaagatgcctccaggaaagaggacgaaatgagtatattcacagaggaatccaaaaaatacagtttgggggaaaatgcaataatttttgatgagatgggtgaaggacaagaagtgagttgtgtcaattattgtagatacaattttctgattaaatctggaaaaataaaaggcagcctgttttttctgcttttattgtattaacagctgaggtagctaaagttatttaaaataaaattaaatttatgatccaagtagcttatttttccctttaaatctcattgtaaatatatttgatttcttgtagaaattgatttccttctgtttaattttatgcttttattatactcttgatttttctaaatttgtgtgtgaaatataacattgattgaattgcagttacatttggttagtaatatttcattattttaataactgtgatgtcatgtatggatttactttggggttcaaatcaaaatgtcactgccagaaagagctgttccagctgatctagagcatactgccctagagtgtccctgggatcatctgaacagaagtgcacaggctacttgtacagagaaaaaattaatactcaaaggaaatcttcattttttagattgactttgggaatttgaattttcatcagtgcaaatataaatttctctatcctgctctgaggctaattggtaccatattttccctttgtgtcttgtgactctgccacatcccatctcatcctggcctctgagtcaagaacccagtgaactgactttctagttctagaagttccgctgcaaggccaggaaagcttgagaaaggtattgtggaagaagcaaaggtagacccccatcactcacctttgtctgcatccctgggcctgtgaatgatgacagcacctgacattctgcaccagctacctctgcctccatggcagagaaaaggccataagaacagtggaagaggagcatggactcagacttcaaggaagaagccatttccccaggtccttccttctgcatctcaccacccctagttacaaataactccattgaacagcatctattcagaaactatgccgaataaaaagattggtggaagggctcatgtggttagcaactatgaaacagaaataggacactcagttacaaacattatctcctttagtttttcagaaaatgcatccctgatttcattcatttccagcttgaaagccagccatattactctagtccctaccaaactgctctagaaggtcatttccattttgtttgtgatatttagacgcgcagacttcaggaagttcacctttaacttcagcattccagatgaagtttcctgactcagtgcttttgcataaggaactagaaaaaaaaagtaaggaaaattggagatgctaacatcctcccccatcccaactgcaccttaaaatatgcatgtcaccttcaaggttttataattgcactgtttgttttatgtatgtacagattaaaattattgctacatttgaggaaaataaaattgcttgcttctatgtaattcctgtcattccacaggaaattcacttttccagctactgaatagaatttgtttaacaacctcatgggttgcctcttcatttacagggaagaaatgaaatgtacatctgcagaaattgccaaagcccaaattaacgagtattataaaaggataataaagcatccctgaagccaaa

SEQ ID NO: 279176 - DNA, 6828 bp, Artificial Sequence
  derived and/or modified sequence
ggggcttagaaattaacaggttgtttatataattggccttaaatgaggtgagagtgaagagactagagccatctctggaaaacatcattatcccattccccgggaagctaccctctggaactcaagatttgaccatatctgttttgaggattcattatgaacaaagaagtctcccaggtgtgaagtttttcaacatgagtggcctcggggacagttcatccgaccctgctaacccagactcacataagaggaaaggatcgccatgtgacacactggcatcaagcacggaaaagaggcgcagggagcaagaaaataaatatttagaagaactagctgagttactgtctgccaacattagtgacattgacagcttgagtgtaaaaccagacaaatgcaagattttgaagaaaacagtcgatcagatacagctaatgaagagaatggaacaagagaaatcaacaactgatgacgatgtacagaaatcagacatctcatcaagtagtcaaggagtgatagaaaaggaatccttgggacctcttcttttggaggctttggatggatttttctttgttgtgaactgtgaagggagaattgtatttgtgtcagagaatgtaaccagctacttaggttacaatcaggaggaattaatgaatacgagcgtctacagcatactgcacgtgggggatcatgcagaatttgtgaagaatctgctaccaaaatcactagtaaatggagttccttggcctcaagaggcaacacgacgaaatagccatacctttaactgcaggatgctaattcaccctccagatgagccagggaccgagaaccaagaagcttgccagcgttatgaagtaatgcagtgtttcactgtgtcacagccaaaatcaattcaagaggatggagaagatttccagtcatgtctgatttgtattgcacggcgattacctcggcctccagctattacgggtgtagaatcctttatgaccaagcaagatactacaggtaaaatcatctctattgatactagttccctgagagctgctggcagaactggttgggaagatttagtgaggaagtgcatttatgcttttttccaacctcagggcagagaaccatcttatgccagacagctgttccaagaagtgatgactcgtggcactgcctccagcccctcctatagattcatattgaatgatgggacaatgcttagcgcccacaccaagtgtaaactttgctaccctcaaagtccagacatgcaacctttcatcatgggaattcatatcatcgacagggagcacagtgggctttctcctcaagatgacactaattctggaatgtcaattccccgagtaaatccctcggtcaatcctagtatctctccagctcatggtgtggctcgttcatccacattgccaccatccaacagcaacatggtatccaccagaataaaccgccagcagagctcagaccttcatagcagcagtcatagtaattctagcaacagccaaggaagtttcggatgctcacccggaagtcagattgtagccaatgttgccttaaaccaaggacaggccagttcacagagcagtaatccctctttaaacctcaataattctcctatggaaggtacaggaatatccctagcacagttcatgtctccaaggagacaggttacttctggattggcaacaaggcccaggatgccaaacaattcctttcctcctaatatttcgacattaagctctcccgttggcatgacaagtagtgcctgtaataataataaccgatcttattcaaacatcccagtaacatctttacagggtatgaatgaaggacccaataactccgttggcttctctgccagttctccagtcctcaggcagatgagctcacagaattcacctagcagattaaatatacaaccagcaaaagctgagtccaaagataacaaagagattgcctcaattttaaatgaaatgattcaatctgacaacagctctagtgatggcaaacctctggattcagggcttctgcataacaatgacagactttcagatggagacagtaaatactctcaaaccagtcacaaactagtgcagcttttgacaacaactgccgaacagcagttacggcatgctgatatagacacaagctgcaaagatgtcctgtcttgcacaggcacttccaactctgcctctgctaactcttcaggaggttcttgtccctcttctcatagctcattgacagaacggcataaaattctacaccggctcttacaggagggtagcccctcagatatcaccactttgtctgtcgagcctgataaaaaggacagtgcatctacttctgtgtcagtgactggacaggtacaaggaaactccagtataaaactagaactggatgcttcaaagaaaaaagaatcaaaagaccatcagctcctacgctatcttttagataaagatgagaaagatttaagatcaactccaaacctgagcctggatgatgtaaaggtgaaagtggaaaagaaagaacagatggatccatgtaatacaaacccaaccccaatgaccaaacccactcctgaggaaataaaactggaggcccagagccagtttacagctgaccttgaccagtttgatcagttactgcccacgctggagaaggcagcacagttgccaggcttatgtgagacagacaggatggatggtgcggtcaccagtgtaaccatcaaatcggagatcctgccagcttcacttcagtccgccactgccagacccacttccaggctaaatagattacctgagctggaattggaagcaattgataaccaatttggacaaccaggaacaggcgatcagattccatggacaaataatacagtgacagctataaatcagagtaaatcagaagaccagtgtattagctcacaattagatgagcttctctgtccacccacaacagtagaagggagaaatgatgagaaggctcttcttgaacagctggtatccttccttagtggcaaagatgaaactgagctagctgaactagacagagctctgggaattgacaaacttgttcaggggggtggattagatgtattatcagagagatttccaccacaacaagcaacgccacctttgatcatggaagaaagacccaacctttattcccagccttactcttctccttctcctactgccaatctccctagccctttccaaggcatggtcaggcaaaaaccttcactggggacgatgcctgttcaagtaacacctccccgaggtgctttttcacctggcatgggcatgcagcccaggcaaactctaaacagacctccggctgcacctaaccagcttcgacttcaactacagcagcgattacagggacaacagcagttgatacaccaaaatcggcaagctatcttaaaccagtttgcagcaactgctcctgttggcatcaatatgagatcaggcatgcaacagcaaattacacctcagccacccctgaatgctcaaatgttggcacaacgtcagcgggaactgtacagtcaacagcaccgacagaggcagctaatacagcagcaaagagccatgcttatgaggcagcaaagctttgggaacaacctccctccctcatctggactaccagttcaaatggggaacccccgtcttcctcagggtgctccacagcaattcccctatccaccaaactatggtacaaatccaggaaccccacctgcttctaccagcccgttttcacaactagcagcaaatcctgaagcatccttggccaaccgcaacagcatggtgagcagaggcatgacaggaaacataggaggacagtttggcactggaatcaatcctcagatgcagcagaatgtcttccagtatccaggagcaggaatggttccccaaggtgaggccaactttgctccatctctaagccctgggagctccatggtgccgatgccaatccctcctcctcagagttctcttctccagcaaactccacctgcctccgggtatcagtcaccagacatgaaggcctggcagcaaggagcgataggaaacaacaatgtgttcagtcaagctgtccagaaccagcccacgcctgcacagccaggagtatacaacaacatgagcatcaccgtttccatggcaggtggaaatacgaatgttcagaacatgaacccaatgatggcccagatgcagatgagctctttgcagatgccaggaatgaacactgtgtgccctgagcagataaatgatcccgcactgagacacacaggcctctactgcaaccagctctcatccactgaccttctcaaaacagaagcagatggaacccaggtgcaacaggttcaggtgtttgctgacgtccagtgtacagtgaatctggtaggcggggacccttacctgaaccagcctggtccactgggaactcaaaagcccacgtcaggaccacagaccccccaggcccagcagaagagcctccttcagcagctactgactgaataaccacttttaaaggaatgtgaaatttaaataatagacatacagagatatacaaatatattatatatttttctgagatttttgatatctcaatctgcagccattcttcaggtcgtagcatttggagcaaaaaaaaaaaaaaaaaaaaaaaaaggagtttgcttttgtcgggagattgaaagatgtttttgtttctttctttgtaaaggccttggatattgaaaaaataccaaggcagaacagttggacaatctatttcttgagccaaatttaattattcttatttttgtaatcagtcattggcttcttatctggatgaaggcttttggaggagaaccaaaacgacaagttccaagaagaagatgaagctccgcctccgccgcttagtcccaaccctgcccaggaagaagggcccgtggggctttgcctgtgcccgtccaccaaaggctgtcatgtgtctcgaaatcagcagccctccccatcccaatcccaggcagcttgtgtgtacaatcagcttctctagcaactctgtatctgttggcttcaagagaatattttgcctccacatatgtaccccttctcctttttttaaagatggatttaaaccaagatgcctccaggaaagaggacgaaatgagtatattcacagaggaatccaaaaaatacagtttgggggaaaatgcaataatttttgatgagatgggtgaaggacaagaagtgagttgtgtcaattattgtagatacaattttctgattaaatctggaaaaataaaaggcagcctgttttttctgcttttattgtattaacagctgaggtagctaaagttatttaaaataaaattaaatttatgatccaagtagcttatttttccctttaaatctcattgtaaatatatttgatttcttgtagaaattgatttccttctgtttaattttatgcttttattatactcttgatttttctaaatttgtgtgtgaaatataacattgattgaattgcagttacatttggttagtaatatttcattattttaataactgtgatgtcatgtatggatttactttggggttcaaatcaaaatgtcactgccagaaagagctgttccagctgatctagagcatactgccctagagtgtccctgggatcatctgaacagaagtgcacaggctacttgtacagagaaaaaattaatactcaaaggaaatcttcattttttagattgactttgggaatttgaattttcatcagtgcaaatataaatttctctatcctgctctgaggctaattggtaccatattttccctttgtgtcttgtgactctgccacatcccatctcatcctggcctctgagtcaagaacccagtgaactgactttctagttctagaagttccgctgcaaggccaggaaagcttgagaaaggtattgtggaagaagcaaaggtagacccccatcactcacctttgtctgcatccctgggcctgtgaatgatgacagcacctgacattctgcaccagctacctctgcctccatggcagagaaaaggccataagaacagtggaagaggagcatggactcagacttcaaggaagaagccatttccccaggtccttccttctgcatctcaccacccctagttacaaataactccattgaacagcatctattcagaaactatgccgaataaaaagattggtggaagggctcatgtggttagcaactatgaaacagaaataggacactcagttacaaacattatctcctttagtttttcagaaaatgcatccctgatttcattcatttccagcttgaaagccagccatattactctagtccctaccaaactgctctagaaggtcatttccattttgtttgtgatatttagacgcgcagacttcaggaagttcacctttaacttcagcattccagatgaagtttcctgactcagtgcttttgcataaggaactagaaaaaaaaagtaaggaaaattggagatgctaacatcctcccccatcccaactgcaccttaaaatatgcatgtcaccttcaaggttttataattgcactgtttgttttatgtatgtacagattaaaattattgctacatttgaggaaaataaaattgcttgcttctatgtaattcctgtcattccacaggaaattcacttttccagctactgaatagaatttgtttaacaacctcatgggttgcctcttcatttacagggaagaaatgaaatgtacatctgcagaaattgccaaagcccaaattaacgagtattataaaaggataataaagcatccctgaagccaaa

SEQ ID NO: 279177 - DNA, 7405 bp, Artificial Sequence
  derived and/or modified sequence
gaatctcgcctgccgggaccgcgaaatgggggcgaccgcggcgtccctctccgtcggcgcagccctcgacggcgcttgggtttgaccccggcgcgcttgctcgccccttctcccgagaaggggtttcggaggagcagaggtttaataggcaagagaaagagaaaggaaaacagctctctctctaatgagagagaggggacttcggagaggaaaagaggacaggagatacggcaatcgtggataggaaaggaggaaattacgatagaaaagttggagatccttttgctaacacccctttgggcagttggatgctgagatctatccatactaatggaaatgtaactggaactgactctgatgataaaatcaaggaccatcaagcaagatcatgcagtaggcaactttgcttccaaaagaagttaccaacatttagaatttctacttattctgaggttccagttacagctatatcagagaatgagttaatctcctcagaaatcactaaatactactctgaggggcttagaaattaacaggttgtttatataattggccttaaatgaggtgagagtgaagagactagagccatctctggaaaacatcattatcccattccccgggaagctaccctctggaactcaagatttgaccatatctgttttgaggattcattatgaacaaagaagtctcccaggtgtgaagtttttcaacatgagtggcctcggggacagttcatccgaccctgctaacccagactcacataagaggaaaggatcgccatgtgacacactggcatcaagcacggaaaagaggcgcagggagcaagaaaataaatatttagaagaactagctgagttactgtctgccaacattagtgacattgacagcttgagtgtaaaaccagacaaatgcaagattttgaagaaaacagtcgatcagatacagctaatgaagagaatggaacaagagaaatcaacaactgatgacgatgtacagaaatcagacatctcatcaagtagtcaaggagtgatagaaaaggaatccttgggacctcttcttttggaggctttggatggatttttctttgttgtgaactgtgaagggagaattgtatttgtgtcagagaatgtaaccagctacttaggttacaatcaggaggaattaatgaatacgagcgtctacagcatactgcacgtgggggatcatgcagaatttgtgaagaatctgctaccaaaatcactagtaaatggagttccttggcctcaagaggcaacacgacgaaatagccatacctttaactgcaggatgctaattcaccctccagatgagccagggaccgagaaccaagaagcttgccagcgttatgaagtaatgcagtgtttcactgtgtcacagccaaaatcaattcaagaggatggagaagatttccagtcatgtctgatttgtattgcacggcgattacctcggcctccagctattacgggtgtagaatcctttatgaccaagcaagatactacaggtaaaatcatctctattgatactagttccctgagagctgctggcagaactggttgggaagatttagtgaggaagtgcatttatgcttttttccaacctcagggcagagaaccatcttatgccagacagctgttccaagaagtgatgactcgtggcactgcctccagcccctcctatagattcatattgaatgatgggacaatgcttagcgcccacaccaagtgtaaactttgctaccctcaaagtccagacatgcaacctttcatcatgggaattcatatcatcgacagggagcacagtgggctttctcctcaagatgacactaattctggaatgtcaattccccgagtaaatccctcggtcaatcctagtatctctccagctcatggtgtggctcgttcatccacattgccaccatccaacagcaacatggtatccaccagaataaaccgccagcagagctcagaccttcatagcagcagtcatagtaattctagcaacagccaaggaagtttcggatgctcacccggaagtcagattgtagccaatgttgccttaaaccaaggacaggccagttcacagagcagtaatccctctttaaacctcaataattctcctatggaaggtacaggaatatccctagcacagttcatgtctccaaggagacaggttacttctggattggcaacaaggcccaggatgccaaacaattcctttcctcctaatatttcgacattaagctctcccgttggcatgacaagtagtgcctgtaataataataaccgatcttattcaaacatcccagtaacatctttacagggtatgaatgaaggacccaataactccgttggcttctctgccagttctccagtcctcaggcagatgagctcacagaattcacctagcagattaaatatacaaccagcaaaagctgagtccaaagataacaaagagattgcctcaattttaaatgaaatgattcaatctgacaacagctctagtgatggcaaacctctggattcagggcttctgcataacaatgacagactttcagatggagacagtaaatactctcaaaccagtcacaaactagtgcagcttttgacaacaactgccgaacagcagttacggcatgctgatatagacacaagctgcaaagatgtcctgtcttgcacaggcacttccaactctgcctctgctaactcttcaggaggttcttgtccctcttctcatagctcattgacagaacggcataaaattctacaccggctcttacaggagggtagcccctcagatatcaccactttgtctgtcgagcctgataaaaaggacagtgcatctacttctgtgtcagtgactggacaggtacaaggaaactccagtataaaactagaactggatgcttcaaagaaaaaagaatcaaaagaccatcagctcctacgctatcttttagataaagatgagaaagatttaagatcaactccaaacctgagcctggatgatgtaaaggtgaaagtggaaaagaaagaacagatggatccatgtaatacaaacccaaccccaatgaccaaacccactcctgaggaaataaaactggaggcccagagccagtttacagctgaccttgaccagtttgatcagttactgcccacgctggagaaggcagcacagttgccaggcttatgtgagacagacaggatggatggtgcggtcaccagtgtaaccatcaaatcggagatcctgccagcttcacttcagtccgccactgccagacccacttccaggctaaatagattacctgagctggaattggaagcaattgataaccaatttggacaaccaggaacaggcgatcagattccatggacaaataatacagtgacagctataaatcagagtaaatcagaagaccagtgtattagctcacaattagatgagcttctctgtccacccacaacagtagaagggagaaatgatgagaaggctcttcttgaacagctggtatccttccttagtggcaaagatgaaactgagctagctgaactagacagagctctgggaattgacaaacttgttcaggggggtggattagatgtattatcagagagatttccaccacaacaagcaacgccacctttgatcatggaagaaagacccaacctttattcccagccttactcttctccttctcctactgccaatctccctagccctttccaaggcatggtcaggcaaaaaccttcactggggacgatgcctgttcaagtaacacctccccgaggtgctttttcacctggcatgggcatgcagcccaggcaaactctaaacagacctccggctgcacctaaccagcttcgacttcaactacagcagcgattacagggacaacagcagttgatacaccaaaatcggcaagctatcttaaaccagtttgcagcaactgctcctgttggcatcaatatgagatcaggcatgcaacagcaaattacacctcagccacccctgaatgctcaaatgttggcacaacgtcagcgggaactgtacagtcaacagcaccgacagaggcagctaatacagcagcaaagagccatgcttatgaggcagcaaagctttgggaacaacctccctccctcatctggactaccagttcaaatggggaacccccgtcttcctcagggtgctccacagcaattcccctatccaccaaactatggtacaaatccaggaaccccacctgcttctaccagcccgttttcacaactagcagcaaatcctgaagcatccttggccaaccgcaacagcatggtgagcagaggcatgacaggaaacataggaggacagtttggcactggaatcaatcctcagatgcagcagaatgtcttccagtatccaggagcaggaatggttccccaaggtgaggccaactttgctccatctctaagccctgggagctccatggtgccgatgccaatccctcctcctcagagttctcttctccagcaaactccacctgcctccgggtatcagtcaccagacatgaaggcctggcagcaaggagcgataggaaacaacaatgtgttcagtcaagctgtccagaaccagcccacgcctgcacagccaggagtatacaacaacatgagcatcaccgtttccatggcaggtggaaatacgaatgttcagaacatgaacccaatgatggcccagatgcagatgagctctttgcagatgccaggaatgaacactgtgtgccctgagcagataaatgatcccgcactgagacacacaggcctctactgcaaccagctctcatccactgaccttctcaaaacagaagcagatggaacccaggacaagaagacagaagagttcttctctgtggtgactacagactagaggaatgctctacaggtgcaacaggttcaggtgtttgctgacgtccagtgtacagtgaatctggtaggcggggacccttacctgaaccagcctggtccactgggaactcaaaagcccacgtcaggaccacagaccccccaggcccagcagaagagcctccttcagcagctactgactgaataaccacttttaaaggaatgtgaaatttaaataatagacatacagagatatacaaatatattatatatttttctgagatttttgatatctcaatctgcagccattcttcaggtcgtagcatttggagcaaaaaaaaaaaaaaaaaaaaaaaaaggagtttgcttttgtcgggagattgaaagatgtttttgtttctttctttgtaaaggccttggatattgaaaaaataccaaggcagaacagttggacaatctatttcttgagccaaatttaattattcttatttttgtaatcagtcattggcttcttatctggatgaaggcttttggaggagaaccaaaacgacaagttccaagaagaagatgaagctccgcctccgccgcttagtcccaaccctgcccaggaagaagggcccgtggggctttgcctgtgcccgtccaccaaaggctgtcatgtgtctcgaaatcagcagccctccccatcccaatcccaggcagcttgtgtgtacaatcagcttctctagcaactctgtatctgttggcttcaagagaatattttgcctccacatatgtaccccttctcctttttttaaagatggatttaaaccaagatgcctccaggaaagaggacgaaatgagtatattcacagaggaatccaaaaaatacagtttgggggaaaatgcaataatttttgatgagatgggtgaaggacaagaagtgagttgtgtcaattattgtagatacaattttctgattaaatctggaaaaataaaaggcagcctgttttttctgcttttattgtattaacagctgaggtagctaaagttatttaaaataaaattaaatttatgatccaagtagcttatttttccctttaaatctcattgtaaatatatttgatttcttgtagaaattgatttccttctgtttaattttatgcttttattatactcttgatttttctaaatttgtgtgtgaaatataacattgattgaattgcagttacatttggttagtaatatttcattattttaataactgtgatgtcatgtatggatttactttggggttcaaatcaaaatgtcactgccagaaagagctgttccagctgatctagagcatactgccctagagtgtccctgggatcatctgaacagaagtgcacaggctacttgtacagagaaaaaattaatactcaaaggaaatcttcattttttagattgactttgggaatttgaattttcatcagtgcaaatataaatttctctatcctgctctgaggctaattggtaccatattttccctttgtgtcttgtgactctgccacatcccatctcatcctggcctctgagtcaagaacccagtgaactgactttctagttctagaagttccgctgcaaggccaggaaagcttgagaaaggtattgtggaagaagcaaaggtagacccccatcactcacctttgtctgcatccctgggcctgtgaatgatgacagcacctgacattctgcaccagctacctctgcctccatggcagagaaaaggccataagaacagtggaagaggagcatggactcagacttcaaggaagaagccatttccccaggtccttccttctgcatctcaccacccctagttacaaataactccattgaacagcatctattcagaaactatgccgaataaaaagattggtggaagggctcatgtggttagcaactatgaaacagaaataggacactcagttacaaacattatctcctttagtttttcagaaaatgcatccctgatttcattcatttccagcttgaaagccagccatattactctagtccctaccaaactgctctagaaggtcatttccattttgtttgtgatatttagacgcgcagacttcaggaagttcacctttaacttcagcattccagatgaagtttcctgactcagtgcttttgcataaggaactagaaaaaaaaagtaaggaaaattggagatgctaacatcctcccccatcccaactgcaccttaaaatatgcatgtcaccttcaaggttttataattgcactgtttgttttatgtatgtacagattaaaattattgctacatttgaggaaaataaaattgcttgcttctatgtaattcctgtcattccacaggaaattcacttttccagctactgaatagaatttgtttaacaacctcatgggttgcctcttcatttacagggaagaaatgaaatgtacatctgcagaaattgccaaagcccaaattaacgagtattataaaaggataataaagcatccctgaagccaaa

SEQ ID NO: 279178 - DNA, 4597 bp, Artificial Sequence
  derived and/or modified sequence
caacatttagaatttctacttattctgaggttccagttacagctatatcagagaatgagttaatctcctcagaaatcactaaatactactctgaggggcttagaaattaacaggttgtttatataattggccttaaatgaggtgagagtgaagagactagagccatctctggaaaacatcattatcccattccccgggaagctaccctctggaactcaagatttgaccatatctgttttgaggattcattatgaacaaagaagtctcccaggtgtgaagtttttcaacatgagtggcctcggggacagttcatccgaccctgctaacccagactcacataagaggaaaggatcgccatgtgacacactggcatcaagcacggaaaagaggcgcagggagcaagaaaataaatatttagaagaactagctgagttactgtctgccaacattagtgacattgacagcttgagtgtaaaaccagacaaatgcaagattttgaagaaaacagtcgatcagatacagctaatgaagagaatggaacaagagaaatcaacaactgatgacgatgtacagaaatcagacatctcatcaagtagtcaaggagtgatagaaaaggaatccttgggacctcttcttttggaggctttggatggatttttctttgttgtgaactgtgaagggagaattgtatttgtgtcagagaatgtaaccagctacttaggttacaatcaggaggaattaatgaatacgagcgtctacagcatactgcacgtgggggatcatgcagaatttgtgaagaatctgctaccaaaatcactagtaaatggagttccttggcctcaagaggcaacacgacgaaatagccatacctttaactgcaggatgctaattcaccctccagatgagccagggaccgagaaccaagaagcttgccagcgttatgaagtaatgcagtgtttcactgtgtcacagccaaaatcaattcaagaggatggagaagatttccagtcatgtctgatttgtattgcacggcgattacctcggcctccagctattacgggtgtagaatcctttatgaccaagcaagatactacaggtaaaatcatctctattgatactagttccctgagagctgctggcagaactggttgggaagatttagtgaggaagtgcatttatgcttttttccaacctcagggcagagaaccatcttatgccagacagctgttccaagaagtgatgactcgtggcactgcctccagcccctcctatagattcatattgaatgatgggacaatgcttagcgcccacaccaagtgtaaactttgctaccctcaaagtccagacatgcaacctttcatcatgggaattcatatcatcgacagggagcacagtgggctttctcctcaagatgacactaattctggaatgtcaattccccgagtaaatccctcggtcaatcctagtatctctccagctcatggtgtggctcgttcatccacattgccaccatccaacagcaacatggtatccaccagaataaaccgccagcagagctcagaccttcatagcagcagtcatagtaattctagcaacagccaaggaagtttcggatgctcacccggaagtcagattgtagccaatgttgccttaaaccaaggacaggccagttcacagagcagtaatccctctttaaacctcaataattctcctatggaaggtacaggaatatccctagcacagttcatgtctccaaggagacaggttacttctggattggcaacaaggcccaggatgccaaacaattcctttcctcctaatatttcgacattaagctctcccgttggcatgacaagtagtgcctgtaataataataaccgatcttattcaaacatcccagtaacatctttacagggtatgaatgaaggacccaataactccgttggcttctctgccagttctccagtcctcaggcagatgagctcacagaattcacctagcagattaaatatacaaccagcaaaagctgagtccaaagataacaaagagattgcctcaattttaaatgaaatgattcaatctgacaacagctctagtgatggcaaacctctggattcagggcttctgcataacaatgacagactttcagatggagacagtaaatactctcaaaccagtcacaaactagtgcagcttttgacaacaactgccgaacagcagttacggcatgctgatatagacacaagctgcaaagatgtcctgtcttgcacaggcacttccaactctgcctctgctaactcttcaggaggttcttgtccctcttctcatagctcattgacagaacggcataaaattctacaccggctcttacaggagggtagcccctcagatatcaccactttgtctgtcgagcctgataaaaaggacagtgcatctacttctgtgtcagtgactggacaggtacaaggaaactccagtataaaactagaactggatgcttcaaagaaaaaagaatcaaaagaccatcagctcctacgctatcttttagataaagatgagaaagatttaagatcaactccaaacctgagcctggatgatgtaaaggtgaaagtggaaaagaaagaacagatggatccatgtaatacaaacccaaccccaatgaccaaacccactcctgaggaaataaaactggaggcccagagccagtttacagctgaccttgaccagtttgatcagttactgcccacgctggagaaggcagcacagttgccaggcttatgtgagacagacaggatggatggtgcggtcaccagtgtaaccatcaaatcggagatcctgccagcttcacttcagtccgccactgccagacccacttccaggctaaatagattacctgagctggaattggaagcaattgataaccaatttggacaaccaggaacaggcgatcagattccatggacaaataatacagtgacagctataaatcagagtaaatcagaagaccagtgtattagctcacaattagatgagcttctctgtccacccacaacagtagaagggagaaatgatgagaaggctcttcttgaacagctggtatccttccttagtggcaaagatgaaactgagctagctgaactagacagagctctgggaattgacaaacttgttcaggggggtggattagatgtattatcagagagatttccaccacaacaagcaacgccacctttgatcatggaagaaagacccaacctttattcccagccttactcttctccttctcctactgccaatctccctagccctttccaaggcatggtcaggcaaaaaccttcactggggacgatgcctgttcaagtaacacctccccgaggtgctttttcacctggcatgggcatgcagcccaggcaaactctaaacagacctccggctgcacctaaccagcttcgacttcaactacagcagcgattacagggacaacagcagttgatacaccaaaatcggcaagctatcttaaaccagtttgcagcaactgctcctgttggcatcaatatgagatcaggcatgcaacagcaaattacacctcagccacccctgaatgctcaaatgttggcacaacgtcagcgggaactgtacagtcaacagcaccgacagaggcagctaatacagcagcaaagagccatgcttatgaggcagcaaagctttgggaacaacctccctccctcatctggactaccagttcaaatggggaacccccgtcttcctcagggtgctccacagcaattcccctatccaccaaactatggtacaaatccaggaaccccacctgcttctaccagcccgttttcacaactagcagcaaatcctgaagcatccttggccaaccgcaacagcatggtgagcagaggcatgacaggaaacataggaggacagtttggcactggaatcaatcctcagatgcagcagaatgtcttccagtatccaggagcaggaatggttccccaaggtgaggccaactttgctccatctctaagccctgggagctccatggtgccgatgccaatccctcctcctcagagttctcttctccagcaaactccacctgcctccgggtatcagtcaccagacatgaaggcctggcagcaaggagcgataggaaacaacaatgtgttcagtcaagctgtccagaaccagcccacgcctgcacagccaggagtatacaacaacatgagcatcaccgtttccatggcaggtggaaatacgaatgttcagaacatgaacccaatgatggcccagatgcagatgagctctttgcagatgccaggaatgaacactgtgtgccctgagcagataaatgatcccgcactgagacacacaggcctctactgcaaccagctctcatccactgaccttctcaaaacagaagcagatggaacccaggacaagaagacagaagagttcttctctgtggtgactacagactagaggaatgctctacaggtgcaacaggttcaggtgtttgctgacgtccagtgtacagtgaatctggtaggcggggacccttacctgaaccagcctggtccactgggaactc

SEQ ID NO: 279179 - DNA, 4323 bp, Artificial Sequence
  derived and/or modified sequence
atgtcggggctcggagactcatctagcgatccagcgaaccctgattcacacaagagaaaagggtccccatgcgatactcttgcatcaagtacagagaaacgacgtcgcgaacaggaaaataagtacctggaggaattagcggagttacttagtgcaaatatctccgacatagactcgctttctgttaaaccagacaagtgtaagatcttaaaaaaaacggtggatcaaattcaactcatgaagcgaatggagcaggagaaatcaacaacggatgacgacgttcagaagtcagacatcagcagcagtagtcaaggtgtcatcgagaaggagtctctgggcccactgctgcttgaggccctcgatggcttcttcttcgttgttaattgtgaaggacgtatagtgttcgtctctgaaaacgtaacttcgtatcttggctacaaccaggaggaactgatgaatacgagcgtgtacagtatactacacgtcggcgatcacgccgagtttgtaaagaatctgcttccaaagtccctcgttaacggtgtgccatggccccaggaggccacaagaagaaatagtcacacttttaattgccgaatgctgatccacccccctgacgagccaggaactgagaaccaagaggcttgtcagaggtacgaagtgatgcagtgcttcaccgtcagtcagccaaagtcaatccaagaggacggcgaggattttcagtcttgcctgatttgtatcgcaagacggctgccaaggccacccgcaataaccggagtggaaagctttatgaccaagcaggataccacagggaagatcatcagtatcgataccagcagccttagagccgcaggaagaactgggtgggaagacttagtgcggaagtgcatctacgcatttttccagcctcaagggcgagagcccagctatgcccgacagcttttccaagaggtgatgaccagaggaactgcatcttctccttcttatcggttcatcctcaatgacgggactatgctgagtgcccacacaaaatgcaaactgtgttatcctcagagcccagatatgcaaccctttatcatgggcattcacatcatcgatagggaacactctggcctgtcgccacaggatgacactaactctggaatgagcatccccagggtgaacccgtctgtgaacccctcgatttctcccgctcatggggtggctcgctcttcaaccttaccgcctagcaacagtaatatggtgagtacacggatcaatcggcaacaaagttcggacctgcactcgtcttcccactccaatagcagcaactctcaagggtcctttggttgctctcccggatcccagattgttgccaacgtggctctcaaccagggacaggcgagtagccaatcctctaacccatcattgaatttgaataactctcccatggaggggacgggcatctccctcgctcagttcatgtcgcctagacgccaggtgacgtcgggcctggccacccgcccaaggatgcccaataactcatttcctcccaatatcagtactttgtccagccccgttgggatgacctcatctgcatgcaataataacaaccgttcgtactctaatataccagtgacttcactgcagggcatgaatgaaggacccaataactccgtgggattcagcgccagttcacccgtattgcgtcaaatgagctcgcagaacagcccatctcgcctgaacattcagcccgcaaaggcagaatctaaggacaataaagaaatcgcaagtatattgaatgaaatgatccaatcggataactccagctccgacggtaagccgctggacagcggtctgcttcacaacaacgatagactttctgacggtgatagcaagtatagtcagacatcacacaaactcgtccagttactgactacaactgcagagcagcagctgagacacgccgacattgatacctcctgcaaagacgttctgagctgcactgggactagcaatagtgcatccgctaactccagtggaggatcttgtcctagcagtcattccagcctgaccgaaagacataagatcctgcataggttacttcaggagggtagcccttctgatattacaactctcagcgtcgaacccgacaaaaaggatagtgcatctacaagtgtgtccgtcaccggacaggttcagggcaattcttccatcaaactggagcttgatgcttctaaaaagaaagaatcaaaagaccatcaattactgagatatctgctggataaggatgagaaggaccttcggtcgacacctaacctctccttagacgacgtcaaggtcaaagtggaaaaaaaagagcagatggacccctgtaacacaaatcccacaccgatgactaagcctaccccggaggagattaaactggaggcccagtcccagtttactgccgacctggaccagtttgaccagcttctcccaaccctagaaaaggccgcacagctgccagggctttgtgagactgacaggatggacggagccgtcactagtgtaactattaaatccgaaatactgcccgcttctcttcagtctgctaccgccaggcccacgtctaggctaaataggctgcccgagctggagctggaggccattgacaatcagttcggtcagcctgggacgggagaccagattccatggaccaacaacaccgtgacagcaattaatcaaagtaagagcgaagatcagtgtataagttcacagttagatgagcttctgtgccctcctacaaccgtagagggacggaacgacgaaaaagcactgttagagcagttggtgagttttttaagtggcaaagacgagaccgaattggcagaattggaccgcgcactcgggatcgataaacttgtgcagggtgggggactcgacgtcctgagcgagcgctttcctccgcagcaagccaccccccctctgattatggaagaacgcccaaacttgtactctcagccatacagctccccatctccgaccgccaacctccccagcccctttcaaggcatggtgcgccagaaaccaagcctggggactatgcctgtccaggtgacccctccacgaggtgctttttcccccggtatgggtatgcaacccaggcaaacactgaaccggcctcccgctgctccaaaccagcttaggctacaattacagcagaggctccagggccagcaacaactgattcaccaaaataggcaggccatattaaatcagttcgccgcaacagccccagttgggattaacatgcgttcaggaatgcagcagcaaatcactccccagcccccacttaacgcacagatgttggctcagaggcagagagagctctattcacagcagcacaggcagcggcagctgattcagcagcagcgtgcaatgctaatgagacagcaaagttttggaaataacctgcctcccagtagtggtctgccagttcagatggggaaccctaggctaccccagggcgcaccccagcagtttccctaccctccaaactacggaactaacccaggaaccccacccgctagcacatcaccattttctcagctcgccgcaaaccccgaggcctccttagctaacaggaacagcatggtgtcacgtggcatgaccggcaacattggtggccaatttggtaccgggattaatccccagatgcaacagaacgtgtttcaatacccgggagccggtatggtgccacagggggaagccaatttcgcaccatcactgagccccggaagttccatggtaccaatgcccattcctcccccacagagcagcctcttgcaacagacacctcccgcatccggttaccagtcccccgatatgaaggcatggcaacagggtgccattggcaacaataatgtattctcacaggcggtgcaaaatcaaccaactccagcccagccaggtgtgtataacaacatgtctattactgtgtccatggctgggggaaatactaatgtgcaaaacatgaatcccatgatggctcagatgcagatgtccagtctacagatgcccggaatgaatactgtatgcccggagcaaattaacgatccagccttaagacacacggggctgtactgtaatcagttatcatcaacagatctgctgaagacggaagctgatggtacgcaggtacagcaggtacaagtgtttgctgacgtccaatgcacagtgaatctggtgggcggtgacccttatctgaaccaacctgggcctctcgggacccagaagcctaccagcgggccacagaccccccaagcgcagcaaaagagcctgcttcagcagttgctgactgagtag

SEQ ID NO: 279180 - DNA, 4323 bp, Artificial Sequence
  derived and/or modified sequence
atgagcggcctgggcgacagcagcagcgaccccgccaaccccgacagccacaagagaaagggcagcccctgcgacaccctggccagcagcaccgagaagagaagaagagagcaggagaacaagtacctggaggagctggccgagctgctgagcgccaacatcagcgacatcgacagcctgagcgtgaagcccgacaagtgcaagatcctgaagaagaccgtggaccagatccagctgatgaagagaatggagcaggagaagagcaccaccgacgacgacgtgcagaagagcgacatcagcagcagcagccagggcgtgatcgagaaggagagcctgggccccctgctgctggaggccctggacggcttcttcttcgtggtgaactgcgagggcagaatcgtgttcgtgagcgagaacgtgaccagctacctgggctacaaccaggaggagctgatgaacaccagcgtgtacagcatcctgcacgtgggcgaccacgccgagttcgtgaagaacctgctgcccaagagcctggtgaacggcgtgccctggccccaggaggccaccagaagaaacagccacaccttcaactgcagaatgctgatccacccccccgacgagcccggcaccgagaaccaggaggcctgccagagatacgaggtgatgcagtgcttcaccgtgagccagcccaagagcatccaggaggacggcgaggacttccagagctgcctgatctgcatcgccagaagactgcccagaccccccgccatcaccggcgtggagagcttcatgaccaagcaggacaccaccggcaagatcatcagcatcgacaccagcagcctgagagccgccggcagaaccggctgggaggacctggtgagaaagtgcatctacgccttcttccagccccagggcagagagcccagctacgccagacagctgttccaggaggtgatgaccagaggcaccgccagcagccccagctacagattcatcctgaacgacggcaccatgctgagcgcccacaccaagtgcaagctgtgctacccccagagccccgacatgcagcccttcatcatgggcatccacatcatcgacagagagcacagcggcctgagcccccaggacgacaccaacagcggcatgagcatccccagagtgaaccccagcgtgaaccccagcatcagccccgcccacggcgtggccagaagcagcaccctgccccccagcaacagcaacatggtgagcaccagaatcaacagacagcagagcagcgacctgcacagcagcagccacagcaacagcagcaacagccagggcagcttcggctgcagccccggcagccagatcgtggccaacgtggccctgaaccagggccaggccagcagccagagcagcaaccccagcctgaacctgaacaacagccccatggagggcaccggcatcagcctggcccagttcatgagccccagaagacaggtgaccagcggcctggccaccagacccagaatgcccaacaacagcttcccccccaacatcagcaccctgagcagccccgtgggcatgaccagcagcgcctgcaacaacaacaacagaagctacagcaacatccccgtgaccagcctgcagggcatgaacgagggccccaacaacagcgtgggcttcagcgccagcagccccgtgctgagacagatgagcagccagaacagccccagcagactgaacatccagcccgccaaggccgagagcaaggacaacaaggagatcgccagcatcctgaacgagatgatccagagcgacaacagcagcagcgacggcaagcccctggacagcggcctgctgcacaacaacgacagactgagcgacggcgacagcaagtacagccagaccagccacaagctggtgcagctgctgaccaccaccgccgagcagcagctgagacacgccgacatcgacaccagctgcaaggacgtgctgagctgcaccggcaccagcaacagcgccagcgccaacagcagcggcggcagctgccccagcagccacagcagcctgaccgagagacacaagatcctgcacagactgctgcaggagggcagccccagcgacatcaccaccctgagcgtggagcccgacaagaaggacagcgccagcaccagcgtgagcgtgaccggccaggtgcagggcaacagcagcatcaagctggagctggacgccagcaagaagaaggagagcaaggaccaccagctgctgagatacctgctggacaaggacgagaaggacctgagaagcacccccaacctgagcctggacgacgtgaaggtgaaggtggagaagaaggagcagatggacccctgcaacaccaaccccacccccatgaccaagcccacccccgaggagatcaagctggaggcccagagccagttcaccgccgacctggaccagttcgaccagctgctgcccaccctggagaaggccgcccagctgcccggcctgtgcgagaccgacagaatggacggcgccgtgaccagcgtgaccatcaagagcgagatcctgcccgccagcctgcagagcgccaccgccagacccaccagcagactgaacagactgcccgagctggagctggaggccatcgacaaccagttcggccagcccggcaccggcgaccagatcccctggaccaacaacaccgtgaccgccatcaaccagagcaagagcgaggaccagtgcatcagcagccagctggacgagctgctgtgcccccccaccaccgtggagggcagaaacgacgagaaggccctgctggagcagctggtgagcttcctgagcggcaaggacgagaccgagctggccgagctggacagagccctgggcatcgacaagctggtgcagggcggcggcctggacgtgctgagcgagagattccccccccagcaggccaccccccccctgatcatggaggagagacccaacctgtacagccagccctacagcagccccagccccaccgccaacctgcccagccccttccagggcatggtgagacagaagcccagcctgggcaccatgcccgtgcaggtgaccccccccagaggcgccttcagccccggcatgggcatgcagcccagacagaccctgaacagaccccccgccgcccccaaccagctgagactgcagctgcagcagagactgcagggccagcagcagctgatccaccagaacagacaggccatcctgaaccagttcgccgccaccgcccccgtgggcatcaacatgagaagcggcatgcagcagcagatcaccccccagccccccctgaacgcccagatgctggcccagagacagagagagctgtacagccagcagcacagacagagacagctgatccagcagcagagagccatgctgatgagacagcagagcttcggcaacaacctgccccccagcagcggcctgcccgtgcagatgggcaaccccagactgccccagggcgccccccagcagttcccctacccccccaactacggcaccaaccccggcaccccccccgccagcaccagccccttcagccagctggccgccaaccccgaggccagcctggccaacagaaacagcatggtgagcagaggcatgaccggcaacatcggcggccagttcggcaccggcatcaacccccagatgcagcagaacgtgttccagtaccccggcgccggcatggtgccccagggcgaggccaacttcgcccccagcctgagccccggcagcagcatggtgcccatgcccatcccccccccccagagcagcctgctgcagcagaccccccccgccagcggctaccagagccccgacatgaaggcctggcagcagggcgccatcggcaacaacaacgtgttcagccaggccgtgcagaaccagcccacccccgcccagcccggcgtgtacaacaacatgagcatcaccgtgagcatggccggcggcaacaccaacgtgcagaacatgaaccccatgatggcccagatgcagatgagcagcctgcagatgcccggcatgaacaccgtgtgccccgagcagatcaacgaccccgccctgagacacaccggcctgtactgcaaccagctgagcagcaccgacctgctgaagaccgaggccgacggcacccaggtgcagcaggtgcaggtgttcgccgacgtgcagtgcaccgtgaacctggtgggcggcgacccctacctgaaccagcccggccccctgggcacccagaagcccaccagcggcccccagaccccccaggcccagcagaagagcctgctgcagcagctgctgaccgagtag

SEQ ID NO: 279181 - protein, 1399 aa, Artificial Sequence
  derived and/or modified sequence
MSGLGDSSSDPANPDSHKRKGSPCDTLASSTEKRRREQENKYLEELAELLSANISDIDSLSVKPDKCKILKKTVDQIQLMKRMEQEKSTTDDDVQKSDISSSSQGVIEKESLGPLLLEALDGFFFVVNCEGRIVFVSENVTSYLGYNQEELMNTSVYSILHVGDHAEFVKNLLPKSLVNGVPWPQEATRRNSHTFNCRMLIHPPDEPGTENQEACQRYEVMQCFTVSQPKSIQEDGEDFQSCLICIARRLPRPPAITGVESFMTKQDTTGKIISIDTSSLRAAGRTGWEDLVRKCIYAFFQPQGREPSYARQLFQEVMTRGTASSPSYRFILNDGTMLSAHTKCKLCYPQSPDMQPFIMGIHIIDREHSGLSPQDDTNSGMSIPRVNPSVNPSISPAHGVARSSTLPPSNSNMVSTRINRQQSSDLHSSSHSNSSNSQGSFGCSPGSQIVANVALNQGQASSQSSNPSLNLNNSPMEGTGISLAQFMSPRRQVTSGLATRPRMPNNSFPPNISTLSSPVGMTSSACNNNNRSYSNIPVTSLQGMNEGPNNSVGFSASSPVLRQMSSQNSPSRLNIQPAKAESKDNKEIASILNEMIQSDNSSSDGKPLDSGLLHNNDRLSDGDSKYSQTSHKLVQLLTTTAEQQLRHADIDTSCKDVLSCTGTSNSASANSSGGSCPSSHSSLTERHKILHRLLQEGSPSDITTLSVEPDKKDSASTSVSVTGQVQGNSSIKLELDASKKKESKDHQLLRYLLDKDEKDLRSTPNLSLDDVKVKVEKKEQMDPCNTNPTPMTKPTPEEIKLEAQSQFTADLDQFDQLLPTLEKAAQLPGLCETDRMDGAVTSVTIKSEILPASLQSATARPTSRLNRLPELELEAIDNQFGQPGTGDQIPWTNNTVTAINQSKSEDQCISSQLDELLCPPTTVEGRNDEKALLEQLVSFLSGKDETELAELDRALGIDKLVQGGGLDVLSERFPPQQATPPLIMEERPNLYSQPYSSPSPTANLPSPFQGMVRQKPSLGTMPVQVTPPRGAFSPGMGMQPRQTLNRPPAAPNQLRLQLQQRLQGQQQLIHQNRQAILNQFAATAPVGINMRSGMQQQITPQPPLNAQMLAQRQRELYSQQHRQRQLIQQQRAMLMRQQSFGNNLPPSSGLPVQMGNPRLPQGAPQQFPYPPNYGTNPGTPPASTSPFSQLAANPEASLANRNSMVSRGMTGNIGGQFGTGINPQMQQNVFQYPGAGMVPQGEANFAPSLSPGSSMVPMPIPPPQSSLLQQTPPASGYQSPDMKAWQQGAIGNNNVFSQAVQNQPTPAQPGVYNNMSITVSMAGGNTNVQNMNPMMAQMQMSSLQMPGMNTVCPEQINDPALRHTGLYCNQLSSTDLLKTEADGTQDKKTEEFFSVVTTD

SEQ ID NO: 279182 - DNA, 4200 bp, Artificial Sequence
  derived and/or modified sequence
atgtccggtctgggggactcttccagtgacccagctaaccctgattctcataagcggaaggggtccccttgtgatactctggcttcctcaactgagaagcgccgcagagagcaggaaaataagtacttagaagagcttgctgagctgctgtcggcaaacatctccgacatcgatagcctgtcagtgaaaccagataagtgcaagatacttaaaaagacagtggaccaaatccaactcatgaaaaggatggagcaggagaagtccaccactgacgatgatgttcagaaatcagacatctccagctccagccagggagttatcgagaaggagtcactgggtcctttgcttttggaagcgctcgacggcttcttcttcgtcgtgaattgcgaaggacgaatcgtattcgtgagcgagaatgttaccagctaccttgggtataatcaggaagaactgatgaacacctccgtgtattccatcctgcacgtaggggatcatgccgaatttgttaagaacctcctgcccaaaagcctggtgaatggggttccatggccccaggaggccactcgacggaacagccacaccttcaattgtcggatgcttatccatccccccgatgagcccggaacggagaaccaggaggcctgccaaagatatgaagtcatgcagtgctttaccgtttctcagcccaagagcattcaggaggatggcgaggactttcaatcttgcctgatctgtatcgcccgcagactacctagaccaccagccattactggcgtcgagagcttcatgacaaaacaggatacaacgggaaaaatcatatccatcgacacatcttcgctcagggccgccggtagaaccggttgggaggatctagtgcgcaaatgtatttatgcgtttttccaaccccaggggagagaaccgagctacgccaggcagctgttccaggaagttatgacgagaggaacagcctctagcccttcttacaggttcattttgaacgacggcactatgctttctgcacacacaaagtgcaagttatgctatcctcagtcgcccgacatgcaaccatttatcatgggaatccatatcattgatcgagaacatagcgggctatctccacaagacgacactaacagcggcatgtctatcccaagggtgaatcctagcgtgaacccatccatttcccctgcacacggagtcgcaagaagttctacactcccacccagcaattctaatatggtcagcacccgcattaatagacaacagagtagtgatctccacagtagctcacactctaatagctccaattcccagggcagttttggctgcagccctgggagccagatcgtggccaacgtagccctgaatcaaggacaggcgagtagccagtccagcaaccccagcttgaacctcaataactctccaatggaaggaacaggcatctctctcgcgcagttcatgagcccacgccggcaggtgacctcaggcttagcaacacgcccaagaatgcccaacaattcctttcccccaaatatctcgacattgagttctccagtcggtatgacaagtagtgcctgcaacaacaacaatcgaagctactctaacattcccgtaacgtcactgcaggggatgaacgagggaccaaacaactctgtcggctttagcgctagtagtcctgttctgcggcagatgtcctcgcaaaatagcccgtcaagactcaacatacagccggcaaaggctgaatcaaaagacaacaaggagattgcttcaatactcaatgagatgatccagagtgataacagttcttcagacggcaaaccactcgacagcggcctgctgcacaataacgacaggttgtccgatggagacagcaagtattcacagacaagccacaagctggtgcagctcctcaccaccacagcagaacagcagctcagacatgcggatattgacacatcatgcaaggacgtactctcctgcaccggaacctctaactccgctagtgccaacagctctggggggtcatgcccctcaagccatagtagcctgaccgaacggcataagattctccaccggttactccaggagggatccccatctgatataaccactctgagcgtggagcccgacaagaaggatagcgccagcacctcagtttccgtcacgggacaggtgcaagggaattcgagcataaaacttgaattagacgcatcaaaaaagaaagaatcaaaggaccaccagctcctgcgctacctgttggacaaggatgaaaaagatctcaggagcaccccgaatctgtcattggacgatgtcaaagtgaaagtcgaaaagaaagagcagatggatccctgtaacacaaaccctacgcccatgacaaagcctaccccggaggaaattaaactggaagcccaaagccagtttaccgctgacctggatcagtttgatcagcttttgcctacactagagaaggcggcacagctccccggcctgtgtgaaactgatagaatggacggcgccgtgacaagtgtcaccattaaatctgagatcctgcctgccagtctgcagagtgccactgccaggccaaccagtagattaaacagactgccagaattagagctcgaagctatcgataatcagttcggccaacctgggacaggcgaccagatcccttggacgaacaacacagtgactgcaataaatcagtcaaagtctgaggatcaatgcatctctagtcagctggacgaactattatgcccgcctaccaccgtggaggggcggaacgatgaaaaagccttgctggaacaactcgttagctttcttagcggcaaagatgagaccgagctggccgagttggatagggcgctcggtatcgacaaacttgttcaaggcggaggattagatgtactgtccgagagatttcctcctcagcaggcaactccacctcttataatggaagagcgcccgaacctgtacagccaaccttactccagtccatctcccactgctaacttgccatcaccttttcaggggatggtgcgacagaaaccttcccttggaactatgccagtgcaggtaacaccgcctcggggagcctttagccctggcatggggatgcagccgagacagacacttaatcggccccctgctgcgcctaatcagttacggctgcaacttcagcaaaggttacaggggcagcagcagctcattcaccagaacaggcaagctattctgaaccagttcgcggccaccgcccccgtgggaatcaatatgagatccgggatgcagcagcaaattaccccccagccacccctaaacgcccaaatgctcgcacaacgccaacgagagctctacagtcagcagcatagacaaaggcaactcatccagcagcagagggccatgctcatgcggcagcaaagcttcggtaataacttgcccccatcttcgggcctaccggtccaaatgggaaatccacgtctcccacagggagcaccgcagcagtttccctatccccccaactacgggaccaatcccggcaccccccccgcaagcacatctccatttagtcagctcgccgctaaccccgaggcgtctcttgccaatcgcaattctatggtgtcacgcggcatgactggtaatatcggtggacagtttggcacgggaatcaacccacagatgcagcagaacgtgttccagtaccccggtgcgggcatggtgccccagggcgaagcaaatttcgcccctagtttgtccccagggtccagcatggtccctatgccgattcctccgccgcaatcttcccttttacagcaaacacctccagcttctgggtaccagagcccagatatgaaggcatggcagcagggagccatcggcaacaataatgtgttctcccaggccgtgcagaatcagcccacgccagcccagcctggagtgtataacaacatgagcatcaccgtgagtatggcaggtggaaatacaaacgtgcagaacatgaatcccatgatggctcagatgcagatgtctagccttcaaatgcctggcatgaatactgtttgtcctgaacagattaatgatcccgcactgcggcacacaggactgtactgcaatcagctgagcagcactgacctgcttaaaacggaggcagatggtacacaagataagaaaacggaggagttctttagcgtcgttactaccgattag

SEQ ID NO: 279183 - DNA, 4200 bp, Artificial Sequence
  derived and/or modified sequence
atgtcaggccttggagatagttcctccgatccggcaaaccccgactctcataaacggaagggctctccttgtgacaccctcgcatcatcaaccgaaaagcgaaggcgagagcaagaaaacaaatacctggaggaactcgcagagttgcttagtgcaaacatctcagatatcgacagcctgtccgtaaagccagacaagtgcaagatcctgaagaagactgtcgaccagattcagcttatgaagcggatggaacaggagaagtcaaccacagatgatgacgtccaaaagtctgacataagctccagttctcagggagtgattgagaaagagagcctaggccccctgttattagaggctctcgatggatttttctttgtcgtaaactgcgagggacgcattgtttttgtaagcgagaatgtgaccagctacttaggatataatcaggaggaactcatgaatacgagcgtatacagcatacttcatgtgggagatcacgcagaatttgttaagaatctgctgcctaaatcactcgtcaatggcgtgccgtggccccaagaagcaaccagacggaactctcacactttcaactgtagaatgctgatccatcctcctgatgaacctggcactgaaaatcaggaagcatgtcaaaggtatgaggtcatgcaatgctttacggtgtcacagccaaaaagtatacaggaggacggagaggactttcaatcttgcctcatttgcatcgcacggagactccctagaccgcctgccattacaggcgttgaatcctttatgacgaagcaggacaccactggcaagatcatctccattgacacgtctagtttgcgggccgcaggcaggaccggatgggaggacctggtaaggaagtgtatatacgcattcttccagccccaagggcgagagcctagctacgcccgccagctatttcaggaggtgatgacgagaggaactgcctcttccccgtcttacaggttcatcctgaacgacggaactatgctcagcgcccatactaaatgcaagctgtgctacccccagtcaccagatatgcagcccttcatcatgggaattcacatcattgatcgcgaacactcgggcttgtcaccccaggacgatactaatagcggaatgtccattccacgcgtgaatccctctgtgaaccctagcattagtcccgctcatggcgttgctagatcatcgaccctgcctccatccaattctaacatggtctccacgaggattaatcggcaacagagctccgacctccactcaagcagtcactctaattcctcgaattcccagggctcattcggttgttctccagggtctcagatagtggcaaacgtcgccctgaaccaaggtcaggcttcctctcagtcaagcaacccctccctgaatctgaacaattcccccatggagggtacaggaatatctttggcccagttcatgagccctaggcgacaggtgacttccggtctcgccacccgccccagaatgcccaataactcattcccccccaacatcagcacgcttagctctccagtgggcatgacgtccagcgcctgtaacaacaataatagatcatattcaaatattcctgtgacttcccttcaaggcatgaacgagggccccaacaattccgtcggattttcagcgtcgtcacccgtgctgaggcagatgtcgtcacagaactccccctctagactgaacatccagcctgcaaaggccgagagcaaagataacaaggaaatcgcatctattctgaacgagatgattcagtccgataactcctcgtcagacgggaagcctctcgacagtggcctactgcataacaacgatcggctgtccgatggggactctaagtactcccagactagccataagcttgtgcagctgcttacgaccaccgctgaacagcagctgaggcacgctgacatcgatacttcatgcaaagatgtcctcagctgcactgggactagcaatagcgcatccgcaaattccagtggcgggagttgtccttcaagccatagcagtctcacggagagacataaaatcctgcatagactgctccaggaaggaagtccatccgacatcaccacgctatcggtggaaccagacaagaaggactcagccagcacaagtgtcagcgtaacaggccaggtccaagggaactcctcaatcaagctagagcttgatgcttcaaagaagaaagaatccaaggatcatcagttgcttagatatttgctggacaaagatgaaaaagatctgagatccaccccaaacttgtcattggacgacgtgaaggtcaaagttgagaaaaaggagcaaatggacccttgcaacactaatcccacccctatgacaaagcccactcccgaagaaattaagcttgaggcccagagtcaatttaccgcggacttggatcagttcgaccaacttctgcccactttggagaaagctgcccagttgcctggcctgtgtgaaaccgataggatggacggtgccgtgacttcagtgaccattaagtcagaaattcttcctgctagtctgcagtctgcaactgcccgtcctacaagtaggctaaatcgcctgcctgaactggaattggaggcaattgataatcagttcggccaacccggaacgggagaccagataccttggacaaacaacaccgttacagctatcaaccaatcaaagagcgaggatcaatgcatcagctcccagcttgacgagttgctgtgccctcctaccacggtggagggcaggaatgacgagaaagctcttctcgagcaactcgtgtccttcctgtccggcaaggacgagaccgagttggccgaacttgaccgggccttgggaatagacaaactggtgcagggcggagggctcgatgtgctatctgagagattcccaccccagcaggcaacaccacccttgatcatggaagagaggcccaatttatacagccagccatatagctctccctcacccaccgcgaacctgccatcgccgtttcaaggcatggtcaggcagaaaccatcactgggtaccatgccggttcaggttacgcctcccaggggggctttttcaccggggatgggtatgcagcctcggcaaactttgaatcggccaccggcagctcctaaccagctgaggctacagttgcaacagagactacaagggcagcagcagctcatccaccagaatcgtcaggcgattctgaaccagtttgccgccacagccccggtgggaatcaacatgagatcaggcatgcagcagcagatcaccccccagcctccattaaacgcccaaatgctcgcccaaaggcagcgagaattatattctcagcaacaccggcagaggcagctgattcagcagcaaagagccatgctaatgcgtcagcagtctttcggtaacaaccttcccccttcgagcgggctccccgttcagatgggtaaccctcgcctgccgcagggagcccctcagcagtttccttatccgcctaattacggaacaaaccctggtacccctccagcatccacatctccgttcagccagctggccgctaatccggaggcctcattggcgaatcgaaatagtatggtgtccagggggatgacaggtaacattgggggtcagttcgggacaggaataaacccacagatgcaacaaaatgtgtttcaataccccggagccggaatggtgccgcagggagaagccaattttgccccttcactctccccgggcagctccatggtgccaatgccaattccaccaccacagtcttccctgttacagcagacacctccagccagtggctatcagtctcctgacatgaaggcctggcagcagggagcaatcgggaataataatgtcttcagtcaggcagtgcagaaccagccaacgcctgcacagcccggagtgtacaataatatgagcattaccgtgagcatggccggtggaaacacgaacgtccagaacatgaatcctatgatggcccagatgcagatgtcttcgctgcaaatgcccggtatgaatacagtgtgccccgagcaaattaacgaccccgcattgaggcatacaggtctctactgcaaccaactttcctccacagatctccttaaaactgaagctgacggaactcaagacaaaaaaacagaggaattcttttcagtggtgaccacagattag

SEQ ID NO: 279184 - DNA, 4200 bp, Artificial Sequence
  derived and/or modified sequence
atgtctggccttggagacagcagctccgaccctgctaaccctgactcccataagcgcaagggaagtccatgtgatacccttgcttcctccaccgaaaaaaggaggcgggagcaggaaaataagtatctggaggaattagccgagcttttgtcagccaatatcagcgatatcgactcgctatctgtgaaaccagacaagtgcaaaatcctcaaaaagacggttgaccagatccaactaatgaagagaatggagcaggaaaaaagcactaccgacgacgacgtgcagaaaagtgacataagttccagttcgcaaggtgttatagagaaggagagcctcggtccccttttactcgaagccctggatggctttttcttcgtcgtaaattgtgagggccggatcgtgttcgtgtctgagaatgttaccagttacttagggtacaatcaggaggagctgatgaataccagtgtttacagcatcttgcatgttggggaccacgccgagtttgtgaaaaacctgctgcccaaatctcttgttaatggcgtgccctggccacaggaggccacccgcagaaattcacatacattcaattgtcgcatgctgattcatcctccagatgaacctggcaccgagaatcaggaagcttgccagcggtacgaggtgatgcaatgcttcaccgtgagccaacccaaaagtatacaggaggacggagaagattttcagtcgtgcctgatctgtatcgctcgacgcctgcccagacctcccgccattactggcgtggagagcttcatgacaaaacaggatactacgggaaagatcatcagtattgatacaagttccctgcgtgccgccggacggacaggatgggaggatctggttcgcaagtgtatctacgccttcttccaaccccaaggtagggaaccaagctatgcaagacaattgttccaagaagtgatgacaagaggaacggcgtcctccccatcctatagattcatcctcaatgacggaacaatgctgtcagctcataccaagtgcaaactctgctatcctcagagcccagatatgcaaccctttattatggggatccacatcatcgatagggagcatagcggactgagtccccaggacgacactaactcagggatgagcatcccgagagtgaatccaagcgtaaatccttcgatctccccagcccatggcgtggcgcgatcaagcacccttccacccagtaacagcaacatggtcagcacccgaatcaaccgccagcaaagctcagacttgcattcctccagtcattctaattcaagtaattctcagggctctttcggatgtagtcccggctcacagatcgtggctaacgtagctctgaaccagggccaggcatcatcccagtctagcaatcccagtctgaacctaaacaatagccccatggagggcactggtatctccttggcccagttcatgtcccctaggagacaggtaacttcgggcttggcaactaggccgagaatgcccaataacagctttcctccaaacatttcaaccctttcgagtcctgtaggtatgacatcttcagcatgtaacaataacaaccgatcctactcgaatatccctgtaaccagtctgcaagggatgaacgagggacccaataattctgtgggtttctctgctagttcccctgtgcttaggcaaatgtctagccagaactccccctcccgcctgaatatccagccagcaaaagcagagtccaaagacaacaaagaaatcgcaagtatactgaacgagatgatccagtccgacaattccagttctgatgggaaacccctggatagcggtctgttgcacaacaacgacaggctcagtgacggggactccaagtacagtcagacatctcacaaattggtccagttgttaactacgacagctgagcagcagcttaggcacgcagatatagatacaagttgcaaagacgtgctgagttgtaccggcacaagcaacagcgcctcagccaacagtagtggagggtcatgcccgagctctcactcttccctgactgagaggcataaaattttacataggctgctgcaagagggatcgccaagtgatattaccaccctgtccgtcgagccggacaagaaagattcagcttctacgtcagtaagcgttacaggccaggtacaggggaattcaagcattaaactcgaactcgatgcaagcaaaaaaaaggaaagcaaggatcaccagctcttgaggtacttactggataaggatgagaaagatttgcgctctacacctaatctgagcttagacgatgtgaaggtcaaagtcgaaaagaaggagcagatggacccatgtaatacaaatccaactccgatgaccaaaccaacccccgaagaaataaaacttgaagcccagtctcagttcactgcggacctggaccagttcgaccaactgctccctaccctcgagaaagctgctcagctgccgggcctttgtgagaccgatcggatggacggggcagtcacgagcgtaacaatcaagtctgagattcttcccgcctctcttcagtcagcaacagccaggcccacttcccgattgaataggttaccggagctagagctggaggcaattgataatcagttcgggcagccgggaactggtgaccaaatcccctggaccaataataccgtgactgccatcaaccagagcaaatctgaagaccagtgcatttctagccagctcgacgagcttctctgtccccctactaccgtggagggacggaatgatgaaaaggccctcctggaacaacttgtgagctttctgtcaggcaaggatgagactgaattggccgagctcgatagagcactaggcatagacaagcttgttcagggcggaggtctggatgtgctgtccgaaagattcccgccacagcaggctacgcccccactgataatggaagaacggccaaatctgtacagtcagccctattccagtcctagtcccactgctaatcttccaagcccattccaggggatggtccgacagaagccatctttaggaacaatgcctgttcaggtgacacccccacgcggggccttttccccaggcatgggcatgcaaccacgccagacgttgaatcggccgcctgccgcccccaaccagctccgcctccagctccagcagaggctgcaggggcagcagcaactgattcatcagaaccggcaggctatactgaaccagttcgccgccacagcgcccgtaggaatcaacatgcgttccggcatgcaacagcagatcacaccccagcctcctctaaacgctcaaatgctcgctcagcgtcaaagagagctatattcccaacagcacagacagcgccaactgatacagcaacagcgggcaatgctgatgcggcagcagtcatttgggaacaatctgcccccctcatctgggctcccagtgcagatgggaaacccccgcctcccccagggtgcaccccagcagttcccatacccaccaaattatggcacaaatcctgggaccccacctgcgtcaacatctccctttagccagctggcagccaatccggaggcttctctggccaaccgtaacagcatggtgtcaagaggaatgacgggaaatatcggagggcagtttggaacagggataaacccacaaatgcaacagaacgtgtttcagtatccaggtgctggcatggttccccagggggaagcgaactttgcaccatccttgagccccggctcaagcatggtcccaatgcctatccctcccccacagtcttcactgctccagcaaaccccacccgcaagcggctatcagtctccagatatgaaggcttggcaacagggggctatcggcaacaacaatgtgttttcccaggccgtgcagaatcagccgacacctgcacagcccggtgtgtacaataacatgtctatcactgttagtatggccggaggtaacacgaatgttcagaatatgaaccctatgatggcccaaatgcagatgagcagcttgcaaatgcctggaatgaacacagtctgcccagaacagattaatgacccagccttgcgacatacaggcctgtactgcaatcagctgtcctcgacagacctgctcaagacagaagcagatggcacacaggataagaagaccgaggaattctttagcgtcgtgaccaccgattag

SEQ ID NO: 279185 - DNA, 4200 bp, Artificial Sequence
  derived and/or modified sequence
atgagcggcctgggggacagcagcagtgaccctgccaacccagacagccacaagaggaagggcagcccctgtgacaccctggccagcagcacagagaagagaagaagagagcaggagaacaagtacctggaggagctggccgagctgctgagcgccaacatcagtgacatcgacagcctgtctgtgaagccagacaagtgcaagatcctgaagaagacagtggaccagatccagctgatgaagaggatggagcaggagaagagcaccacagatgatgatgtgcagaagagtgacatcagcagcagcagccagggcgtgattgagaaggagagcctgggccccctgctgctggaggccctggatggcttcttctttgtggtgaactgtgagggcagaattgtgtttgtgtctgaaaatgtgaccagctacctgggctacaaccaggaggagctgatgaacacctctgtgtacagcatcctgcacgtgggggaccacgccgagtttgtgaagaacctgctgcccaagagcctggtgaatggagtgccctggccccaggaggccaccaggaggaacagccacaccttcaactgcaggatgctgatccaccccccagatgagcctggaacagagaaccaggaggcctgccagagatatgaggtgatgcagtgcttcaccgtgtcccagcccaagagcatccaggaggatggagaggacttccagagctgcctgatctgcatcgcccggcggctgccccggcccccagccatcactggagtggagagcttcatgaccaagcaggacaccaccgggaagatcatcagcattgacaccagcagcctgcgggctgctggccgcacaggctgggaggacctggtgaggaagtgcatctatgccttcttccagccccagggccgggagcccagctatgcccggcagctgttccaggaggtgatgacccggggcacagccagcagccccagctaccgcttcatcctgaatgatggcaccatgctgagcgcccacaccaagtgcaagctgtgctacccccagagcccagacatgcagcccttcatcatgggcatccacatcatcgaccgggagcacagcggcctgagcccccaggatgacaccaacagcggcatgagcatcccccgggtgaaccccagcgtgaaccccagcatcagccctgcccacggcgtggcccggagcagcaccctgccccccagcaacagcaacatggtgtccacccgcatcaaccggcagcagagcagtgacctgcacagcagcagccacagcaacagcagcaacagccagggcagctttggctgcagccctggcagccagatcgtggccaacgtggccctgaaccagggccaggccagcagccagagcagcaaccccagcctgaacctgaacaacagccccatggagggcaccggcatcagcctggcccagttcatgagcccccggcggcaggtgaccagcggcctggccacccggcccaggatgcccaacaacagcttcccccccaacatcagcaccctgagcagccctgtgggcatgaccagcagcgcctgcaacaacaacaacagaagctacagcaacatccctgtgaccagcctgcagggcatgaatgaaggccccaacaacagcgtgggcttcagcgccagcagccctgtgctgcggcagatgagcagccagaacagccccagccggctgaacatccagcctgccaaggccgagagcaaggacaacaaggagatcgccagcatcctgaatgagatgatccagagcgacaacagcagcagtgatggcaagcccctggacagcggcctgctgcacaacaatgaccggctgagtgatggagacagcaagtacagccagaccagccacaagctggtgcagctgctgaccaccacagctgagcagcagctgcggcatgctgacatcgacaccagctgcaaggatgtgctgagctgcaccggcaccagcaacagcgccagcgccaacagcagcggcggcagctgccccagcagccacagcagcctgacagagcggcacaagatcctgcaccggctgctgcaggagggcagccccagcgacatcaccaccctgtctgtggagccagacaagaaggacagcgccagcacctctgtgtctgtgacaggccaggtgcagggcaacagcagcatcaagctggagctggatgccagcaagaagaaggagagcaaggaccaccagctgctgcgctacctgctggacaaggatgagaaggacctgcggagcacccccaacctgagcctggatgatgtgaaggtgaaggtggagaagaaggagcagatggacccctgcaacaccaaccccacccccatgaccaagcccaccccagaggagatcaagctggaggcccagagccagttcaccgctgacctggaccagtttgaccagctgctgcccaccctggagaaggccgcccagctgcccggcctgtgtgaaacagacaggatggatggagctgtgacctctgtgaccatcaagtctgagatcctgcctgccagcctgcagagcgccacagcccggcccaccagccggctgaaccggctgcctgagctggagctggaggccatcgacaaccagtttggccagcccggcactggagaccagatcccctggaccaacaacacagtgacagccatcaaccagagcaagtctgaggaccagtgcatcagcagccagctggatgagctgctgtgcccccccaccaccgtggagggcagaaatgatgagaaggccctgctggagcagctggtgtccttcctgagcggcaaggatgaaacagagctggccgagctggaccgggccctgggcatcgacaagctggtgcagggcggcggcctggatgtgctgtctgagcgcttccccccccagcaggccaccccacccctcatcatggaggagcggcccaacctgtacagccagccctacagcagccccagccccacagccaacctgcccagccccttccagggcatggtgcggcagaagcccagcctgggcaccatgcctgtgcaggtgaccccacccaggggggccttcagccctggcatgggcatgcagccccggcagaccctgaacagacctcctgctgcccccaaccagctgcggctgcagctgcagcagaggctgcagggccagcagcagctgatccaccagaaccggcaggccatcctgaaccagtttgctgccacagcccctgtgggcatcaacatgaggagcggcatgcagcagcagatcaccccccagccccccctgaatgcccagatgctggcccagaggcagcgggagctgtacagccagcagcaccggcagaggcagctgatccagcagcagagggccatgctgatgaggcagcagagctttggaaacaacctgccccccagcagcggcctgcctgtgcagatgggcaacccccggctgccccagggcgccccccagcagttcccctacccacccaactacggcaccaaccctggcaccccaccagccagcaccagccccttcagccagctggccgccaaccctgaggccagcctggccaacagaaattccatggtgtcccggggcatgacaggcaacattggaggccagtttggaacaggcatcaacccccagatgcagcagaatgtgttccagtacccaggagctggcatggtgccccagggcgaggccaactttgcccccagcctgagccctggcagctccatggtgcccatgcccatccccccaccccagagcagcctgctgcagcagaccccaccagccagcggctaccagagcccagacatgaaggcctggcagcagggcgccatcggcaacaacaacgtgttcagccaggccgtgcagaaccagcccaccccagcccagcccggggtgtacaacaacatgagcatcaccgtgtccatggccggcggcaacaccaacgtgcagaacatgaaccccatgatggcccagatgcagatgagcagcctgcagatgcctggcatgaacacagtgtgcccagagcagatcaatgaccctgccctgcggcacacaggcctgtactgcaaccagctgagcagcacagacctgctgaagacagaagcagatggcacccaggacaagaagacagaggagttcttctctgtggtgaccacagactag

SEQ ID NO: 279186 - DNA, 4200 bp, Artificial Sequence
  derived and/or modified sequence
atgagcggcctgggcgacagcagcagcgaccccgccaaccccgactcccataagcgcaaaggaagcccctgcgacacgctggcctcgtctacggagaaaagacgacgggaacaggaaaataaatacttagaggagctggctgagttgctttcggcaaatattagcgacattgactccttgagtgtgaagcctgataaatgcaagattctcaaaaagaccgtggatcagattcagttgatgaagcgtatggagcaggagaagtccactaccgatgacgatgtgcaaaaaagcgacatcagcagttccagtcaaggagttatcgaaaaggaaagcctcggacccctgttgctggaagcacttgacgggttcttcttcgtggttaattgcgagggaagaatagtctttgttagcgaaaatgtgacctcttatttaggctacaatcaagaagaacttatgaatacctctgtgtattctatcttgcatgtcggcgaccatgctgaattcgtaaagaatttgctgccaaaaagcctggtgaacggagtgccttggccgcaagaggcaactaggcgcaacagccatacatttaactgccggatgctcatccatcctccagacgagccggggacagaaaatcaggaggcatgccagagatatgaagtgatgcagtgctttacagtgagccagccaaaaagtatacaggaagatggggaagatttccagagttgtctgatctgtatagctagacgtctcccccgccctccagccatcactggcgtggagtcgttcatgactaaacaggacacaactgggaaaatcatatcaattgatacctctagtctgagggcagctggaagaactggatgggaggacctcgttcggaaatgcatttatgcctttttccagccccagggcagagaaccatcatacgcccggcagctatttcaggaagtgatgacccgcggtactgcatctagcccttcttatcgcttcattctaaacgacgggacaatgttgagcgcccacacaaagtgtaagctctgttatcctcagtcccccgacatgcagcctttcatcatggggatacacattatcgatagggagcactccggcctgtctcctcaggatgacactaactcggggatgtccatcccaagagtgaatcccagcgtgaatccttccatcagccccgcccatggcgtggcacgctcatcaacactccccccttcgaactctaacatggtatccacccgcatcaacagacaacagagttctgacttacactcaagtagtcacagtaatagcagtaattcccagggcagctttggctgcagtccaggctcccagatagtcgccaacgtggcactaaatcagggtcaggctagctcccagagttccaacccctccctgaatctgaacaatagcccgatggagggtaccggtatcagcctcgctcagtttatgagcccaagacggcaggtgactagtggactagcgaccaggccccggatgccaaacaacagttttccgcctaatatttccacactgagttcccccgtgggtatgactagttctgcctgcaataataataataggtcttacagcaatatcccagttacgtcactgcaggggatgaacgaaggcccaaataacagtgtcggcttctcagcatcatctcccgtactgcgccagatgagctcacagaattcgccctcacgcttgaatatccagcccgcaaaggccgagtcaaaagataacaaggagattgcgtctatcttgaacgagatgatacagagcgacaatagctcaagcgatggcaagcctctcgactccggcctgctgcataataatgaccggttgagcgacggtgactcaaagtatagccagacaagtcataaactggtgcagctgctgactaccacggctgagcagcagctccgtcacgccgatattgacacgtcctgtaaagatgtgctcagctgtaccggaacatcaaattctgcctccgccaattccagcggtggcagctgtccaagttcccacagctccctgaccgagcgtcacaagatcctgcaccgcctcttgcaagagggtagtcctagtgatattacaaccctctccgtggagcctgacaagaaggattcagcgtcgacttcagtctcggtgaccgggcaggtgcaggggaattcatctataaaactcgaattggacgcaagtaagaaaaaggagtccaaggaccaccaacttctgcgctacttgctcgataaggatgagaaagatctgagatcgacacccaacctgagccttgacgacgtgaaagtcaaggtggagaagaaagagcagatggatccttgtaacaccaacccaactccaatgacaaaacctactccggaagaaatcaaactggaggcccagtctcagtttactgcagatctagaccagtttgaccagctgcttccgacactggagaaggccgctcagctgccaggcttgtgtgagaccgaccgaatggacggagccgtgacttccgtgaccattaaatccgagatccttcctgcctcactccagtccgccacagcacgcccaacatccaggcttaatcggctgccagaattggagctggaagctatcgataaccagtttggacagcccggcaccggcgatcaaatcccctggaccaacaacaccgttacagccataaaccagtcaaaatccgaagatcagtgtatctcaagccagctggacgaattgctttgtccccctacgaccgtagaggggagaaatgacgaaaaggctctcctcgagcaactggtgtcgtttctgagtggcaaagacgaaaccgagctagcagagttggacagagctttaggcatcgacaaacttgtgcaaggtggaggtctcgatgtgttgagtgagcgcttccctccacagcaggctacccctccgttgatcatggaggagcgacccaacttgtacagccagccatattctagcccgtctcctactgctaacttaccatctcctttccagggcatggtccgacagaagccgtctcttggaactatgcccgttcaagtgacacctccccgaggagctttttcaccggggatgggcatgcaaccaagacagacgcttaaccggcccccagctgctcccaatcagttgcgcctgcaactacaacagcggttacagggacagcaacagctgattcaccagaataggcaggccatattgaaccagtttgcagccacggccccagtgggtatcaacatgcgatccggaatgcaacagcagattacgcctcagccccccctgaatgcccaaatgttggcacagcgccagagagaactctattcacaacagcatcgtcaacggcagctcatacagcaacagcgcgcaatgctgatgcgccagcagtcttttgggaacaatctccccccttcttcgggcttgccagttcaaatgggcaatccacgcctcccacagggcgcaccccagcagttcccttaccccccaaactacgggaccaatcctggaacgccgccagctagcacaagccctttctcccagctcgctgccaatcctgaagccagtttagccaaccgcaactccatggtttcccgaggtatgactggtaacattggaggacagttcggcactggaataaaccctcagatgcagcagaatgtttttcagtaccctggcgccggcatggtgccacaaggagaagcgaacttcgccccgagtttgtctcctggtagctctatggtgcctatgcctattcctcccccacagagcagcctgctccaacagacgccgcctgcgtcaggctatcagtccccagatatgaaagcttggcagcagggcgctattggaaataataacgtgttttctcaagccgtccagaaccagcccacaccagcccagcccggcgtttataacaatatgtccatcacagtctctatggcgggcggaaataccaatgtccagaatatgaatcctatgatggctcagatgcagatgtcatccctgcaaatgccaggcatgaacaccgtttgccctgagcagattaatgatccagcgctgcggcacacaggattatattgcaatcagctgtccagcacagacctgcttaagactgaagccgacggcacacaggataaaaaaacagaggaattcttttccgtggtgaccacagattag

SEQ ID NO: 279187 - DNA, 4200 bp, Artificial Sequence
  derived and/or modified sequence
atgagcggcctgggcgacagcagcagcgaccccgccaaccccgacagtcacaagcgcaagggttcaccttgtgacactttagcaagttctactgagaaacggagacgcgagcaggagaacaagtatctggaggaactcgccgaattactgagtgcaaacattagcgacatcgattctctatccgttaagccagacaagtgcaaaattctgaagaaaactgtggaccaaattcagctgatgaagcggatggagcaggagaaaagtaccactgacgatgacgtacagaaatccgatatctcttcgtctagtcaaggcgtgatcgagaaagagtcccttggcccacttctgctcgaagcgctggatggctttttctttgtcgttaattgtgaaggaaggatcgtgttcgtttccgaaaacgtgacaagctatttaggctataaccaagaggaacttatgaatacaagcgtgtattccatactgcatgtaggcgaccacgctgaattcgtcaaaaacctgttgcccaagagcctggtgaatggtgtgccgtggccgcaggaggctacaagaaggaactctcacacctttaactgtaggatgttaatacacccacccgacgaacccgggactgagaatcaggaagcctgtcagaggtacgaagtgatgcaatgctttacagttagtcagcctaagtcgatacaagaagacggcgaagacttccagtcttgtctgatctgcatcgctcggcggctccccagacctcctgcaatcacaggagtggagagctttatgacaaaacaggacaccactgggaaaattattagcatagacacctcctcccttagggctgccgggcggacagggtgggaagacttagttcgcaaatgcatatatgcattctttcaaccacaaggaagagagccttcctacgcacgacaattattccaggaggtcatgacgcgaggtacagctagctctccttcctatagatttatcttgaatgacggcacgatgttgtccgcccacactaagtgcaaactgtgctacccacagtccccagacatgcagccgttcataatgggtatccacattatcgatagagagcacagcggcctcagcccccaggacgatactaactcaggaatgtctatccctagagtgaacccctctgtgaacccatcaatcagtccagcgcatggagtcgcaaggtcgagtaccttgcctccctccaacagcaatatggtgtccactaggataaacaggcagcagagctctgatctgcactccagtagtcattccaattcatccaactcacagggtagcttcggatgtagtcccgggagccagatcgtagcaaacgtggcacttaaccagggacaagcctcttctcaatcaagtaacccgtcattgaacctgaacaacagtccaatggaaggaactggcatttcattagcacagtttatgagcccccggcgccaggtaacttcagggctggccactcgccccaggatgcctaacaattcatttccacccaacatcagcacgctgtcgtcgccggtggggatgacatcttccgcatgcaacaacaacaatagaagctatagcaatatccctgtgacctctcttcaaggcatgaacgagggacctaataattcagttggattctcagcctctagcccagtactaagacagatgtcctctcagaactcgccatctagattaaacatacagcctgctaaagctgagtccaaagacaataaggaaattgcctcaattctaaatgaaatgattcagtcagacaattcctcatcagatggaaagccactggattccggactgctgcataataatgaccgccttagcgacggggacagtaaatacagtcagacgtcccacaaattagttcagctcctgactacaactgctgaacagcaacttcgacacgccgatatcgatacatcatgtaaagatgtgttgagttgcacgggaaccagtaacagcgcgagcgcgaattcttccggcggcagctgtcctagcagtcattcttccctgaccgagcgacataagattttgcacagactgttgcaagagggaagcccttctgacatcaccacactctcagtcgaaccagataaaaaggattctgcctccaccagcgtttctgtgaccggccaggtccagggaaactcttctataaagctggaacttgacgcatccaaaaagaaggagtcaaaggaccaccagctgttacgatacttactagataaagatgagaaagatctcagatcaacccccaacttgagcctggacgacgtgaaggtgaaagttgagaaaaaagagcaaatggacccatgtaacaccaaccccactccaatgaccaagccaactcctgaggaaatcaagctggaagctcagagccagttcacggccgacttggatcaatttgatcagctgttgccaaccctggagaaggctgctcagcttcctggcctctgtgaaacagaccgaatggacggcgccgttaccagcgtgacaattaagtctgagattctccccgcaagtctccagtcagctaccgcccggccgacatcgaggcttaatcgtctccccgagctggaactcgaagcgatcgacaaccagttcggccagcccggtacaggggatcagatcccctggaccaacaatacagtaactgccatcaaccagtctaagtctgaggaccagtgcatttcttcccagcttgacgagctgctctgtcctccgacaacagtagagggccggaatgacgagaaagcactattggagcagctggtgtccttcctgagtggcaaagatgagaccgagcttgcagagctggatagagctctgggaattgacaagctcgtccaggggggcggcctagacgtcctttcagaacggtttcctccacagcaggcgacccctcctctgataatggaggagaggcccaatctgtacagccagccctactcctctcctagcccaacagccaatttaccatcccctttccaggggatggtgcggcaaaagccgtccttgggaacaatgcctgtacaggtgacgccaccacgcggggcattttctcctggcatgggcatgcaacccagacagacactgaacaggcctcctgctgctccaaatcagctaagattgcagttgcagcaacgcctgcaaggacagcagcaactgattcatcagaatcgtcaggccattctgaatcagttcgctgccacagcccctgttgggataaacatgagatctgggatgcaacaacagatcaccccccagccaccccttaacgcccagatgctagcacagcgacaacgcgaactatatagccagcagcatcgacagaggcagctgatacaacagcagcgagcaatgctaatgcgccagcagtcctttggaaataatcttcctccctcctctggcttgccagtccagatgggcaatccccgcttgcctcaaggagcaccacagcaattcccatacccgcccaactatgggactaaccctggaaccccccccgcctctacttcgccattttctcaactggctgccaaccccgaggcctctctagccaacaggaacagtatggtgtctcgcggcatgacaggaaatattggtggtcagtttggcaccggtatcaacccccagatgcagcagaatgtgtttcaataccccggcgcaggaatggtgccacagggggaggcgaactttgccccatctcttagtcccggctcatccatggtcccaatgcccattccccctcctcagtccagccttctgcagcaaaccccccccgctagtggatatcaaagtccggacatgaaagcttggcaacaaggggcgatcggcaacaataacgtgttttcgcaagccgtccaaaatcagcctacaccggcccaacccggggtctacaataacatgtctatcacagtctcaatggccggagggaacactaatgtccagaacatgaatcccatgatggctcagatgcagatgtcctctctccaaatgccagggatgaataccgtgtgccccgagcaaatcaacgatccagctctgagacataccgggctttattgtaatcagctgtcctcaaccgaccttctgaagacagaggcagatggaacccaagacaagaaaacagaagaatttttctccgtggtcaccacagattag

SEQ ID NO: 279188 - DNA, 4200 bp, Artificial Sequence
  derived and/or modified sequence
atgagcggcctgggcgacagcagcagcgaccccgccaaccccgactcgcacaagcgaaaggggagcccctgtgatacccttgcaagttccaccgaaaaacgacggcgggaacaggagaacaagtatctcgaggaactcgccgaactcctgtcagcaaacatttctgatatcgatagtctgtcagtgaaaccagacaagtgcaagattctgaagaagacagttgaccagattcagctcatgaagaggatggaacaggagaaatccactaccgatgatgatgtccagaagagcgacatctcaagctcaagtcaaggtgtgatagagaaggagtcactggggccgctgcttttggaggctctggacggctttttctttgttgtgaattgtgaggggagaattgtcttcgtgagcgaaaacgtgacctcctacctgggatacaatcaagaggaactgatgaacactagcgtctactctatactccacgtcggggaccacgccgaattcgttaagaacttgctacctaagtcactggtgaacggggttccttggcctcaagaagcaacccgcagaaattctcataccttcaactgtcgcatgctcattcaccccccagatgaacccggaacagagaaccaagaggcttgtcagcggtacgaagtgatgcagtgttttaccgtatctcaaccgaaaagcatacaggaggatggggaagactttcagtcttgtcttatctgtattgcccgccgactgccccgccccccagctattacgggggtggaaagtttcatgacaaagcaggataccactggcaaaataatcagcattgatacgagctctctccgcgctgcggggcgaaccgggtgggaggatttagtgcggaagtgtatttacgcattcttccagcctcaggggcgggagccatcttatgccagacagctattccaggaggtaatgactcggggaacggcctcgtccccaagctaccgctttattctcaacgacggcaccatgctgtcggcccacactaagtgcaagctgtgctatcctcagtcccctgatatgcagccctttatcatgggaatccatattatcgacagggagcatagcggcctaagtccacaggacgataccaactctggcatgtcaatcccgagagtcaatccctcggtgaatcctagtataagcccagcccacggcgtcgcaaggtctagcacactcccgcccagcaattcaaacatggtatccactcggataaacaggcagcagtcctccgatctgcattccagtagccattcgaacagttccaactcacaaggatcttttggatgctcacctggttcccagatagtcgccaatgtggcactcaatcaaggccaggcttcgagccaatccagcaacccttcccttaacctcaataactcaccaatggagggaaccggaatcagcttggcccagttcatgtctcctcgcagacaggttacatcaggcctggcaaccagacctcgcatgcccaacaattccttcccgcccaacatctcaactctgagctccccagtcggaatgaccagctccgcctgcaataacaacaatcggtcctactcaaacatacccgtcacctctctgcaaggaatgaatgaaggaccaaacaacagcgtggggttctctgcatcgagcccagtcctccgccagatgtcatcccagaactctccgagccgcctgaacatccagcccgctaaagcagaatccaaggacaacaaggagattgcttctattttgaatgagatgatacagagtgacaattcctccagtgacggcaagccactggacagcggcctcctccacaacaatgatcgtctgtccgacggagattccaagtatagccagaccagccacaaactggttcagctgttaacaaccaccgcagagcagcagttacgccatgctgacatcgacacttcctgcaaagacgtcctgagttgcacagggacctccaactccgcatctgccaactcgagtggaggttcttgcccaagtagccactctagcctcaccgagagacacaagatcctccaccgactgttacaggagggaagccctagtgacattacaactctgagtgtggaacccgataagaaagatagcgcctcaacttccgtaagtgtcaccggccaagtccaggggaatagctccatcaagcttgagcttgacgcttctaagaagaaagaaagcaaggaccaccagctccttagatacctgctagacaaagatgaaaaagacctgcgaagcaccccaaatttatctctggacgatgtgaaggtgaaggtggaaaagaaagaacagatggatccttgcaatactaaccccaccccaatgaccaaaccaactcccgaggagatcaaattggaagcgcagagccagtttacggccgacctggatcagttcgaccagttactacctacacttgaaaaggcagcgcaactccccggcctgtgcgaaactgacaggatggacggagctgtgacttcggtgaccatcaagtccgagatacttccagcctccctgcagtcagctaccgccagacccacaagcaggcttaaccggttgccagagttggaactggaagcgatagataaccagttcggccagcccgggaccggcgatcagattccctggacgaacaataccgttacagccataaaccagtcaaaatcagaggaccagtgtattagctcacaactagacgagttgctttgcccccccactaccgtagaagggcgcaacgatgaaaaagccctcctggagcaacttgtttcttttttgagcggaaaggacgagacggaacttgcggagttggaccgggctctgggcattgataaacttgtccagggcgggggactcgatgttttgagcgaacgattccctccacagcaggcaactcctcctttaatcatggaggagcggcccaacttgtatagccagccttattctagcccctcccctacagcgaacctcccctcaccttttcaagggatggtcagacagaagccttcactgggaaccatgcctgtgcaggttacacctccccgcggggcattcagccctgggatggggatgcagcccagacaaacgctgaaccgcccacctgcggctccaaatcagctaagactccagcttcagcagcgccttcaaggccagcagcagttgatacatcaaaataggcaggcaattcttaaccagtttgctgccacagctcctgtgggaattaatatgaggagcgggatgcaacagcaaattactccccaaccgcctctcaatgcccaaatgctagcccagaggcagcgggagctctatagccagcagcaccggcagcggcagctaatccagcagcagagggcgatgttgatgcggcagcagagcttcgggaacaatcttcctccaagttctggtcttcctgtccaaatgggaaatccgaggctcccccaaggtgccccgcagcaatttccctacccgcctaattacggaaccaacccagggaccccccccgcctcaaccagtcccttcagccagctggcagcgaatcccgaagctagcctcgccaataggaattctatggtctctagagggatgacaggcaatatcggagggcagttcgggaccggcataaatccacaaatgcagcagaacgtgtttcagtaccccggtgccggcatggtaccccagggggaagctaacttcgcaccgagtctctcaccagggtcatcaatggtgcctatgcccattcccccaccccagagctcgctacttcagcaaaccccacctgcttcgggctaccaatctccagatatgaaggcgtggcagcaaggagcaattgggaataacaacgtgtttagccaggccgtccagaatcaaccgacacctgcccaacctggcgtatacaacaacatgtccattaccgtcagtatggcgggcggtaacacgaacgtgcaaaatatgaatcccatgatggcccaaatgcagatgagcagccttcaaatgcccggcatgaacaccgtatgtcctgagcaaataaatgaccccgctctgagacacacaggtttatattgcaatcagctgtcttcaaccgacctcttaaaaacggaggccgacgggacccaggacaaaaaaacagaagagtttttcagcgtggtaactaccgattag

SEQ ID NO: 279189 - DNA, 4200 bp, Artificial Sequence
  derived and/or modified sequence
atgtccgggctgggggatagctccagcgaccctgcgaacccagatagccacaaacgaaaagggtcaccatgcgacaccctcgcttccagcaccgaaaagcggcgtcgagaacaggaaaacaagtacctggaagaactggccgagcttctttccgcaaacataagcgatatcgactctttgtctgtgaaaccagacaagtgcaaaatcctgaagaagactgtggatcagatccagctgatgaaaagaatggaacaggagaagtccactactgacgatgacgtgcagaaatccgacatctctagttctagtcagggtgtgatcgagaaagaaagcctcggaccactcctgctcgaagcactggacgggtttttcttcgtagtgaactgcgagggtcggattgtgtttgtgtccgaaaatgtgacttcctatctggggtacaaccaggaagagttaatgaataccagtgtgtatagtatcctgcacgtcggggaccatgctgagttcgttaagaacctgctccctaagtcactcgtcaacggcgtaccctggcctcaggaagccactaggcgaaactcacataccttcaactgtcgcatgcttatccatccacccgatgaacccggtactgagaatcaggaggcatgccagcgctatgaggtgatgcaatgttttacggtgagccagccaaagtccatacaggaggatggtgaagatttccagagttgcttaatttgcatcgccagacggctgccacggccacctgccatcactggggtggagagttttatgacaaagcaggatactacgggcaaaatcatcagtatcgatactagttcattgagagcagctggtcggacagggtgggaggatctggtcaggaagtgtatctatgctttcttccagccacaaggcagagagccatcttacgctcgccagctgttccaggaagttatgacccgcggtacagccagctccccttcatatagattcatcttgaacgacggaaccatgctctccgctcacacaaaatgtaaattgtgttacccccagtctccagacatgcagccctttatcatggggatccacattatcgacagagaacactctggcctgtccccgcaggatgacaccaactctggcatgagcataccgagggtgaacccatccgtgaacccttccatctctcccgctcatggtgtggcccgatctagtacactgcctccatccaactcgaacatggtgtccacaaggatcaataggcagcagtcaagcgacttgcattcgtcctcccactccaacagttcaaactcccagggatcatttggttgtagccccggttcacagattgtggcaaacgtggccctgaatcagggccaagccagctcccagagctccaacccgagcctgaacctgaataatagcccaatggagggcacgggtatttcactggcacaattcatgagtcctaggaggcaggtaactagcggcctcgccactcggcctcggatgccgaataactcctttcctccaaacattagtactctctctagccctgtcgggatgacatcatccgcctgtaacaataataacaggtcttatagcaatattcccgtgaccagcctccagggcatgaacgaagggccaaacaactctgtcgggttttcagccagttctcccgtcctccggcagatgtcttcacagaattcaccgagcagacttaacatccaacctgctaaggccgaaagcaaagataacaaagagattgcatccatcctcaacgaaatgattcagtctgataacagctcctcggacggaaaaccgctcgactccggcctgctccataacaatgatcggttaagcgatggtgattctaaatattcccagacgagccacaaacttgtgcaactgctgaccaccactgccgaacagcagcttcgccatgcagatatcgacacctcttgcaaagatgtgttatcttgcacaggcacctcaaactcagcttcagccaactcctctggtggatcctgtccatcttcccattcaagtttaaccgagaggcataaaattctccatcgcctgctgcaggagggatccccttctgatatcacgactctgtccgtggagccggataaaaaagactcagcttctacgtccgtttcggtaacaggccaagtgcaagggaattcatctatcaagctagagctggacgcgagtaagaagaaagagagcaaggaccaccagttgttacgttatttgctcgacaaagatgagaaggatttgcggtctaccccgaacttgtcccttgacgatgttaaggtgaaagttgagaaaaaagagcaaatggacccttgcaacacaaatcccaccccaatgaccaaaccaaccccggaggaaattaaactggaagcgcagagccaattcaccgctgacctcgaccagttcgatcagctgcttcccacacttgagaaagctgctcagctgccaggtctgtgtgagaccgaccgcatggacggagcagtaacatctgtgaccataaaatccgagattttgcccgcatctctccagagcgcgacggctcgccctacatctcgtcttaaccggctgcctgagctcgagctggaggctatcgacaaccaatttggacagccaggaaccggtgaccagataccttggacaaataataccgtcaccgctatcaaccaaagcaagagcgaggatcaatgtattagcagccagctggacgaacttctctgcccccctaccacagtggaaggcaggaacgacgagaaggcccttctggagcagctagtctcattcctatccggaaaggacgagaccgaactggccgagctcgaccgggcacttggtatcgataagctcgtccagggtggcggactggacgtgctcagcgaaagattcccccctcagcaggccaccccccctctaataatggaagagaggcccaacctttattctcagccctatagcagtccctctcctacagccaatctgccttcccccttccaggggatggtccggcagaaacccagcctgggcactatgcccgtgcaggtgactccacctcgtggcgcattcagtcctggcatgggaatgcagcctagacagactttaaacaggccaccagccgcaccaaatcagctgaggctgcagctccagcagagactgcaaggacagcaacagttgattcaccagaatcgccaggctatactgaatcagttcgcggcaacggcacctgtaggaatcaatatgcgatctggcatgcaacagcagattaccccccaaccacctcttaatgcacagatgctggcccagcggcagcgcgagctctactcgcagcaacacaggcaaaggcagctaattcagcagcaaagagctatgttgatgaggcagcaaagtttcggcaataacttgcctcccagttctggtctacccgtccaaatgggtaacccaaggttgccccagggagccccacagcagttcccatacccgccaaattatgggactaatccaggaactcccccagccagtacatccccattttcccaactggccgctaaccctgaagccagcctcgccaataggaattcaatggtaagcaggggcatgactggcaatataggagggcagttcgggaccggaatcaatccccagatgcagcagaatgtctttcagtatccaggggcaggaatggtgccccaaggcgaagcgaatttcgccccaagcctgtcacctgggtcctccatggtcccaatgccaatcccccctcctcagtcctcactcctgcaacaaaccccacccgcttcaggttatcagagccctgatatgaaggcctggcaacagggagctatcggaaacaataacgtgtttagtcaggccgtgcagaatcaacccacgccagcccagccaggcgtgtacaacaatatgtctatcaccgtgtccatggccggaggaaatactaacgtgcagaatatgaacccaatgatggctcaaatgcagatgtcttccctgcagatgccaggcatgaacactgtatgccccgagcagattaacgacccggcattgagacacactggattgtactgcaaccagctgtctagcacggacctcctcaaaacagaggcggatggcactcaggataagaagaccgaggagttctttagcgtggtgaccaccgactag

SEQ ID NO: 279190 - DNA, 4200 bp, Artificial Sequence
  derived and/or modified sequence
atgtctggcctcggagactcatcttccgaccccgcaaatcccgattcacataaaaggaaaggatcaccttgtgataccctggccagcagcactgaaaagcgccgaagggaacaggagaacaagtacttggaagagcttgcagaactcctcagcgctaacatctctgatatcgactccctttccgtgaagccagataaatgtaagattctgaagaaaactgtagaccagatccaattaatgaagcggatggagcaggagaagagcactacagatgatgacgttcaaaagtcagacatctcatcctccagccaaggggtaattgagaaagaatcgctaggccctctgctcctggaagcacttgacggattctttttcgtcgttaattgcgagggcagaatcgtattcgtttcagagaacgttacctcctacctggggtacaaccaagaggagttaatgaacacatcagtgtactcaatactgcacgttggagatcacgccgagttcgtaaagaatctgcttcctaaaagcctcgtgaatggagtcccatggccccaggaagccacacgtagaaattctcatacattcaattgccgcatgctgatccatccaccggatgaacccggaacggagaaccaggaggcctgccagcggtacgaggtgatgcagtgtttcaccgttagccagcccaagagtatccaagaggacggggaggattttcagagctgcctgatctgtatagccaggaggctgcccaggccgcctgccatcacaggggttgaaagttttatgactaaacaggacaccaccggaaagataatctcaatagataccagtagcttgcgagctgccggacgtaccggatgggaggacctcgtgagaaagtgcatctatgctttcttccaaccccaggggcgagagcccagctatgcgcgacagctgtttcaggaggtcatgacacgcggaactgcttccagcccaagctacaggtttatcttgaatgatgggacaatgttaagtgcgcacacaaagtgtaagttgtgctatccccagtcgcctgacatgcaaccgttcattatggggatccacatcatcgaccgagagcatagcggcctctccccccaggatgacactaatagtggcatgtcaatcccacgggtaaacccttcagtgaacccatccatctcccccgcacatggcgttgctaggtcctcgacactccctccctcaaactccaatatggtgtccaccaggatcaacagacagcaatcgagcgatctgcacagtagctctcatagtaatagctctaatagccaggggagtttcggctgctcaccagggagccagatcgtagccaacgtggcactaaatcagggtcaggcttcctcccaatctagcaacccgtctctcaacctgaataattctcccatggagggaaccggtatctcattagcacagtttatgtcacccagaaggcaggttacgtcagggttggcaacccgccctcgtatgcccaataactcattcccacccaatatctccaccctgtcaagtcctgtcggcatgacctctagcgcttgcaacaacaacaaccggtcttactcaaatatcccagtaaccagcctgcagggaatgaatgaaggacccaataactcagtcgggttctctgcctccagcccagtgcttcgccaaatgtccagccaaaacagcccttctcgcctcaatatccagcctgcaaaggccgagtctaaggataacaaagaaatagcaagtattctgaacgagatgatccagtccgataatagctctagcgatgggaagccactggacagtgggttattgcataacaacgataggctttcagacggtgacagcaaatacagccagacttctcacaaattagttcaactccttaccacaacagctgagcagcaactgcgccacgcggacattgataccagttgcaaagacgtcctgagctgtacaggtactagcaattctgctagcgccaacagctccgggggttcctgccctagcagtcacagttctctaactgagcggcacaaaattctccatagactgttgcaggagggaagcccgtcggacattactacccttagcgtggaaccggacaaaaaggatagtgcttctacttctgtgtccgtcaccggtcaggtccaaggaaactcttctatcaaactggagctggatgcttcaaaaaagaaagaaagcaaagaccaccaactgttgcgatatctactggataaggatgagaaggacctacgatctacgccgaacctgtccctcgatgacgtgaaggttaaggtggaaaagaaagagcagatggacccctgtaacaccaatcccaccccaatgactaagccaacacccgaagaaattaagctggaggcccagtcacaattcaccgccgacctggatcaatttgaccagttgctcccgactctggagaaggcagcccagctccccggtctgtgcgagacagaccgtatggatggagctgtcacctctgtgaccatcaagtcagaaatcctgcccgctagtttgcagagtgctactgctcgacctacaagccgcttgaatcggcttcctgagctggagctggaggccattgacaaccagtttggccagcccggaaccggagatcagataccatggaccaataacaccgtcacagctatcaatcagtcaaagtcagaagaccagtgtatcagcagccagctggatgaactgctttgcccgcctactaccgtagaggggagaaatgacgagaaagctctgctggaacagctagtcagttttctcagcggaaaggatgaaacggaactagcggagctcgatagagctctgggtatcgacaagctagtgcagggcggaggacttgacgtactatccgaacgattccctcctcaacaagctaccccgccactgatcatggaagaaagacccaacctttattcccagccctactcttcaccgagtcccacggctaatctcccatccccatttcagggcatggtgagacagaaaccctccttgggaaccatgcccgtgcaggttactcctccaaggggcgcattttccccaggaatgggcatgcagcccagacagaccctcaacagacctccagcggctcccaaccagctgcggctgcaactgcaacagcggctgcagggacaacaacagctgatacatcagaatcgccaagctatcctgaatcaatttgcagcgacggcacctgtaggcataaatatgcgctcagggatgcagcagcagatcactcctcagccacctttgaacgcacaaatgctcgcacagcgacaacgggaactgtattcgcagcagcacagacagagacagctcattcagcagcagagagccatgcttatgcgccaacaatctttcggcaataacctgccccctagttccggcctgccagtccagatggggaatcctcgattaccacagggggctcctcagcagttcccatatccacccaactatgggactaatccagggacccccccagcatccacctcccccttttctcagctggccgcaaatccagaggctagcttggctaacaggaacagcatggtttctcgtggtatgacgggcaatatagggggtcaattcggaaccgggataaacccccagatgcaacagaacgtgttccagtaccccggtgcaggcatggtgccccagggagaggccaattttgccccatcactgagcccagggagctcaatggtgcctatgcccattccaccgccacagtcctccttgctgcagcaaacacccccagcctctgggtatcagtcgccagatatgaaagcctggcagcagggcgctataggcaacaacaatgtgtttagccaggcagtacagaatcagccaacccctgctcagcccggtgtgtataataatatgagcatcacagtgagcatggccggagggaacacaaacgtgcaaaatatgaaccccatgatggcacagatgcagatgagctcgctgcagatgcccggaatgaacactgtctgtccagaacaaattaacgatccggctctacgccatactggactgtactgcaaccagttgtcctctacagacctgttgaagaccgaggctgacgggacacaagataaaaagacggaagagttcttttccgttgtcacaaccgactag

SEQ ID NO: 279191 - DNA, 4200 bp, Artificial Sequence
  derived and/or modified sequence
atgagcggattaggagactcaagttccgatccagcaaaccctgactcccacaagcgcaaaggctcaccatgtgatactctggcctcctctacagaaaagagaaggagggagcaagagaacaaataccttgaagagttagccgaattgctctccgcgaatatctctgatatcgacagcctctccgtgaagcctgacaagtgcaagatcctcaaaaaaaccgtggatcaaatacagttaatgaagagaatggagcaggaaaagagcaccacagacgatgacgtgcagaagtccgacattagctcctcttcccaaggggtgatcgagaaagaatccctggggcctcttctgctcgaggccttagacggattcttctttgttgttaattgtgaaggacggattgtgtttgtcagtgagaatgtgaccagttaccttggctataatcaggaagaattaatgaatacctccgtgtatagcattcttcacgtcggagatcatgccgagtttgtcaagaatctgttaccgaagagcctggtgaatggggtgccatggccccaggaagccactagacggaactcccacacattcaactgcagaatgcttattcatcctcctgatgaacccggaactgagaaccaagaagcctgccagcggtacgaagtgatgcagtgcttcactgtctctcagccaaagtctatccaggaggacggcgaggacttccaatcctgcttaatctgcatcgccagacgattgccacggccaccagccataaccggagttgagtccttcatgacaaagcaagataccacaggcaaaatcatctcaattgacaccagctccttgagggccgcaggtaggacgggatgggaggatttagtgcgaaaatgcatttacgctttttttcagccgcaaggccgtgaaccatcatatgcacgccagctgttccaggaagttatgacacgcggaactgctagctccccatcttacagattcattttaaatgacggaactatgctttccgctcataccaagtgcaaactgtgttacccacagagccccgacatgcaacccttcataatggggatccatataattgatcgtgagcacagcggacttagcccccaggatgacaccaatagcggaatgtccattccgagagttaacccctccgttaacccttcaatttccccagcacacggcgtggcgagatcatcgactctgcctcctagcaatagtaacatggtgagcacgcgtatcaacaggcaacagagctcagacttgcatagcagcagtcactctaattcaagcaactcacagggttctttcggctgcagtccaggctcccagatcgtagcaaacgtggccctaaaccaggggcaggccagttctcagagctcaaatccgagcctcaatttaaataactcgcccatggaggggactggcatcagcctggcacagtttatgtcccctagacgtcaggtcaccagcggactggctacgcgccctaggatgcccaataattcctttcccccaaacatctcaacccttagctcacctgtcggaatgacatcatctgcctgcaacaacaataacagatcatattccaacatccctgtgacatcattgcagggaatgaacgaaggtccaaacaactcagtcggatttagcgccagctcacccgttctgaggcagatgtcgtcgcagaactcgccttctaggctgaatatccaacccgctaaagctgaatccaaggacaataaggagattgctagcatccttaatgagatgatccagagtgacaattcaagttccgatgggaagccccttgactctgggctgcttcataacaacgatcggctaagcgatggagattcaaaatactcccagactagccacaagttagtgcagctgctgacgactacagccgaacagcagttacgacatgcagatatcgacacgagttgtaaggatgtgctatcctgcacaggaacctcaaattccgcaagcgccaactcttcgggcggtagttgtcccagttcccattcgtcccttactgaaaggcataagatcctccaccggctgctgcaagagggatcccctagtgacatcacaacattgagcgtcgagcctgacaaaaaggacagcgcgtccacatctgtgagcgtgacaggtcaggtccagggtaactcatccattaagctggagctcgacgccagtaaaaagaaggagtctaaagatcaccaactgcttcgataccttctcgataaagacgaaaaagatctccggtctacacccaatctgagtctggacgacgtgaaagtgaaggtcgaaaaaaaggaacagatggatccgtgcaataccaatcccacccctatgacgaagccgacgcccgaggagatcaagttggaagcccagagccaattcactgccgacctcgaccaatttgatcaattgctgcctacgctggaaaaggccgctcaacttcctggtctatgtgaaacagatagaatggatggtgcagtaacaagtgtcacaatcaaatccgagatactgcctgctagcctgcagtctgcaaccgccaggcctactagtcggctgaatagactgccggaactagagttggaagccatcgataatcagttcggccaacctggtacaggcgaccaaatcccttggacaaacaacaccgtgaccgcaatcaaccagagcaaatccgaggatcagtgcatctcctcccagcttgacgagctgctctgtcccccaaccactgttgagggccgtaacgatgagaaagcactccttgagcagctggtcagcttcctctcgggtaaagacgagacagagctggctgagttggacagggcacttggcatcgataagctcgtgcaaggcggaggattagacgtgctgtcagagcggtttcctccgcagcaggctacgcctccactgataatggaggagcgcccaaacctatactcacagccgtattcttccccaagtcctactgccaatctcccgagccctttccagggtatggtgaggcaaaagccatccctgggcaccatgccagtccaagtaactcctcccaggggggctttcagcccaggaatgggcatgcagcctaggcagacattgaatcgcccacctgccgctcccaatcagctacgtcttcagctgcagcagagactgcagggtcagcagcagctcattcaccagaaccggcaggccatcctcaaccagtttgctgccactgcacccgtaggcatcaacatgaggagcggaatgcaacagcagataaccccccagcctccacttaacgcccaaatgctggctcagaggcagagagagctatactcacagcagcatcgacagcgccagctgattcagcagcaacgagccatgctcatgcggcagcaatcattcggcaataacttgcctccaagtagtggcttgcctgtgcaaatggggaaccctaggctccctcagggtgccccacagcagttcccgtatccaccaaactacggaaccaatcctggcacacccccagcctcaacatctccatttagtcagttagcggcaaaccctgaagcatctctggccaataggaattcgatggtatccaggggcatgacaggaaacataggagggcaatttggcaccggtatcaaccctcagatgcagcagaatgtgttccagtacccgggagcagggatggttccacagggggaagcgaatttcgccccttcgctaagccccggatctagcatggtgcctatgccgattcctcccccacaaagctctctgttgcagcagacgccccctgcctccggatatcaatccccagacatgaaagcctggcaacagggtgctattggcaacaacaacgtcttcagccaggccgtgcaaaaccagcccactcccgcacagccaggtgtctacaacaacatgagtattaccgtgtctatggccggaggcaacaccaatgtccagaatatgaatcctatgatggcacagatgcagatgtccagtttgcaaatgcctggcatgaatactgtgtgtcccgagcagattaacgatccagctcttcggcatactggcctgtactgcaaccagctgtcatccactgacctgctcaagacagaagccgatggtacccaagacaaaaagacggaggaattttttagcgtggtgacgaccgattag

SEQ ID NO: 279192 - DNA, 4200 bp, Artificial Sequence
  derived and/or modified sequence
atgagcggcctgggcgacagcagcagcgaccccgccaaccccgacagccacaagagaaagggcagcccctgcgacaccctggccagcagcaccgagaagagaagaagagagcaggagaacaagtacctggaggagctggccgagctgctgagcgccaacatcagcgacatcgacagcctgagcgtgaagcccgacaagtgcaagatcctgaagaagaccgtggaccagatccagctgatgaagagaatggagcaggagaagagcaccaccgacgacgacgtgcagaagagcgacatcagcagcagcagccagggcgtgatcgagaaggagagcctgggccccctgctgctggaggccctggacggcttcttcttcgtggtgaactgcgagggcagaatcgtgttcgtgagcgagaacgtgaccagctacctgggctacaaccaggaggagctgatgaacaccagcgtgtacagcatcctgcacgtgggcgaccacgccgagttcgtgaagaacctgctgcccaagagcctggtgaacggcgtgccctggccccaggaggccaccagaagaaacagccacaccttcaactgcagaatgctgatccacccccccgacgagcccggcaccgagaaccaggaggcctgccagagatacgaggtgatgcagtgcttcaccgtgagccagcccaagagcatccaggaggacggcgaggacttccagagctgcctgatctgcatcgccagaagactgcccagaccccccgccatcaccggcgtggagagcttcatgaccaagcaggacaccaccggcaagatcatcagcatcgacaccagcagcctgagagccgccggcagaaccggctgggaggacctggtgagaaagtgcatctacgccttcttccagccccagggcagagagcccagctacgccagacagctgttccaggaggtgatgaccagaggcaccgccagcagccccagctacagattcatcctgaacgacggcaccatgctgagcgcccacaccaagtgcaagctgtgctacccccagagccccgacatgcagcccttcatcatgggcatccacatcatcgacagagagcacagcggcctgagcccccaggacgacaccaacagcggcatgagcatccccagagtgaaccccagcgtgaaccccagcatcagccccgcccacggcgtggccagaagcagcaccctgccccccagcaacagcaacatggtgagcaccagaatcaacagacagcagagcagcgacctgcacagcagcagccacagcaacagcagcaacagccagggcagcttcggctgcagccccggcagccagatcgtggccaacgtggccctgaaccagggccaggccagcagccagagcagcaaccccagcctgaacctgaacaacagccccatggagggcaccggcatcagcctggcccagttcatgagccccagaagacaggtgaccagcggcctggccaccagacccagaatgcccaacaacagcttcccccccaacatcagcaccctgagcagccccgtgggcatgaccagcagcgcctgcaacaacaacaacagaagctacagcaacatccccgtgaccagcctgcagggcatgaacgagggccccaacaacagcgtgggcttcagcgccagcagccccgtgctgagacagatgagcagccagaacagccccagcagactgaacatccagcccgccaaggccgagagcaaggacaacaaggagatcgccagcatcctgaacgagatgatccagagcgacaacagcagcagcgacggcaagcccctggacagcggcctgctgcacaacaacgacagactgagcgacggcgacagcaagtacagccagaccagccacaagctggtgcagctgctgaccaccaccgccgagcagcagctgagacacgccgacatcgacaccagctgcaaggacgtgctgagctgcaccggcaccagcaacagcgccagcgccaacagcagcggcggcagctgccccagcagccacagcagcctgaccgagagacacaagatcctgcacagactgctgcaggagggcagccccagcgacatcaccaccctgagcgtggagcccgacaagaaggacagcgccagcaccagcgtgagcgtgaccggccaggtgcagggcaacagcagcatcaagctggagctggacgccagcaagaagaaggagagcaaggaccaccagctgctgagatacctgctggacaaggacgagaaggacctgagaagcacccccaacctgagcctggacgacgtgaaggtgaaggtggagaagaaggagcagatggacccctgcaacaccaaccccacccccatgaccaagcccacccccgaggagatcaagctggaggcccagagccagttcaccgccgacctggaccagttcgaccagctgctgcccaccctggagaaggccgcccagctgcccggcctgtgcgagaccgacagaatggacggcgccgtgaccagcgtgaccatcaagagcgagatcctgcccgccagcctgcagagcgccaccgccagacccaccagcagactgaacagactgcccgagctggagctggaggccatcgacaaccagttcggccagcccggcaccggcgaccagatcccctggaccaacaacaccgtgaccgccatcaaccagagcaagagcgaggaccagtgcatcagcagccagctggacgagctgctgtgcccccccaccaccgtggagggcagaaacgacgagaaggccctgctggagcagctggtgagcttcctgagcggcaaggacgagaccgagctggccgagctggacagagccctgggcatcgacaagctggtgcagggcggcggcctggacgtgctgagcgagagattccccccccagcaggccaccccccccctgatcatggaggagagacccaacctgtacagccagccctacagcagccccagccccaccgccaacctgcccagccccttccagggcatggtgagacagaagcccagcctgggcaccatgcccgtgcaggtgaccccccccagaggcgccttcagccccggcatgggcatgcagcccagacagaccctgaacagaccccccgccgcccccaaccagctgagactgcagctgcagcagagactgcagggccagcagcagctgatccaccagaacagacaggccatcctgaaccagttcgccgccaccgcccccgtgggcatcaacatgagaagcggcatgcagcagcagatcaccccccagccccccctgaacgcccagatgctggcccagagacagagagagctgtacagccagcagcacagacagagacagctgatccagcagcagagagccatgctgatgagacagcagagcttcggcaacaacctgccccccagcagcggcctgcccgtgcagatgggcaaccccagactgccccagggcgccccccagcagttcccctacccccccaactacggcaccaaccccggcaccccccccgccagcaccagccccttcagccagctggccgccaaccccgaggccagcctggccaacagaaacagcatggtgagcagaggcatgaccggcaacatcggcggccagttcggcaccggcatcaacccccagatgcagcagaacgtgttccagtaccccggcgccggcatggtgccccagggcgaggccaacttcgcccccagcctgagccccggcagcagcatggtgcccatgcccatcccccccccccagagcagcctgctgcagcagaccccccccgccagcggctaccagagccccgacatgaaggcctggcagcagggcgccatcggcaacaacaacgtgttcagccaggccgtgcagaaccagcccacccccgcccagcccggcgtgtacaacaacatgagcatcaccgtgagcatggccggcggcaacaccaacgtgcagaacatgaaccccatgatggcccagatgcagatgagcagcctgcagatgcccggcatgaacaccgtgtgccccgagcagatcaacgaccccgccctgagacacaccggcctgtactgcaaccagctgagcagcaccgacctgctgaagaccgaggccgacggcacccaggacaagaagaccgaggagttcttcagcgtggtgaccaccgactag

SEQ ID NO: 279193 - protein, 139 aa, Artificial Sequence
  derived and/or modified sequence
MPSEYTYVKLRSDCSRPSLQWYTRAQSKMRRPSLLLKDILKCTLLVFGVWILYILKLNYTTEECDMKKMHYVDPDHVKRAQKYAQQVLQKECRPKFAKTSMALLFEHRYSVDLLPFVQKAPKDSEAESKYDPPFGFRKF

SEQ ID NO: 279194 - protein, 220 aa, Artificial Sequence
  derived and/or modified sequence
MRTKAAGCAERRPLQPRTEAAAAPAGRAMPSEYTYVKLRSDCSRPSLQWYTRAQSKMRRPSLLLKDILKCTLLVFGVWILYILKLNYTTEECDMKKMHYVDPDHVKTLSPCGWHCVQLIMARWTQPLLHRLLSDSADLHRAFKGSRALPAEAFSEPRHQHLQTESFLSLVLLPAFQAFLGYLRAPEGAALALRHFLLSCELWASSGGGREQLKQMPVQLT

SEQ ID NO: 279195 - DNA, 420 bp, Artificial Sequence
  derived and/or modified sequence
atgcccagcgagtacacctacgtgaagctgagaagcgactgcagcagacccagcctgcagtggtacaccagagcccagagcaagatgagaagacccagcctgctgctgaaggacatcctgaagtgcaccctgctggtgttcggcgtgtggatcctgtacatcctgaagctgaactacaccaccgaggagtgcgacatgaagaagatgcactacgtggaccccgaccacgtgaagagagcccagaagtacgcccagcaggtgctgcagaaggagtgcagacccaagttcgccaagaccagcatggccctgctgttcgagcacagatacagcgtggacctgctgcccttcgtgcagaaggcccccaaggacagcgaggccgagagcaagtacgacccccccttcggcttcagaaagttctag

SEQ ID NO: 279196 - DNA, 663 bp, Artificial Sequence
  derived and/or modified sequence
atgagaaccaaggccgccggctgcgccgagagaagacccctgcagcccagaaccgaggccgccgccgcccccgccggcagagccatgcccagcgagtacacctacgtgaagctgagaagcgactgcagcagacccagcctgcagtggtacaccagagcccagagcaagatgagaagacccagcctgctgctgaaggacatcctgaagtgcaccctgctggtgttcggcgtgtggatcctgtacatcctgaagctgaactacaccaccgaggagtgcgacatgaagaagatgcactacgtggaccccgaccacgtgaagaccctgagcccctgcggctggcactgcgtgcagctgatcatggccagatggacccagcccctgctgcacagactgctgagcgacagcgccgacctgcacagagccttcaagggcagcagagccctgcccgccgaggccttcagcgagcccagacaccagcacctgcagaccgagagcttcctgagcctggtgctgctgcccgccttccaggccttcctgggctacctgagagcccccgagggcgccgccctggccctgagacacttcctgctgagctgcgagctgtgggccagcagcggcggcggcagagagcagctgaagcagatgcccgtgcagctgacctag

SEQ ID NO: 279197 - DNA, 420 bp, Artificial Sequence
  derived and/or modified sequence
atgccctctgagtatacgtacgttaagttgcggtcagattgtagtcgaccaagtctgcaatggtacactagggctcagtcgaagatgagaaggccctctctgctgcttaaagatatcctgaagtgcactcttttagtgttcggggtgtggatactctatatccttaagcttaattacactacagaggagtgcgacatgaaaaaaatgcactatgtcgatccggaccacgtgaagcgagcccaaaaatacgcccagcaggtgttacagaaagagtgtagacccaaattcgccaaaacatccatggcccttttatttgagcatagatattccgtggacctactgcccttcgtccaaaaggctcctaaggattcggaggcagaatcaaaatatgacccacccttcggcttccgcaagttttag

SEQ ID NO: 279198 - DNA, 663 bp, Artificial Sequence
  derived and/or modified sequence
atgcggacaaaagcggctggttgtgctgaacgtcgcccactccagccccgtaccgaggccgcagccgcaccagctggacgggccatgcccagcgagtatacttatgttaagttgagatccgactgcagcagaccttccctgcagtggtataccagggcccagtcaaaaatgcgacggccttcgctcctgctcaaggacatcctgaaatgcacactgctggtctttggcgtctggatcttgtacatactgaaactgaactacaccactgaagaatgtgatatgaagaagatgcattatgtcgatcctgaccacgtcaagacactttccccatgtggttggcattgcgtacaactgataatggctaggtggactcagccactgctccaccgactgctgagcgattctgctgatctgcatagagcatttaagggatcgagagctctgcccgcagaggcattcagcgaaccgcgacatcaacatctccagaccgaatcattcctctcactggtcttgttgccggcctttcaggccttcctgggatatctgagagcgccggagggcgcagccctggcactccggcactttctgttgtcttgtgaactgtgggcctcttccggaggaggacgcgagcagctcaagcagatgccagtgcagctgacctag

SEQ ID NO: 279199 - DNA, 420 bp, Artificial Sequence
  derived and/or modified sequence
atgcccagcgagtacacctacgtgaagctgcggagtgactgcagccggcccagcctgcagtggtacacccgggcccagagcaagatgaggcggcccagcctgctgctgaaggacatcctgaagtgcaccctgctggtgtttggagtgtggatcctgtacatcctgaagctgaactacaccacagaagaatgtgacatgaagaagatgcactacgtggaccctgaccacgtgaagagggcccagaagtatgcccagcaggtgctgcagaaggaatgtcggcccaagtttgccaagacctccatggccctgctgtttgagcaccgctacagcgtggacctgctgccctttgtgcagaaggcccccaaggacagcgaggccgagagcaaatatgacccccccttcggcttcaggaagttctag

SEQ ID NO: 279200 - DNA, 663 bp, Artificial Sequence
  derived and/or modified sequence
atgaggaccaaggccgccggctgtgccgagcggcggcccctgcagcccaggacagaggccgccgccgccccagctggccgggccatgcccagcgagtacacctacgtgaagctgcggagtgactgcagccggcccagcctgcagtggtacacccgggcccagagcaagatgaggcggcccagcctgctgctgaaggacatcctgaagtgcaccctgctggtgtttggagtgtggatcctgtacatcctgaagctgaactacaccacagaagaatgtgacatgaagaagatgcactacgtggaccctgaccacgtgaagaccctgagcccctgtggctggcactgtgtgcagctgatcatggcccgctggacccagcccctgctgcaccggctgctgagtgacagcgctgacctgcaccgggccttcaagggcagccgggccctgcctgctgaggccttcagcgagcccaggcaccagcacctgcagacagagagcttcctgagcctggtgctgctgcctgccttccaggccttcctgggctacctgcgggcccctgagggcgccgccctggccctgcggcacttcctgctgagctgtgagctgtgggccagcagcggcggcggccgggagcagctgaagcagatgcctgtgcagctgacctag

SEQ ID NO: 279201 - DNA, 420 bp, Artificial Sequence
  derived and/or modified sequence
atgcccagcgagtacacctacgtgaagctgcggagcgactgcagcaggccctcactccagtggtatacaagggctcaaagcaagatgaggagaccatcgctgttgctgaaagatatcttgaagtgcaccctgttggtattcggcgtgtggattctgtacattctcaagctaaattataccactgaggagtgcgatatgaaaaaaatgcattacgttgacccagaccatgttaagagagcgcagaagtacgcccaacaggttctccagaaggaatgccgcccgaaattcgcaaaaacttccatggccctcctgtttgaacaccgatacagtgtggacctgctgccctttgtgcaaaaggctcctaaagactctgaggctgagagcaaatacgaccccccattcggatttcgcaaattttag

SEQ ID NO: 279202 - DNA, 663 bp, Artificial Sequence
  derived and/or modified sequence
atgcggaccaaggccgccggctgcgccgagcggcggcccctgcagccccggaccgaggccgccgctgcacccgctggcagggcaatgcccagcgagtatacatacgtcaaactgagatccgactgtagccggccatccctgcagtggtacacaagggcacagtctaagatgcgccgcccctctctcctactcaaggacatcttaaaatgtactctcttggttttcggagtgtggattctctacatcctcaagctgaattacaccactgaagagtgcgacatgaagaagatgcactacgtggaccccgaccacgtaaagacactgtccccatgtggatggcattgtgttcaactgattatggcccgatggacccaacccttattacacaggctattgtctgactctgctgacctgcacagagccttcaaggggagcagagctctgccggccgaagcattttccgaacctcggcatcagcatctccagaccgaatctttcctaagcttagttttacttcccgcgtttcaggcatttctagggtacctcagggcacctgagggagcggccttggcactgcgacatttcctgctgtcatgcgagctctgggcttcttcaggcggaggccgagagcagttaaagcaaatgccggtgcagctgacatag

SEQ ID NO: 279203 - DNA, 420 bp, Artificial Sequence
  derived and/or modified sequence
atgcccagcgaatatacgtacgtcaagctacgctctgattgcagtcgccctagcttacagtggtatacccgagcacaatccaagatgcggcgaccctccctgcttctcaaagatattctgaagtgcactttgctggtcttcggcgtttggatcctctacatactcaaactgaattatacgaccgaggagtgcgatatgaaaaagatgcattatgtcgatccagatcatgtgaagagggcacagaagtacgctcagcaggtgctgcagaaagaatgccggcctaagttcgcgaagacttccatggctctgctttttgaacatcggtactctgtagatttgctgccgtttgtgcaaaaagcccctaaagatagcgaagcggaatcaaaatatgatcctcccttcgggtttcggaagttttag

SEQ ID NO: 279204 - DNA, 663 bp, Artificial Sequence
  derived and/or modified sequence
atgagaaccaaggccgctggctgcgctgagcggaggcctcttcagccaagaactgaagccgcagcagccccagcagggcgtgcgatgccttcagagtatacctacgtcaagttgcggtctgactgctcccgcccatccctgcagtggtacacgcgtgcccaaagtaagatgagacgaccaagccttctgctcaaggacattttgaagtgtaccctccttgtgttcggtgtgtggatactttacatcctgaagttgaactatacaaccgaggaatgtgatatgaagaagatgcactatgtggacccggatcacgttaagaccctcagcccatgcgggtggcactgcgtgcagctgatcatggccagatggactcagccattactccatcgcctactttccgactcagccgatcttcaccgagccttcaaaggctcccgagctcttcccgctgaggctttcagcgagccaaggcaccaacaccttcagacagagtcttttcttagtttggtgttactccccgcattccaggcctttctgggatatctaagagccccagagggggctgctttggccttaaggcatttcctactgtcatgcgagctgtgggcctcaagtggcggaggcagggaacagctgaaacagatgccagtgcaattgacttag

SEQ ID NO: 279205 - DNA, 530 bp, Artificial Sequence
  derived and/or modified sequence
gtgatgtggggccgctggtagaaatttgccggtgaccttccctgcaccctctctgcagccagccttgcggagaagacaggttttggcgaccttttgatttcttctgaattcaatgccaagtgagtacacctatgtgaaactgagaagtgattgctcgaggccttccctgcaatggtacacccgagctcaaagcaagatgagaaggcccagcttgttattaaaagacatcctcaaatgtacattgcttgtgtttggagtgtggatcctttatatcctcaagttaaattatactactgaagaatgtgacatgaaaaaaatgcattatgtggaccctgaccatgtaaagagagctcagaaatatgctcagcaagtcttgcagaaggaatgtcgtcccaagtttgccaagacatcaatggcgctgttatttgagcacaggtatagcgtggacttactcccttttgtgcagaaggcccccaaagacagtgaagctgagtccaagtacgatcctccttttgggttccggaagttct

SEQ ID NO: 279206 - DNA, 989 bp, Artificial Sequence
  derived and/or modified sequence
agtatgcggacgaaggcggcgggctgcgcggagcggcgtcccctgcagccgcggaccgaggcagcggcggcacctgccggccgagcaatgccaagtgagtacacctatgtgaaactgagaagtgattgctcgaggccttccctgcaatggtacacccgagctcaaagcaagatgagaaggcccagcttgttattaaaagacatcctcaaatgtacattgcttgtgtttggagtgtggatcctttatatcctcaagttaaattatactactgaagaatgtgacatgaaaaaaatgcattatgtggaccctgaccatgtaaagaccttatctccctgcggatggcattgcgtgcagttaattatggccagatggactcagccgcttcttcatcgtcttctctcggactctgcagacctacaccgtgcctttaaaggaagcagggccctccctgctgaagcattcagtgagcccaggcaccagcatcttcaaaccgagtcttttctctccttagtgctgctccccgctttccaggccttcctgggatatcttagagctcctgaaggtgcggcactcgccttgaggcactttcttctgagctgtgagctatgggcaagcagtggagggggaagagagcagctgaagcagatgccggttcaacttacttaaagatgtgggacaagctctgaggaagcccccaagacaatgatgtctggttgtgcaccattgaagcaagaacagaaaccatcccagagtggaggacatggcccatgtggtcctcctgttctgagtggctatgagatggagttctgtgtgagctctctacagaaaaagccctgtctccaggcaatcagtggagatctgttaaacgagttgaaacaaaagaggacaaggaattgctgtggctttagacgttgccaggacatgtagaaactcactcaggatttactactgcatccactgtcacttaggcgcaggaggggtcacagtca

SEQ ID NO: 279207 - protein, 173 aa, Artificial Sequence
  derived and/or modified sequence
MGSHSPSHFLVHGWILSMMFPEEEEAEEAAAEPESYLDLPKQISEKTTKRILMLLCDESGFLIESKLLSLLLPLEQNECYLLRLDAIFSALGIESEDDLYKLVNFFLKYRAHRLSSSLQIKPCSQASMEKASMEETSTRSELELAEQTEMEGEKEESLVEGEKEEEEETPPSP

SEQ ID NO: 279208 - DNA, 522 bp, Artificial Sequence
  derived and/or modified sequence
atgggcagccacagccccagccacttcctggtgcacggctggatcctgagcatgatgttccccgaggaggaggaggccgaggaggccgccgccgagcccgagagctacctggacctgcccaagcagatcagcgagaagaccaccaagagaatcctgatgctgctgtgcgacgagagcggcttcctgatcgagagcaagctgctgagcctgctgctgcccctggagcagaacgagtgctacctgctgagactggacgccatcttcagcgccctgggcatcgagagcgaggacgacctgtacaagctggtgaacttcttcctgaagtacagagcccacagactgagcagcagcctgcagatcaagccctgcagccaggccagcatggagaaggccagcatggaggagaccagcaccagaagcgagctggagctggccgagcagaccgagatggagggcgagaaggaggagagcctggtggagggcgagaaggaggaggaggaggagaccccccccagcccctag

SEQ ID NO: 279209 - DNA, 582 bp, Artificial Sequence
  derived and/or modified sequence
aatctgttgcaggtttagagactatatagccacttgctagatcatctctgaaataagaataaatgggctcacactctccctcccacttcctggttcatggctggattttgagtatgatgtttccagaagaggaggaggcagaagaggccgccgcggaaccagagtcctacctggatttgccgaagcaaatttctgaaaaaactaccaagaggatcctgatgctcctgtgtgacgagtcggggttcctcatagagagcaagctgctgagccttctcctgcccctggagcagaatgaatgctatctgctgaggctggatgccatcttctccgcccttggaattgaaagtgaggatgacttgtataaactggtgaacttcttccttaaatatcgagctcaccgtttatcttccagcctccagatcaagccctgcagtcaggcgagcatggagaaggcgagcatggaggagacaagcacgaggtcagaattggagctggcagagcagacggagatggagggagaaaaggaagaaagcctggtggaaggggagaaggaagaagaggaggagaccccaccctccccct

SEQ ID NO: 279210 - DNA, 522 bp, Artificial Sequence
  derived and/or modified sequence
atgggctcccacagcccctctcactttcttgtgcatggatggattctcagcatgatgttccccgaggaggaagaagcagaagaggcggcagccgagcccgaatcatacctcgacctacctaagcagatttcggaaaaaacgactaagcgtatcttaatgttgctttgcgatgaatcgggtttcctgatcgagagcaagttactgagcttgcttcttccactcgaacaaaacgaatgctacctgctacggctggacgctatcttcagtgctctaggtatcgaaagcgaggacgatctgtataagcttgtgaacttttttctcaagtaccgcgctcatcggttatcctccagccttcagatcaaaccctgtagtcaggcttccatggagaaagcatccatggaagaaacctcaacacgctctgaactggaactagctgagcaaacagaaatggagggcgaaaaggaagagtctctcgttgagggcgaaaaagaggaggaagaggagactcctccaagcccatag

SEQ ID NO: 279211 - DNA, 522 bp, Artificial Sequence
  derived and/or modified sequence
atgggcagccacagccccagccacttcctggtgcacggctggatcctgtccatgatgtttcctgaggaggaggaggccgaggaggccgctgctgagcctgagagctacctggacctgcccaagcagatcagcgagaagaccaccaagaggatcctgatgctgctgtgtgatgaaagtggcttcctgattgagagcaagctgctgagcctgctgctgcccctggagcagaatgaatgctacctgctgcggctggatgccatcttcagcgccctgggcattgaaagtgaagatgacctgtacaagctggtgaacttcttcctgaagtaccgggcccaccggctgagcagcagcctgcagatcaagccctgcagccaggcctccatggagaaggcctccatggaggagaccagcaccaggtctgagctggagctggccgagcagacagagatggagggggagaaggaggagagcctggtggagggggagaaggaggaggaggaggagaccccacccagcccctag

SEQ ID NO: 279212 - DNA, 522 bp, Artificial Sequence
  derived and/or modified sequence
atgggcagccacagccccagccacttcctggtgcacggctggatcctctctatgatgttccccgaggaggaagaagcggaggaagccgcagccgaacctgagtcctatctggacctgcccaaacagatctctgagaaaacaacgaagagaatccttatgctgctgtgcgatgaatcaggctttctgatcgaatcaaagctactctctctgctgctgcctttagagcagaatgaatgctacctcctgcgtcttgacgctattttttcggcactgggaattgaaagcgaggatgatctgtacaaacttgtaaacttctttcttaagtacagagcccatcgtctttcttccagcttacagatcaaaccttgttcgcaagcctctatggaaaaagcctccatggaagagacttctaccagatccgagcttgaactggctgagcagacagagatggagggcgagaaggaagaatccctggttgagggggagaaggaggaggaagaagaaactcctccatctccatag

SEQ ID NO: 279213 - DNA, 522 bp, Artificial Sequence
  derived and/or modified sequence
atgggctcccattccccatcccacttccttgttcacgggtggatccttagcatgatgtttcccgaagaagaggaggccgaggaagctgccgctgagcccgagagttatttggacctgcccaagcagatctctgaaaagactactaagaggatcctcatgttgctgtgcgatgagagcggcttcttgattgagtccaagctcctgtccctcctgctgcctttagagcagaacgagtgctacctactgcgtctggatgccatttttagtgcccttggaatagaatccgaggatgatctttataaacttgtgaacttctttctgaaatacagagcccaccggctgagttcatcactgcagatcaaaccatgctcacaagcctcaatggaaaaggcctcaatggaggagacgtcaacccgctccgagcttgagttggctgaacagaccgagatggagggggagaaggaagagtctctggtagaaggggagaaagaggaggaggaggagaccccgccttctccctag

SEQ ID NO: 279214 - DNA, 3693 bp, Artificial Sequence
  derived and/or modified sequence
atgatcaagaccgagaagtcatatccagagcgaagacttcgcggagtgttggaagagttatcttgtggctgttgccgattcctctccctggccgataaggaccaaggtcactcgagccggacccgcctggaccgcgaacgcctgaagagctgcatgcgagagctggagaacatgggacagcaggccagaatgttgcgtgcacaggtaaagagacacaccgtgagggacaaactccgtctgtgccagaattttctccaaaagctccgatttctggctgatgagcctcagcactccattccagatatctttatttggatgatgagtaataataagagggtggcatacgcgcgggtcccatccaaggatctacttttttccatagttgaagaggagacaggtaaagattgcgccaaggtgaagaccctgttcctcaaactgcccggcaagcgagggttcgggagcgcaggatggactgtccaggccaaggtcgaattatatctctggttaggtctcagtaagcaaagaaaggagttcctctgtgggctgccttgcggattccaagaagtgaaggctgcacaggggctgggcctccacgcattcccaccggtgtcactggtgtatactaaaaaacaagcgttccagctccgcgcgcatatgtatcaagctcgatctctgttcgctgccgattcttccggtttgtctgatccttttgctagagtcttcttcataaatcagtcccagtgtaccgaggtacttaatgaaaccctctgccccacctgggatcagatgttggtgttcgacaacctcgaattgtacggagaagctcatgagcttcgagatgatcctccaatcatcgttattgaaatctatgatcaggacagcatgggaaaagctgacttcatgggtaggacctttgcaaagcccttagtaaaaatggcagacgaggcgtattgcccacctcggttcccgccccaactggaatattaccaaatctacaggggcaacgcaaccgccggagacctccttgcagcgtttgagctgttgcaaatcggcccagccggtaaggccgaccttcctcccattaacggtccagtagatgtggatcgcggtccgattatgccagtgcctatgggcatacgccccgtgttgtctaagtatcgtgtcgaggtgctattctgggggttaagggatctgaaacgagtcaacttagcacaggtggatcgcccaagagtggacatcgagtgcgcggggaaaggcgtgcagtcgagcctcatccacaattacaaaaagaaccctaactttaataccctcgtcaaatggttcgaagtcgatctgccagagaacgagcttcttcatccccccttgaacatccgtgtggtggattgtcgggcctttggtaggtatacacttgtcggctcacatgctgtctcctcactgcgccgattcatttacagacccccagataggagcgctccctcctggaatactaccggggaggtggttgttactatggagcctgaagtgcccataaaaaaactggagactatggtaaagcttgacgccacatcagaggcagtggtgaaggtggatgtggcggaggaggaaaaggagaagaagaaaaaaaagaaaggaaccgctgaggaacctgaagaggaggagccggacgaatccatgctggattggtggagcaagtactttgcctctatagacactatgaaagaacaactgcggcagcaggagccatctggcatcgatctcgaggagaaggaagaggtcgataatacagaggggctgaagggcagcatgaaggggaaggaaaaagcacgggccgcaaaagaggaaaaaaagaagaaaactcagtccagtgggagcggccaaggctctgaggcccccgagaaaaaaaagcccaagattgacgagttaaaagtctatccaaaagaacttgaatccgaattcgacaacttcgaggattggctccatactttcaacctactgagaggcaaaactggagacgatgaagacggcagcactgaagaggagaggattgtcgggcggttcaaaggttccctctgcgtgtataaagtaccactgcccgaagacgtatcccgcgaggcaggctacgacagtacatatggcatgtttcagggcataccatccaacgaccccatcaatgtgctggtgagagtgtacgtggtgcgtgcgacagatctgcaccctgccgacattaatggcaaagctgatccttatattgcgatcaggttgggtaaaacagacatccgagacaaggaaaattacatcagtaagcagttaaaccctgtcttcggaaaatcatttgacatcgaggcaagtttcccgatggaatcaatgcttactgtggccgtgtatgattgggacctggtcggaactgatgatctcattggcgagaccaagatcgacctggaaaaccggttttacagcaagcaccgagccacgtgtggaattgcacaaacctactctactcacggttataatatatggcgcgatcctatgaaaccatctcagatcctcaccagactctgcaaggatgggaaggtggacggcccccactttggtcccccaggccgggtcaaagtggccaatcgcgtgtttacgggcccatctgaaatcgaggatgagaacggtcagagaaagccgactgacgagcatgtggctctgcttgccttgagacattgggaggacatcccgagggccgggtgtcggctcgtacccgaacatgtggagacccggcccttgctgaatccagataagccggggatagagcagggcagactagagctgtgggtggatatgtttcccatggacatgcctgctccgggcacaccacttgatataagcccccgcaaaccgaaaaagtatgagctcagagttatcatctggaatacagatgaagtcgtattggaggacgatgacttttttaccggcgaaaagtcgagcgatattttcgtccgggggtggttaaaaggacagcaggaggacaagcaggatacagacgtgcactaccattccctaacaggtgaaggtaatttcaactggcgttacctatttccatttgattacttagctgctgaggaaaagattgtgatctccaaaaaggagtcgatgttctcctgggacgagaccgagtataaaatcccagcccgactgacattgcagatttgggatgccgatcacttcagtgcagatgatttcctgggcgccatcgaattggacttaaataggttcccgcggggggctaagaccgcgaagcagtgcacaatggaaatggctactggcgaagtcgacgtccccttggtgagcattttcaaacagaagcgagtcaaaggatggtggccgctgcttgcaagaaacgagaacgacgagttcgaattgacaggcaaggtggaagccgagcttcatttgcttacagccgaagaggccgagaagaatcccgtcggattggcccgaaatgagcccgacccgctggagaaacccaaccggcctgatactgcgtttgtttggttcttgaacccgctgaaatccataaagtatctgatctgtactcgttacaaatggctcattatcaagattgtcctggccctgttagggctgctgatgttgggcctgtttctctattcgctccccgggtacatggtcaagaagctgttgggagcatag

SEQ ID NO: 279215 - DNA, 3693 bp, Artificial Sequence
  derived and/or modified sequence
atgatcaagacagagaagagctacccagagcggcggctgcggggcgtgctggaggagctgagctgtggctgctgccgcttcctgagcctggccgacaaggaccagggccacagcagcaggacccggctggaccgggagcggctgaagagctgcatgagggagctggagaacatgggccagcaggccaggatgctgcgggcccaggtgaagaggcacacagtgcgggacaagctgcggctgtgccagaacttcctgcagaagctgcgcttcctggctgatgagccccagcacagcatcccagacatcttcatctggatgatgagcaacaacaagagggtggcctatgcccgggtgcccagcaaggacctgctcttcagcatcgtggaggaggagaccgggaaggactgtgccaaggtgaagaccctcttcctgaagctgcccgggaagaggggcttcggcagcgctggctggacagtgcaggccaaggtggagctgtacctgtggctgggcctgagcaagcagaggaaggagttcctgtgtggcctgccctgtggcttccaggaggtgaaggccgcccagggcctgggcctgcacgccttcccccctgtgtccctggtgtacaccaagaagcaggccttccagctgcgggcccacatgtaccaggcccggagcctgtttgctgctgacagcagcggcctgagtgacccctttgcccgggtcttcttcatcaaccagagccagtgcacagaggtgctgaatgagaccctgtgccccacctgggaccagatgctggtgtttgacaacctggagctgtatggagaggcccacgagctgagagatgacccccccatcatcgtgattgagatctatgaccaggacagcatgggcaaggctgacttcatgggccgcacctttgccaagcccctggtgaagatggctgatgaggcctactgccccccacgcttccccccccagctggagtactaccagatctacagaggaaatgccacagctggggacctgctggccgcctttgagctgctgcagatcggccctgctgggaaggctgacctgccccccatcaatggacctgtggatgtggaccggggccccatcatgcctgtgcccatgggcatccggcctgtgctgagcaagtacagagtggaggtgctcttctggggcctgcgggacctgaagagggtgaacctggcccaggtggaccggccccgggtggacattgaatgtgccggcaagggcgtgcagagcagcctcatccacaactacaagaagaaccccaacttcaacaccctggtgaagtggtttgaggtggacctgcctgaaaatgagctgctgcacccccccctgaacatccgggtggtggactgccgggccttcggccgctacaccctggtgggcagccatgctgtgagcagcctgcggcgcttcatctaccggcccccagacagaagtgcccccagctggaacaccactggagaggtggtggtgaccatggagcctgaggtgcccatcaagaagctggagaccatggtgaagctggatgccaccagcgaggccgtggtgaaggtggatgtggccgaggaggagaaggagaagaagaagaagaagaagggcacagctgaggagcctgaggaggaggagccagatgagagcatgctggactggtggagcaagtactttgccagcattgacaccatgaaggagcagctgcggcagcaggagcccagcggcatcgacctggaggagaaggaggaggtggacaacacagagggcctgaagggctccatgaagggcaaggagaaggcccgggccgccaaggaggagaagaagaagaagacccagagcagcggcagcggccagggcagcgaggcccctgagaagaagaagcccaagattgatgagctgaaggtgtaccccaaggagctggagagcgagtttgacaactttgaggactggctgcacaccttcaacctgctgcggggcaagacaggagatgatgaagatggcagcacagaggaggagcgcatcgtgggccgcttcaagggcagcctgtgtgtgtacaaggtgcccctgcctgaagatgtgtcccgggaggccggctatgacagcacctacggcatgttccagggcatccccagcaatgaccccatcaacgtgctggtgcgggtgtatgtggtgcgggccacagacctgcaccctgctgacatcaatggcaaggctgacccctacatcgccatccggctgggcaagacagacatccgggacaaggagaactacatcagcaagcagctgaaccctgtgtttgggaagagctttgacatcgaggccagcttccccatggagagcatgctgactgtggccgtgtatgactgggacctggtgggcacagatgacctgattggagagaccaagattgacctggagaaccgcttctacagcaagcaccgggccacctgtggcatcgcccagacctacagcacccacggctacaacatctggagggaccccatgaagcccagccagatcctgacccggctgtgcaaggatggcaaggtggatggcccccactttggacctcctggccgggtgaaggtggccaacagagtcttcaccggccccagcgagattgaagatgaaaatggccagaggaagcccacagatgaacatgtggccctgctggccctgcggcactgggaggacatcccccgggccggctgccgcctggtgcctgagcacgtggagacccggcccctgctgaacccagacaagccaggcatcgagcagggccgcctggagctgtgggtggacatgttccccatggacatgcctgcccctggcacccccctggacatcagccccaggaagcccaagaagtatgagctgcgggtcatcatctggaacacagatgaggtggtgctggaggatgatgacttcttcaccggggagaagagcagtgacatctttgtgcggggctggctgaagggccagcaggaggacaagcaggacacagatgtgcactaccacagcctgactggagagggcaacttcaactggagatacctgttcccctttgactacctggccgctgaggagaagatcgtcatcagcaagaaggagagcatgttctcctgggatgaaacagagtacaagatcccagcccggctgaccctgcagatctgggatgctgaccacttcagcgcagatgacttcctgggcgccatcgagctggacctgaaccgcttccccaggggggccaagacagccaagcagtgcaccatggagatggccactggagaggtggatgtgcccctggtgtccatcttcaagcagaagagggtgaagggctggtggcccctgctggccagaaatgaaaatgatgaatttgagctgaccgggaaggtggaggccgagctgcacctgctgacagctgaggaggccgagaagaaccctgtgggcctggccagaaatgaaccagaccccctggagaagcccaacagaccagacacagcctttgtgtggttcctgaaccccctgaagagcatcaagtacctgatctgcacccgctacaagtggctgatcatcaagatcgtgctggccctgctgggcctgctgatgctgggcctcttcctgtacagcctgcccggctacatggtgaagaagctgctgggcgcctag

SEQ ID NO: 279216 - DNA, 3693 bp, Artificial Sequence
  derived and/or modified sequence
atgatcaagaccgagaagagctaccccgagcggcggctgcggggcgtccttgaagagctttcttgcggatgctgcaggttcttgtcgctggctgacaaggaccaggggcactcctcaagaaccagactggatagagagcgactcaaatcttgcatgagggaactggagaacatggggcagcaggcacggatgctgcgtgctcaggtgaagcgccacacagtccgggacaagctcagactctgccaaaacttcctgcagaaactacgattcctggctgacgaacctcagcatagtatacccgacatattcatctggatgatgagtaataacaagcgcgtggcatatgcacgcgtgcctagcaaggatctgctgttttccatcgtagaagaagagaccggcaaagactgcgctaaagttaagaccctttttctcaagctgcctggaaaaaggggttttggatcagccgggtggactgtgcaggctaaggtagaattgtatctctggctcggattaagcaagcagcggaaggagttcctttgtggcttgccttgtggattccaggaagtgaaggccgctcaagggctgggcctgcacgcttttccccctgtatccctggtgtacaccaagaaacaggccttccagctgcgcgcccacatgtaccaggcacgtagtctgttcgcagccgactcttctggactgagcgatccatttgcacgcgttttttttattaatcaatcccaatgcacggaagtgctgaatgaaactctctgtcccacctgggatcaaatgctggtgttcgataatctggagttgtacggtgaagcccacgaattgagagatgatccaccaatcatcgtgattgagatatacgatcaggactcaatggggaaggccgatttcatgggtcgtacatttgctaagccgttagtaaagatggcggatgaagcctattgtcctcctagattcccaccacagcttgagtactatcagatctatcgcggcaatgccacagccggggatctgctggctgccttcgaactgctgcagatcgggcctgccggcaaggctgatctaccgccgatcaacggtcccgttgacgttgaccgcggcccaattatgcctgtgcctatgggtatccggccagtgctgagcaagtacagagtggaggtcctcttctggggactgcgggacttgaagagagtgaatctcgcccaagttgacaggccacgggtcgatattgaatgcgccggtaagggggtccagtccagtcttatccataattacaagaagaacccgaactttaacactttagtgaagtggtttgaagtagacctcccggaaaatgagctgcttcacccgcccctgaatattagagtcgtcgactgcagagccttcggcagatacacgctcgtcggctcccatgccgtttcatcgctgcgccgatttatatatcgcccccctgatcggtcggccccaagctggaacaccacaggcgaggtggtcgtgacaatggagccagaggtcccgattaaaaagctggagaccatggtcaaactagacgccacatccgaagcagtcgttaaggtcgatgtcgccgaggaagagaaagagaagaagaagaagaagaagggcaccgccgaagaacccgaggaagaggagccagacgaatcaatgttggattggtggtccaaatacttcgcctccattgacaccatgaaagagcaactccggcagcaggaaccgtctgggatcgacctggaggagaaggaggaggtcgataatacagagggcctgaaaggctctatgaagggaaaagaaaaggcccgtgccgccaaggaggaaaagaaaaagaagacacaatcgtccggctccgggcaaggttcagaagcaccggaaaaaaagaaacccaagattgacgagctgaaagtgtatcccaaggagctggaaagcgagttcgacaatttcgaagactggctccatacattcaatctattaaggggcaagacgggtgacgacgaagacggtagtacagaggaggagcgaatcgttggccggttcaaaggcagcctctgcgtctacaaagtgcctctgcctgaggatgtctctcgggaggccggctatgattctacttacgggatgttccaaggcattccgagcaatgatcccattaacgtgctggttcgagtgtacgttgttcgcgccaccgatcttcacccagcagacatcaacggcaaggcagacccctacatcgcaatacgcctaggcaagacagatattcgtgataaggaaaattacatttcaaagcagctcaacccagtgttcgggaagagcttcgatatcgaagccagcttcccaatggaatccatgctgactgtggccgtttatgattgggacctggtcggaacggatgacctcataggggaaacaaagatcgacttggaaaaccgtttttattccaagcatcgggccacttgtggcattgctcaaacttatagtacccacggctacaatatatggagggatccgatgaagccatcccagatcctcactcggctttgcaaggacggaaaggtggatggcccacatttcgggcctccaggccgggtgaaggtcgcaaacagggtgtttaccgggccgtcggagattgaagacgagaatggacagcgtaaacctaccgacgagcacgttgccctgctagccctgagacactgggaggatattcctagggccggctgcaggctggtgcctgagcatgtggaaacacgccctttgctcaacccggacaagccaggtattgagcaggggcggctggaactatgggtggacatgtttccaatggacatgcccgctccgggaaccccattagacatctcgccccgcaagcctaagaaatacgagctaagagtgattatttggaatacggatgaggtagtcctcgaggacgacgatttttttactggggagaagagttcagatatcttcgtacgcggctggttgaagggacagcaggaggacaaacaggatactgatgttcactaccattccctgacaggtgagggcaacttcaactggcgctatctgttccccttcgactacctggctgcagaggaaaaaatcgtgatttctaaaaaagagagcatgttctcatgggatgagactgagtacaagatcccagcccggctgacgctccagatctgggatgccgatcacttctctgccgacgacttcttgggggccattgagctcgaccttaaccgatttccaagaggggctaaaaccgccaagcagtgtaccatggagatggccaccggcgaggtggatgtgcctctggtgtccatcttcaaacagaaacgggtgaagggatggtggccactgctcgcaagaaatgagaacgacgagttcgagctgacagggaaagtggaggccgagctgcatctcctaaccgccgaggaggcagagaaaaacccggtcgggcttgccaggaacgaacctgatcctctggagaaacctaaccgccctgacaccgcctttgtttggttccttaaccctctgaaaagcatcaagtacctgatttgcactcggtataaatggctcattataaagattgtactggcgttgctgggactgctgatgctcggactcttcctatactctcttccaggctacatggttaagaaacttcttggggcttag

SEQ ID NO: 279217 - DNA, 4756 bp, Artificial Sequence
  derived and/or modified sequence
ccgtgagttctgcccaggccctgtgagctcaccagagccacagactcacagcccagaggtggcttcttccttcaggaactgaagaacccccatgaacaccaacatctccaggttctgagaacagaacctgggaaattgatgacttcctcatgatgaccgatactcaggatggccctagcgagagctcccagatcatgaggaagaaggcctgaacgacatacaggagatgatcaaaacggagaagtcctaccctgagcgtcgcctgcggggcgtcctggaggagctgagctgtggctgctgccgcttcctctccctcgctgacaaggaccagggccactcatcccgcaccaggcttgaccgggagcgcctcaagtcctgcatgagggagctggaaaacatggggcagcaggccaggatgctgcgggcccaggtgaagcggcacacggtgcgggacaagctgaggctgtgccagaacttcctgcagaagctgcgcttcctggcggacgagccccagcacagcattcccgacatcttcatctggatgatgagcaacaacaagcgtgtcgcctatgcccgtgtgccctccaaggacctgctcttctccatcgtggaggaggagactggcaaggactgcgccaaggtcaagacgctcttccttaagctgccagggaagcggggcttcggctcggcaggctggacagtgcaggccaaggtggagctgtacctgtggctgggcctcagcaaacagcgcaaggagttcctgtgcggcctgccctgtggcttccaggaggtcaaggcagcccagggcctgggcctgcatgccttcccacccgtcagcctggtctacaccaagaagcaggcgttccagctccgagcgcacatgtaccaggcccgcagcctctttgccgccgacagcagcggactctcagacccctttgcccgcgtcttcttcatcaatcagagtcagtgcacagaggtgctgaatgagaccctgtgtcccacctgggaccagatgctggtgttcgacaacctggagctctatggtgaagctcatgagctgagggacgatccgcccatcattgtcattgaaatctatgaccaggattccatgggcaaagctgacttcatgggccggaccttcgccaaacccctggtgaagatggcagacgaggcgtactgcccaccccgcttcccacctcagctcgagtactaccagatctaccgtggcaacgccacagctggagacctgctggcggccttcgagctgctgcagattggaccagcagggaaggctgacctgccccccatcaatggcccggtggacgtggaccgaggtcccatcatgcccgtgcccatgggcatccggcccgtgctcagcaagtaccgagtggaggtgctgttctggggcctacgggacctaaagcgggtgaacctggcccaggtggaccggccacgggtggacatcgagtgtgcagggaagggggtgcagtcgtccctgatccacaattataagaagaaccccaacttcaacaccctcgtcaagtggtttgaagtggacctcccagagaacgagctgctgcacccgcccttgaacatccgtgtggtggactgccgggccttcggtcgctacacactggtgggctcccatgccgtcagctccctgcgacgcttcatctaccggcccccagaccgctcggcccccagctggaacaccacgggggaggttgtggtgactatggagccagaggtacccatcaagaaactggagaccatggtgaagctggacgcgacttctgaagctgttgtcaaggtggatgtggctgaggaggagaaggagaagaagaagaagaagaagggcactgcggaggagccagaggaggaggagccagacgagagcatgctggactggtggtccaagtactttgcctccattgacaccatgaaggagcaacttcgacaacaagagccctctggaattgacttggaggagaaggaggaagtggacaataccgagggcctgaaggggtcaatgaagggcaaggagaaggcaagggctgccaaagaggagaagaagaagaaaactcagagctctggctctggccaggggtccgaggcccccgagaagaagaaacccaagattgatgagcttaaggtataccccaaagagctggagtccgagtttgataactttgaggactggctgcacactttcaacttgcttcggggcaagaccggggatgatgaggatggctccaccgaggaggagcgcattgtgggacgcttcaagggctccctctgcgtgtacaaagtgccactcccagaggacgtgtcccgggaagccggctacgactccacctacggcatgttccagggcatcccgagcaatgaccccatcaatgtgctggtccgagtctatgtggtccgggccacggacctgcaccctgctgacatcaacggcaaagctgacccctacatcgccatccggctaggcaagactgacatccgcgacaaggagaactacatctccaagcagctcaaccctgtctttgggaagtcctttgacatcgaggcctccttccccatggaatccatgctgacggtggctgtgtatgactgggacctggtgggcactgatgacctcattggggaaaccaagatcgacctggagaaccgcttctacagcaagcaccgcgccacctgcggcatcgcccagacctactccacacatggctacaatatctggcgggaccccatgaagcccagccagatcctgacccgcctctgcaaagacggcaaagtggacggcccccactttgggccccctgggagagtgaaggtggccaaccgcgtcttcactgggccctctgagattgaggacgagaacggtcagaggaagcccacagacgagcatgtggcgctgttggccctgaggcactgggaggacatcccccgcgcaggctgccgcctggtgccagagcatgtggagacgaggccgctgctcaaccccgacaagccgggcatcgagcagggccgcctggagctgtgggtggacatgttccccatggacatgccagcccctgggacgcctctggacatctcacctcggaagcccaagaagtacgagctgcgggtcatcatctggaacacagatgaggtggtcttggaggacgacgacttcttcacaggggagaagtccagtgacatcttcgtgagggggtggctgaagggccagcaggaggacaagcaggacacagacgtccactaccactccctcactggcgagggcaacttcaactggcgctacctgttccccttcgactacctggcggcggaggagaagatcgtcatctccaagaaggagtccatgttctcctgggacgagaccgagtacaagatccccgcgcggctcaccctgcagatctgggatgcggaccacttctccgctgacgacttcctgggggccatcgagctggacctgaaccggttcccgcggggcgcaaagacagccaagcagtgcaccatggagatggccaccggggaggtggacgtgcccctcgtgtccatcttcaagcaaaagcgcgtcaaaggctggtggcccctcctggcccgcaatgagaacgatgagtttgagctcacgggcaaggtggaggctgagctgcatttactgacagcagaggaggcagagaagaacccagtgggcctggcccgcaatgaacctgaccccctagagaaacccaaccggcccgacacggccttcgtctggttcctcaaccctctcaagtccatcaagtacctcatctgcacccggtacaagtggctcatcatcaagatcgtgctggcgctgttggggctgctcatgttggggctcttcctctacagcctccctggctacatggtcaaaaagctccttggggcatgaaggccgccagctcccgccagccgctccccagccctgccgcatttcctttcagtggcttggactctttcccatctcccctggggagcctgaggagcccagcgtccactcttcatgccttgggccgagcctgcctcctgcttgcgggggccgcctgtcctcactgccccaggctgcggcttgcccagtcccgcccctctgacccctgcctgtgggctggggagccttggatggggtggggacctggaatgggtctctcttgccccacctggctgaggcgccacccttcttcaggcccaggctccagaggaagactcctgaaaccctccccaggtcttccaagtacaggattgaagctttagtgaaattaaccaaggaccatgggtcagtgcccagggctttaaaaagaatgaacgagcaaaaggtatccccgccgtgacccctgcagatagcaccggtctttgatccgcagcaggggccagaccctgcccacaagtcccagcgcggctgcttctgccactgctgggctccacttggctcctctcacttcccagggggtcgcctgtcctgcctgtgggtttccatggcttcccagagctccctctgccccagccagcgcctccaggcccagctgaggagctgtgagaagcagcagaggggactccccatcccgggcacaccctgtcctcccacccctgcccccttgcccttccagccctttcagctgcagctgggagctggcccgtcaagtgctgcccctgcctgtgtctgggtttctgttggctgtttttcttttcttgagtggtgatttttctctaaataaaagaagtcaagcactga

SEQ ID NO: 279218 - DNA, 3693 bp, Artificial Sequence
  derived and/or modified sequence
atgataaaaacagaaaagtcctatcccgaacgtagactgcggggagtgctcgaggagctgtcatgcggctgttgtcggtttctcagcctggctgacaaagatcaaggccacagttctcgaacaaggcttgaccgagaaaggctcaagtcctgcatgcgcgaacttgagaacatgggacaacaagccaggatgttgcgggctcaggtcaaacggcatacggtccgcgataagctgagactgtgccagaatttcctgcagaagcttcggttccttgccgatgagcctcagcactccatacctgatatattcatctggatgatgagcaacaacaagcgagtggcttacgcacgggtccctagtaaagacctgctgttctcaattgtggaggaggagacagggaaggattgtgctaaggtgaaaacgttgtttctgaaactcccagggaagcgcggattcggaagtgcaggttggacggtccaagctaaagttgaactttacttgtggttgggactgtcaaagcagagaaaagagttcctctgcggtctgccctgtgggttccaagaggttaaggcagcccagggtctcgggctgcatgcatttcctcccgtaagcctggtgtacactaaaaagcaggcctttcagctgcgagcccacatgtaccaggccaggtctctttttgccgctgattctagtggcctttcagacccattcgcgagggttttttttatcaaccagagtcagtgtaccgaagtgcttaacgaaacactgtgccctacttgggaccaaatgctggtgtttgataacctggaactgtacggggaagctcacgagcttagagatgaccctcccattatcgtgattgagatttatgaccaggattccatgggtaaagccgatttcatgggcaggactttcgccaagccgctggtgaaaatggcagacgaggcttactgccctccacgctttccccctcaactggagtattatcagatttatcgcggaaacgctaccgctggagatctacttgccgcatttgaacttttgcagatcggacctgccggtaaggcagacctccctcctataaacggacccgtggatgtcgatcggggacccatcatgcctgtgcccatgggcatcagacctgtgttgagcaaatacagagtggaggtactcttctgggggctgagggatctgaaaagggtgaatctggcccaagtcgaccgtcccagggttgacattgagtgcgcgggaaaaggcgttcagagcagcctgatccacaactacaaaaagaatcccaatttcaataccctggtaaaatggtttgaggtcgatttaccggagaatgagctccttcaccctcccctgaacataagagtggtagactgccgggcatttggtagatatactctggtcggcagccacgcagtctctagcctgagacggttcatttacagaccccctgaccggtccgccccaagctggaatactacaggtgaagtggtggtaactatggagccggaggtgccaattaagaaactggaaaccatggtcaaacttgatgctacatccgaggcggtagtgaaggtggacgtcgctgaggaggaaaaggagaaaaaaaaaaaaaaaaagggaacagctgaggagcccgaagaagaggagcctgacgagagcatgctcgactggtggtctaagtatttcgcatctattgacacaatgaaagagcaactgcgccagcaagaaccctccggcatagatctcgaggagaaagaggaggtcgataataccgaaggcctgaagggctccatgaaaggaaaggagaaagcccgtgctgcgaaggaggagaaaaagaaaaagacacagtcgtccggttccggacaaggcagtgaggccccagaaaaaaagaaacccaagatcgatgagctgaaagtctatcccaaagagctcgagtcggaatttgacaactttgaagattggctccacacattcaatctgctgcgcggtaaaacaggagacgatgaggatggaagcactgaggaagaaagaatcgtgggcagattcaaggggagcctctgcgtttacaaggttccactcccagaggatgtgagtagggaggcgggttatgattcaacctatggaatgtttcagggaatcccatctaacgacccaattaacgtcctggtgagagtctacgtggtgcgagcgaccgacctgcaccccgcagacatcaacggtaaggcagatccctatattgcaattcggttgggcaaaacagatatccgagacaaggaaaattacatcagcaagcagctgaatcccgtattcgggaagtcattcgacatcgaggcaagctttcccatggaatctatgttaaccgtggcagtatacgactgggaccttgtcgggaccgacgatttgattggcgagactaagatagatctcgagaatcgcttctactccaaacacagggctacgtgcggaatcgctcagacctattccacccacgggtataatatttggcgcgaccccatgaagcccagtcagattttgactcgtctgtgtaaagacggaaaggtggatgggccacatttcggtcctccgggtcgagttaaagttgcaaatcgtgtatttacgggaccatccgagattgaggacgagaatggccaacgtaaacccactgatgagcacgtggccttgttagcgctgagacactgggaagatatacccagagctggatgccgactcgtacccgagcacgtggagactcgcccactccttaacccagacaagcccggaatcgaacagggtcggctcgaactatgggtggatatgttccctatggacatgcccgctcctggaactccactggatatatctcctcgaaagccaaagaagtacgagctgcgcgtgataatttggaataccgacgaggtagttctggaggatgacgatttctttaccggagaaaagagcagcgacatcttcgtgaggggttggctgaaagggcagcaggaggacaaacaggacaccgatgttcactaccactccctgacaggagaaggtaatttcaattggaggtaccttttcccgtttgattatctcgcagccgaagagaagattgtcatctctaagaaggaatcaatgttttcttgggacgaaacagaatataaaatccccgcaagactaaccctgcagatctgggatgctgaccacttctcagccgatgactttctaggcgctattgagctggacttgaataggtttcctcgcggagctaaaacagctaagcaatgtacaatggagatggcaactggcgaggtggacgtgccccttgtatccattttcaagcaaaagagagtcaagggctggtggcccctactcgccaggaacgagaatgacgagtttgagctgactggaaaggttgaagccgagttacacttgctgactgccgaggaggctgaaaaaaatccggtcgggctcgctagaaacgagccagatccacttgaaaaaccaaaccgtccagacactgcgttcgtatggtttttaaatccgttgaaatccatcaagtacttgatctgcacccggtataagtggctcatcatcaaaatcgtgctagccctgttgggtctgttaatgcttggactcttcttgtatagcttgccagggtatatggttaaaaaactcttgggggcttag

SEQ ID NO: 279219 - DNA, 3693 bp, Artificial Sequence
  derived and/or modified sequence
atgatcaagaccgagaagagctaccccgagagaagactgagaggcgtgctggaggagctgagctgcggctgctgcagattcctgagcctggccgacaaggaccagggccacagcagcagaaccagactggacagagagagactgaagagctgcatgagagagctggagaacatgggccagcaggccagaatgctgagagcccaggtgaagagacacaccgtgagagacaagctgagactgtgccagaacttcctgcagaagctgagattcctggccgacgagccccagcacagcatccccgacatcttcatctggatgatgagcaacaacaagagagtggcctacgccagagtgcccagcaaggacctgctgttcagcatcgtggaggaggagaccggcaaggactgcgccaaggtgaagaccctgttcctgaagctgcccggcaagagaggcttcggcagcgccggctggaccgtgcaggccaaggtggagctgtacctgtggctgggcctgagcaagcagagaaaggagttcctgtgcggcctgccctgcggcttccaggaggtgaaggccgcccagggcctgggcctgcacgccttcccccccgtgagcctggtgtacaccaagaagcaggccttccagctgagagcccacatgtaccaggccagaagcctgttcgccgccgacagcagcggcctgagcgaccccttcgccagagtgttcttcatcaaccagagccagtgcaccgaggtgctgaacgagaccctgtgccccacctgggaccagatgctggtgttcgacaacctggagctgtacggcgaggcccacgagctgagagacgacccccccatcatcgtgatcgagatctacgaccaggacagcatgggcaaggccgacttcatgggcagaaccttcgccaagcccctggtgaagatggccgacgaggcctactgcccccccagattccccccccagctggagtactaccagatctacagaggcaacgccaccgccggcgacctgctggccgccttcgagctgctgcagatcggccccgccggcaaggccgacctgccccccatcaacggccccgtggacgtggacagaggccccatcatgcccgtgcccatgggcatcagacccgtgctgagcaagtacagagtggaggtgctgttctggggcctgagagacctgaagagagtgaacctggcccaggtggacagacccagagtggacatcgagtgcgccggcaagggcgtgcagagcagcctgatccacaactacaagaagaaccccaacttcaacaccctggtgaagtggttcgaggtggacctgcccgagaacgagctgctgcacccccccctgaacatcagagtggtggactgcagagccttcggcagatacaccctggtgggcagccacgccgtgagcagcctgagaagattcatctacagaccccccgacagaagcgcccccagctggaacaccaccggcgaggtggtggtgaccatggagcccgaggtgcccatcaagaagctggagaccatggtgaagctggacgccaccagcgaggccgtggtgaaggtggacgtggccgaggaggagaaggagaagaagaagaagaagaagggcaccgccgaggagcccgaggaggaggagcccgacgagagcatgctggactggtggagcaagtacttcgccagcatcgacaccatgaaggagcagctgagacagcaggagcccagcggcatcgacctggaggagaaggaggaggtggacaacaccgagggcctgaagggcagcatgaagggcaaggagaaggccagagccgccaaggaggagaagaagaagaagacccagagcagcggcagcggccagggcagcgaggcccccgagaagaagaagcccaagatcgacgagctgaaggtgtaccccaaggagctggagagcgagttcgacaacttcgaggactggctgcacaccttcaacctgctgagaggcaagaccggcgacgacgaggacggcagcaccgaggaggagagaatcgtgggcagattcaagggcagcctgtgcgtgtacaaggtgcccctgcccgaggacgtgagcagagaggccggctacgacagcacctacggcatgttccagggcatccccagcaacgaccccatcaacgtgctggtgagagtgtacgtggtgagagccaccgacctgcaccccgccgacatcaacggcaaggccgacccctacatcgccatcagactgggcaagaccgacatcagagacaaggagaactacatcagcaagcagctgaaccccgtgttcggcaagagcttcgacatcgaggccagcttccccatggagagcatgctgaccgtggccgtgtacgactgggacctggtgggcaccgacgacctgatcggcgagaccaagatcgacctggagaacagattctacagcaagcacagagccacctgcggcatcgcccagacctacagcacccacggctacaacatctggagagaccccatgaagcccagccagatcctgaccagactgtgcaaggacggcaaggtggacggcccccacttcggcccccccggcagagtgaaggtggccaacagagtgttcaccggccccagcgagatcgaggacgagaacggccagagaaagcccaccgacgagcacgtggccctgctggccctgagacactgggaggacatccccagagccggctgcagactggtgcccgagcacgtggagaccagacccctgctgaaccccgacaagcccggcatcgagcagggcagactggagctgtgggtggacatgttccccatggacatgcccgcccccggcacccccctggacatcagccccagaaagcccaagaagtacgagctgagagtgatcatctggaacaccgacgaggtggtgctggaggacgacgacttcttcaccggcgagaagagcagcgacatcttcgtgagaggctggctgaagggccagcaggaggacaagcaggacaccgacgtgcactaccacagcctgaccggcgagggcaacttcaactggagatacctgttccccttcgactacctggccgccgaggagaagatcgtgatcagcaagaaggagagcatgttcagctgggacgagaccgagtacaagatccccgccagactgaccctgcagatctgggacgccgaccacttcagcgccgacgacttcctgggcgccatcgagctggacctgaacagattccccagaggcgccaagaccgccaagcagtgcaccatggagatggccaccggcgaggtggacgtgcccctggtgagcatcttcaagcagaagagagtgaagggctggtggcccctgctggccagaaacgagaacgacgagttcgagctgaccggcaaggtggaggccgagctgcacctgctgaccgccgaggaggccgagaagaaccccgtgggcctggccagaaacgagcccgaccccctggagaagcccaacagacccgacaccgccttcgtgtggttcctgaaccccctgaagagcatcaagtacctgatctgcaccagatacaagtggctgatcatcaagatcgtgctggccctgctgggcctgctgatgctgggcctgttcctgtacagcctgcccggctacatggtgaagaagctgctgggcgcctag

SEQ ID NO: 279220 - protein, 645 aa, Artificial Sequence
  derived and/or modified sequence
MSLKLPRNWDFNLKVEAAKIARSRSVMTGEQMAAFHPSSTPNPLERPIKMGWLKKQRSIVKNWQQRYFVLRAQQLYYYKDEEDTKPQGCMYLPGCTIKEIATNPEEAGKFVFEIIPASWDQNRMGQDSYVLMASSQAEMEEWVKFLRRVAGTPCGVFGQRLDETVAYEQKFGPHLVPILVEKCAEFILEHGRNEEGIFRLPGQDNLVKQLRDAFDAGERPSFDRDTDVHTVASLLKLYLRDLPEPVVPWSQYEGFLLCGQLTNADEAKAQQELMKQLSILPRDNYSLLSYICRFLHEIQLNCAVNKMSVDNLATVIGVNLIRSKVEDPAVIMRGTPQIQRVMTMMIRDHEVLFPKSKDIPLSPPAQKNDPKKAPVARSSVGWDATEDLRISRTDSFSSMTSDSDTTSPTGQQPSDAFPEDSSKVPREKPGDWKMQSRKRTQTLPNRKCFLTSAFQGANSSKMEIFKNEFWSPSSEAKAGEGHRRTMSQDLRQLSDSQRTSTYDNVPSLPGSPGEEASALSSQACDSKGDTLASPNSETGPGKKNSGEEEIDSLQRMVQELRKEIETQKQMYEEQIKNLEKENYDVWAKVVRLNEELEKEKKKSAALEISLRNMERSREDVEKRNKALEEEVKEFVKSMKEPKTEA

SEQ ID NO: 279221 - DNA, 1938 bp, Artificial Sequence
  derived and/or modified sequence
atgagtctgaaattgccccgtaattgggactttaacctgaaggtggaggccgccaaaattgcgcgaagtaggtctgtcatgacgggagaacaaatggctgcttttcacccctcatcgacaccaaatcccctcgagagaccaattaagatggggtggctgaagaagcaacgatctattgtcaagaattggcagcagaggtactttgtgctgcgagctcagcaactatactactataaagatgaagaggatacaaagccacagggatgcatgtacttacccggatgtactattaaggaaatcgcaacgaatcctgaggaagccggcaagttcgtgttcgagattatacccgcaagctgggaccagaatcggatggggcaggattcctatgtactgatggcctcttctcaagccgagatggaagagtgggttaagtttctcagaagagtcgcaggcacgccatgcggagtatttggacagcgacttgacgagaccgtcgcttacgagcaaaaatttggcccccacctggtgccaatcctggtggaaaaatgcgcggagttcattctggagcatggccggaatgaggagggcatctttagattgcctggccaggacaatctggtgaagcaattacgcgacgcattcgatgcgggtgagcgcccgtctttcgatcgggatactgatgtgcacacagtggcctcacttttgaaactatatctgagggatctccctgaacctgtcgtgccttggtcccagtacgagggttttctcctgtgtggtcagcttacgaacgccgacgaggcaaaggcccagcaggagctgatgaaacaactgtcgatcctcccaagggacaattacagtctgctctcatatatttgtcgcttcctgcacgaaatccagctcaactgcgccgtcaataagatgtcagtggataacctggctacggtgataggggtcaaccttatcagatctaaggtcgaggatcccgctgtgatcatgcgggggacccctcagattcaaagagtgatgaccatgatgatccgcgaccacgaagtattatttcctaaatccaaagacattccactgtcaccacccgctcagaaaaatgacccgaaaaaagccccagtagctagatccagcgtaggatgggatgccaccgaggacctgcggatatcaaggaccgattctttttctagcatgacctccgacagcgacacaacctctcccaccggccaacagccatccgacgccttccctgaagactccagtaaagtgccacgggagaagccaggtgactggaagatgcagtcaagaaagcgaacgcaaacattaccgaacaggaagtgtttcttgactagtgcctttcaaggcgccaacagtagtaagatggagatatttaaaaatgaattctggtcgccttcttctgaagcgaaggctggggaaggccacagacgtaccatgagccaagacctccggcagctgtccgattcacagaggaccagcacttatgacaacgttccgagcctgccaggatctcccggcgaagaagcttctgctctgagcagtcaagcctgtgacagcaagggggatacattggcatcccctaactccgaaaccgggcctggtaaaaagaacagtggcgaggaggagatcgactccttgcaacgcatggtgcaagaactacgaaaggaaattgaaacgcagaagcagatgtatgaggaacagattaagaatcttgagaaagagaattatgacgtctgggcaaaggtagtgcgtctaaacgaagagctcgagaaggagaaaaagaaatcagctgccctggaaataagcttgcgcaatatggagcgtagccgcgaggacgtcgagaagcggaacaaggccctggaagaggaagtgaaggagtttgtgaaatcaatgaaggaacctaagacagaagcatag

SEQ ID NO: 279222 - DNA, 1938 bp, Artificial Sequence
  derived and/or modified sequence
atgagcctgaagctgcccaggaactgggacttcaacctgaaggtggaggccgccaagatcgcccggagccgctctgtgatgaccggggagcagatggccgccttccaccccagcagcacccccaaccccctggagcggcccatcaagatgggctggctgaagaagcagaggagcatcgtgaagaactggcagcagcgctactttgtgctgcgggcccagcagctgtactactacaaggatgaggaggacaccaagccccagggctgcatgtacctgcccggctgcaccatcaaggagatcgccaccaaccctgaggaggccggcaagtttgtgtttgagatcatcccagcctcctgggaccagaacaggatgggccaggacagctatgtgctgatggccagcagccaggccgagatggaggagtgggtgaagttcctgcggcgggtggccggcaccccctgtggggtgtttggccagaggctggatgagaccgtggcctatgagcagaagtttggcccccacctggtgcccatcctggtggagaagtgtgccgagttcatcctggagcacggcagaaatgaggagggcatcttccggctgcccggccaggacaacctggtgaagcagctgagagatgcctttgatgctggggagcggcccagctttgaccgggacacagatgtgcacacagtggccagcctgctgaagctgtacctgcgggacctgcctgagcctgtggtgccctggagccagtatgagggcttcctgctgtgtggccagctgaccaatgctgatgaggccaaggcccagcaggagctgatgaagcagctgagcatcctgccccgggacaactacagcctgctgagctacatctgccgcttcctgcacgagatccagctgaactgtgctgtgaacaagatgtctgtggacaacctggccaccgtcatcggcgtgaacctgatccgcagcaaggtggaggaccctgctgtgatcatgaggggcaccccccagatccagagggtgatgaccatgatgatccgggaccacgaggtgctcttccccaagagcaaggacatccccctgagccccccagcccagaagaatgaccccaagaaggcccctgtggcccggagctctgtgggctgggatgccacagaggacctgcgcatcagcaggacagacagcttcagctccatgaccagtgacagcgacaccaccagccccaccggccagcagcccagtgatgccttccctgaggacagcagcaaggtgccccgggagaagccaggggactggaagatgcagagcaggaagaggacccagaccctgcccaacaggaagtgcttcctgaccagcgccttccagggcgccaacagcagcaagatggagatcttcaagaatgagttctggagccccagcagcgaggccaaggccggggagggccacaggaggaccatgagccaggacctgcggcagctgagtgacagccagaggaccagcacctatgacaacgtgcccagcctgcccggcagccctggagaggaggccagcgccctgagcagccaggcctgtgacagcaaaggagacaccctggccagccccaacagcgagaccggccctgggaagaagaacagcggggaggaggagattgacagcctgcagaggatggtgcaggagctgaggaaggagattgagacccagaagcagatgtatgaggagcagatcaagaacctggagaaggaaaattatgatgtgtgggccaaggtggtgcggctgaatgaggagctggagaaggagaagaagaagtctgctgccctggagatcagcctgaggaacatggagaggagccgggaggatgtggagaagaggaacaaggccctggaggaggaggtgaaggagtttgtgaagtccatgaaggagcccaagacagaggcctag

SEQ ID NO: 279223 - DNA, 1938 bp, Artificial Sequence
  derived and/or modified sequence
atgagcctgaagctgccccggaactgggacttcaacctgaaggtggaagcagctaaaatcgcccgctcaagaagcgttatgacgggggagcagatggctgccttccatccatcctcgactccgaaccccctagagagaccaataaagatgggctggctaaaaaagcaacgtagtattgtcaaaaactggcaacagagatattttgtgctccgggcccagcagctgtactattataaagacgaggaggacaccaaaccccagggatgtatgtatctgcccggttgtactataaaggagattgcaacgaacccggaagaagccggcaagtttgtgttcgagatcatccccgcttcctgggatcagaatcgaatgggccaagattcttacgtcctgatggcaagtagccaggcagagatggaagaatgggttaagttcctccggagagtggccggcacgccatgcggagtctttgggcagcgtttggatgaaaccgtggcctatgaacaaaaatttggcccccacttagtccccatcctcgtagaaaaatgtgcggaattcatcctggagcatggaaggaacgaagaaggaatctttcgcttgcctggccaagataacctggtcaagcaactgcgcgacgccttcgacgccggggaacgcccgtccttcgaccgtgatacggacgtgcatacagttgcctctttactgaagttgtacctgcgggatctccccgagcccgtggtgccctggtctcaatacgaaggttttctgctttgcggccaactcacaaatgccgatgaggcgaaggctcagcaggaactcatgaagcagctttctatccttccaagagacaactacagcctgctgtcatacatatgcaggtttctgcacgagatccaactaaactgcgctgtgaacaagatgagtgtggacaatctcgcgactgttataggggtgaacctgatccggagcaaagtcgaggatcccgctgtgattatgaggggaacaccccagattcagagggtcatgactatgatgatcagagatcatgaggtgctcttccccaagtccaaggatattcccttatccccgcccgcccagaagaacgaccctaaaaaagcacctgtcgcgagaagcagtgtgggctgggatgcaaccgaggacctgcggatctcacgtaccgactctttcagtagcatgactagcgatagtgacacaacttctcccacaggccagcagccttctgacgcattccccgaggacagcagcaaagtcccacgggagaagcctggggactggaaaatgcagtccagaaaaaggacgcaaactttacctaaccgaaaatgctttctgacaagcgccttccagggtgcaaatagcagcaagatggaaatctttaaaaatgaattctggtccccctccagcgaggccaaggccggcgaggggcataggcgaaccatgtcacaggacctgaggcagttgtccgactcgcaacggaccagtacttacgataacgtcccatcattgcctggatccccgggtgaggaggcttccgcgctatcgtcccaagcctgcgattccaaaggggacaccctggcttccccaaacagtgagacagggccgggcaaaaaaaatagcggcgaggaagaaatagatagtctgcaacgtatggtccaggaactgcgaaaagaaatcgagacccaaaagcaaatgtacgaagagcaaataaaaaacctcgaaaaagagaattatgacgtatgggcgaaggttgtgagacttaatgaggagctcgagaaggagaagaaaaagtccgcggctctcgagatcagtctgcggaatatggaaaggtcacgcgaagatgttgaaaaaaggaacaaagctctggaggaagaggtaaaggaattcgtaaagtccatgaaggaaccgaaaacagaggcgtag

SEQ ID NO: 279224 - DNA, 1938 bp, Artificial Sequence
  derived and/or modified sequence
atgtcccttaaactcccaagaaactgggattttaatttgaaggtcgaagctgccaagattgccaggagtcgatcggtgatgaccggggagcagatggcagcatttcacccctcatccaccccaaatcctttggaacggccaattaagatggggtggcttaagaaacaaagaagtattgtcaagaactggcagcagagatactttgtgctccgcgcacagcagctttactactacaaggacgaggaagacacaaagcctcaggggtgcatgtacctgccaggctgcactatcaaggagattgccaccaatcccgaagaagcaggcaaattcgttttcgagatcataccagcatcttgggatcagaacaggatgggtcaggattcttacgttctcatggcaagctcccaggcagagatggaggaatgggttaaattcttgaggagggtggctggcacaccatgtggagtgttcggtcagcggcttgacgagacggttgcctacgagcagaaatttggcccacaccttgtacccattctggtcgaaaagtgcgcagagtttattctggagcatggacggaatgaggagggcatctttaggctgccaggacaggataatctcgtaaagcaattacgcgatgcattcgatgcgggtgagaggccttcttttgatagggacaccgatgtgcataccgtggcgagcctcctgaaactttacctgcgagatctccccgagcccgtggtgccgtggagccaatacgagggatttctcctctgtggccagctcacaaacgccgatgaagctaaagcgcaacaggaattaatgaagcagctgtcaattttgccacgcgataactactctctgttaagctacatttgcaggttcctgcacgagatacagttgaattgcgcggttaataagatgtccgtggataatctggctaccgtaatcggcgtgaacctcattaggagtaaggtggaagaccccgctgtcatcatgagaggaaccccacagatacagcgcgtgatgactatgatgatcagggatcacgaggtgctgtttcccaagtccaaggatatcccactatcccctcccgcacagaaaaacgatccgaagaaggcccctgtggctagatcctctgtgggctgggacgcgacggaagacctgagaattagtcggacagattcttttagcagcatgacttcagattctgacactacatccccaacaggccagcagcctagcgacgctttccctgaggactcttcaaaggtgccaagggaaaaacctggtgattggaagatgcagtcccgaaagcgcacacaaaccctgcccaatcggaaatgctttttgacatccgccttccaaggagcaaacagcagcaagatggagatatttaaaaacgagttctggagtccgagtagcgaagcaaaggcgggagaaggtcacaggcggaccatgagccaagatctccgtcagctgagtgattcccagcggaccagcacctacgataatgtcccgagtctgcccggttcccccggtgaggaggcatctgcgcttagctcccaagcgtgcgatagcaagggagacaccctcgctagccccaacagcgagacaggacctggcaaaaagaatagcggggaggaggagatcgattccctgcagcgcatggtgcaggagctccgcaaggaaattgaaactcagaaacaaatgtatgaggaacagataaaaaatctcgagaaagaaaactacgatgtatgggcaaaggtggtgcgcctgaacgaggagctggaaaaggagaagaagaaaagcgccgcacttgaaatcagcctacggaacatggaaagaagccgcgaagacgtggagaagagaaataaagcccttgaggaagaggtgaaagagtttgtgaagtctatgaaggagcccaaaacggaggcttag

SEQ ID NO: 279225 - DNA, 2979 bp, Artificial Sequence
  derived and/or modified sequence
acacacacacacacaaaaccaagaggcagcagttgtttatcacgacctcaactcagtaaggcctgagattctttcgaaaaggagctttgcttcccatgacgcagagggaagtgtcaactgggatatttctggtaaaactgaaagcaagaaaagcagggtgctagcccctgtgggactgagggtggaggctgggggagtttgggtgccatcctccagtgacagatggatggacctttcatctaagagaaaggaggagacacgttggcaaatcagcctcaagcctaagattgcttgtgaagcaatcataaggaggaacaaaaacagacacaaaaacagagggaaagagtgaaaagacaagaagggcgcaaactgtgacagactcaccgcttcactaactactcacttaaactggaagcaaaatgtccctaaaattgccaaggaactgggatttcaacctgaaagtggaggctgcgaaaatagctcggtcaaggagtgtgatgactggcgagcagatggctgccttccatccatcgtccacccccaacccgctggagaggcccatcaagatgggctggctgaagaagcagaggtccatcgtgaagaactggcagcagaggtactttgtgctgagggcgcagcagctctactactacaaggatgaagaggacacgaagccccagggctgcatgtatctaccaggatgtacaatcaaggagatcgccacaaacccagaagaagctgggaagtttgtctttgaaatcattccagcctcatgggaccagaatcgcatgggacaggactcctatgtcctcatggccagctctcaggcggagatggaggagtgggttaaattcctcaggagagttgctggcacaccctgtggagtgtttggccagcgcttggatgagactgtggcctatgaacagaaattcggcccccatctggtgcccatcctggtggagaaatgtgcagagttcatcctggagcacggccggaatgaagagggcatcttccgtctgcctgggcaggacaacctggtgaagcagctgagagacgcttttgatgctggggagcggccctcctttgacagagacacagatgtgcacactgtggcttccctgttaaagctctacctccgagacctcccagagcccgtggttccctggagccagtacgaagggttcctgctctgtgggcagctcacgaatgcggatgaggcaaaggctcagcaggagttgatgaagcagctctccatccttcctcgtgacaactatagtctcctgagctacatctgcaggttcctacatgaaatacagctgaactgtgctgttaacaagatgagtgtggacaacctggctactgtgattggtgtgaatctcatcaggtcgaaggtcgaagaccctgccgtgatcatgagagggactcctcagatccaaagagtgatgactatgatgatcagagaccatgaagtcctcttccccaagtccaaggatatacccctgtcaccccctgcccagaaaaatgaccccaagaaagctccagtggcccgaagctctgtaggctgggatgccactgaagacctccgaatttctaggacagacagcttcagtagcatgacaagcgactctgatacaaccagccccaccggacagcagccgagcgatgcgtttccggaggacagcagcaaagtacccagggaaaagccaggagactggaaaatgcaatctcgtaaaaggactcaaacactccctaaccggaaatgtttcttgacatcagcttttcagggtgccaacagcagcaaaatggagatctttaaaaatgaattctggtcgccttcctcagaggctaaggcaggggaagggcacaggagaacgatgtctcaagacttgcgccaactttctgactcccaacggacttccacctacgataacgtcccttccctgccagggtcccctggggaggaagccagtgcactctcttcccaagcctgtgactccaagggagatactcttgccagtccaaactctgaaactgggcctggaaaaaagaactctggagaagaggaaattgattctttgcagaggatggtccaagagctacgaaaggaaatagaaacacagaagcaaatgtatgaggaacagattaaaaaccttgagaaggaaaattatgacgtttgggctaaagtggtgaggctcaatgaagaactggagaaggaaaagaagaagtctgcagccctagagatcagcctccgcaacatggagcgctcccgggaggatgttgagaagaggaacaaggccttggaagaagaagtcaaggaatttgtcaaatccatgaaggaacccaagaccgaggcttaagggtcccaggagtactgcagggacagccccagagaggcccaactctggcccctttctcagtgctatctgatgacggggaaacaaaattattctctgagagggaaaggacatttgagggaaacatcaaatttccccataaataaatgaatggagtttgcaggaaggtgagggtgagcagagatgtgtgtggacatctctgaccatccatcgctgtattcaaatggattgttttattccattctggtctcaggcatgaccacgtccagtgaagacatttgaggcagcacatctcaggacccaggcaatagactggccccaactcaggctggactaaggtgtgattaattctttgttttttgtgtggaacagctcaccttgtcagacagcctcagggcatctctgagacacaggggcagaaaatgacattcatcttttgagtcctcatccatggagtgctgtgtttggggggctgcatctgctgaagcgagaaccccattctgccaccccaccaggatgcccattctccaggacttctccaacttactattagactaaaccagaacaagcaacaaactgtatttatgcaagcaaaattgatgagaaaattatattcaaataaagc

SEQ ID NO: 279226 - DNA, 1938 bp, Artificial Sequence
  derived and/or modified sequence
atgagcctgaagctgcccagaaactgggacttcaacctgaaggtggaggccgccaagatcgccagaagcagaagcgtgatgaccggcgagcagatggccgccttccaccccagcagcacccccaaccccctggagagacccatcaagatgggctggctgaagaagcagagaagcatcgtgaagaactggcagcagagatacttcgtgctgagagcccagcagctgtactactacaaggacgaggaggacaccaagccccagggctgcatgtacctgcccggctgcaccatcaaggagatcgccaccaaccccgaggaggccggcaagttcgtgttcgagatcatccccgccagctgggaccagaacagaatgggccaggacagctacgtgctgatggccagcagccaggccgagatggaggagtgggtgaagttcctgagaagagtggccggcaccccctgcggcgtgttcggccagagactggacgagaccgtggcctacgagcagaagttcggcccccacctggtgcccatcctggtggagaagtgcgccgagttcatcctggagcacggcagaaacgaggagggcatcttcagactgcccggccaggacaacctggtgaagcagctgagagacgccttcgacgccggcgagagacccagcttcgacagagacaccgacgtgcacaccgtggccagcctgctgaagctgtacctgagagacctgcccgagcccgtggtgccctggagccagtacgagggcttcctgctgtgcggccagctgaccaacgccgacgaggccaaggcccagcaggagctgatgaagcagctgagcatcctgcccagagacaactacagcctgctgagctacatctgcagattcctgcacgagatccagctgaactgcgccgtgaacaagatgagcgtggacaacctggccaccgtgatcggcgtgaacctgatcagaagcaaggtggaggaccccgccgtgatcatgagaggcaccccccagatccagagagtgatgaccatgatgatcagagaccacgaggtgctgttccccaagagcaaggacatccccctgagcccccccgcccagaagaacgaccccaagaaggcccccgtggccagaagcagcgtgggctgggacgccaccgaggacctgagaatcagcagaaccgacagcttcagcagcatgaccagcgacagcgacaccaccagccccaccggccagcagcccagcgacgccttccccgaggacagcagcaaggtgcccagagagaagcccggcgactggaagatgcagagcagaaagagaacccagaccctgcccaacagaaagtgcttcctgaccagcgccttccagggcgccaacagcagcaagatggagatcttcaagaacgagttctggagccccagcagcgaggccaaggccggcgagggccacagaagaaccatgagccaggacctgagacagctgagcgacagccagagaaccagcacctacgacaacgtgcccagcctgcccggcagccccggcgaggaggccagcgccctgagcagccaggcctgcgacagcaagggcgacaccctggccagccccaacagcgagaccggccccggcaagaagaacagcggcgaggaggagatcgacagcctgcagagaatggtgcaggagctgagaaaggagatcgagacccagaagcagatgtacgaggagcagatcaagaacctggagaaggagaactacgacgtgtgggccaaggtggtgagactgaacgaggagctggagaaggagaagaagaagagcgccgccctggagatcagcctgagaaacatggagagaagcagagaggacgtggagaagagaaacaaggccctggaggaggaggtgaaggagttcgtgaagagcatgaaggagcccaagaccgaggcctag

SEQ ID NO: 279227 - DNA, 2061 bp, Artificial Sequence
  derived and/or modified sequence
atggccatcagccagcaccagttctacctggacagaaagcagagcaaggccaagatccccagcgccagaagcctggacgagatcgccatggacctgaccgagaccggcacccagagagccagcaagctggtgaccctggagaccaagagccagttcatcatggccagcaacggcagcctgatcagcagcggcagccaggacagcgaggtgagcgaggagcagaagagagagaagatcctggagctgaagaagaaggagaagctgctgcaggagaagctgctgaagaaggtggaggagctgaagaagatctgcctgagagaggccgagctgaccggcaagatgcccaaggagtaccccctgaacatcggcgagaagcccccccaggtgagaagaagagtgggcaccgccttcaagctggacgacaacctgctgcccagcgaggaggaccccgccctgcaggagctggagagcaacttcctgatccagcagaagctggtggaggccgccaagaagctggccaacgagcccgacctgtgcaagaccgtgaagaagaagagaaagcaggactacaccgacgccatgaagaagctgcaggagatcgagaacgccatcaacgagtacagaatcagatgcggcaagaagcccagccagaaggccaccgtgctgcccgaggacatcatccccagcgagagcagcagcctgagcgacaccaccacctacgacgaccccagcgacgccttcaccttccccggccagagaagcagcagcgtgccccacagccccagaatcctgccccccaagagcctgggcatcgagagaatccacttcagaaagagcagcatcaacgagcagttcgtggacaccagacagagcagagagatgctgagcacccacagcagcccctacaagaccctggagagaagaccccagggcggcagaagcatgcccaccacccccgtgctgaccagaaacgcctacagcagcagccacctggagcccgagagcagcagccagcactgcagacagagaagcggcagcctggagagccagagccacctgctgagcgagatggacagcgacaagcccttcttcagcctgagcaagagccagagaagcagcagcaccgagatcctggacgacggcagcagctacaccagccagagcagcaccgagtactactgcgtgacccccgtgaccggcccctactacaccacccagaccctggacaccagaaccagaggcagaagaagaagcaagaagcagaacgtgagcaccagcaacagcggcagcatgcccaacctggcccagaaggacagcctgagaaacggcgtgtacagcaagagccaggagccccccagcagcagctactacatcgccggctacaccccctacgccgagtgcgacttctactacagcggcggctacgtgtacgagaacgacaccgagggccagtacagcgtgaaccccagctacagaagcagcgcccactacggctacgagagacagagagactacagcagaagcttccacgaggacgaggtggacagagtgccccacaacccctacgccaccctgagactgcccagaaaggccgccgccaagagcgagcacatcaccaagaacatccacaaggccctggtggccgagcacctgagaggctggtaccagagagccagcggccagaaggaccagggccacagcccccagaccagcttcgacagcgacagaggcagccagagatgcctgggcttcgccggcctgcaggtgccctgcagccccagcagcagagccagcagctacagcagcgtgagcagcaccaacgccagcggcaactggagaacccagctgaccatcggcctgagcgactacgagacccccgcccacagcagctacaccagctgctacggcaacgtgtacaaccccctgcccagccccagcagacagtacaccgagatcagccagctggacggcaccgacggcaaccagctggaggacaacctggagagcagcgagcagagactgttctggcacgaggacagcaagcccggcaccctggtgtag

SEQ ID NO: 279228 - DNA, 2061 bp, Artificial Sequence
  derived and/or modified sequence
atggctatttctcagcaccagttctatcttgaccgcaaacagagtaaggcgaagatccctagtgcaagatccctcgatgaaatagccatggacctgactgagactggcacccagagagcgagtaagttggtgaccttagagactaaatcgcagttcataatggctagtaacggcagccttatctcttcgggatctcaagattcagaagttagtgaagagcaaaagagggaaaagattctcgaacttaagaagaaagagaagctgctccaggagaagctccttaaaaaagtggaggagctcaaaaaaatttgtctgcgggaggccgagctcactgggaagatgccaaaggagtaccctctaaacatcggcgagaaacccccgcaggtgcgtcgaagagtgggaactgcctttaaactcgatgataacttgctgccatcagaggaggatcctgcactgcaggagctggagagcaatttcctgattcaacaaaagctagtggaggcagcgaagaagttagctaatgagcccgacctgtgcaagaccgtcaagaaaaaacgcaagcaggattatacagatgcaatgaaaaaactccaggaaatcgagaatgccatcaacgagtatcgaatcaggtgtggcaagaaaccttcccagaaagctactgtactgccagaagacatcatcccatcagaatcctcatcacttagcgacacaaccacatatgatgacccaagcgatgctttcactttccccggtcagagatcgtcctccgtgccacacagccctagaattctgccacctaaatcattagggattgagaggattcattttaggaaatccagcattaacgaacagttcgtggacacccggcagagtagagagatgcttagcacacacagcagcccctacaaaacactggagcggcgtccacaagggggccgttctatgcccactacccctgtactcacacggaatgcatactcatcctcacatttggaacctgaatcatctagccagcattgccgacaaagatccgggtccctggagtcccagtcccatttattgtctgagatggatagcgataaacctttcttttccctctccaagagccaacgctcgtcttccactgagatattggacgacggtagttcttacacttctcagtcatccacagaatattattgtgtgacaccagttaccgggccatattacacaacccagacactggacacaaggactagagggagacggcggagcaagaagcagaatgtgtctacttccaactctggaagcatgcccaacttggcccagaaagacagtctcaggaacggtgtctactccaagagccaagaaccaccctcaagcagttattatatcgccggctatactccttacgcagagtgcgacttttattattctggcggctatgtctatgaaaatgacacagaggggcagtattcggtaaatccctcgtaccggagtagtgcgcactacggatatgaacgccagagggattactcgcggagctttcatgaagacgaagtcgatagagtccctcacaatccctacgcaaccctgcgtctaccccgcaaggctgccgctaaatctgagcatattaccaagaatattcataaagccctagtcgccgagcacctgagaggatggtaccagcgagcatccggccaaaaggatcaaggccacagcccccagacctcattcgatagtgatcgtggcagtcaaagatgcttgggctttgcagggcttcaagtgccatgctccccttccagcagagctagcagttacagcagcgtatcaagcaccaatgcctctgggaactggcggacccaactcactatcggcttgtctgattatgaaacacctgcacacagctcctacacttcctgctacggcaatgtgtataacccgttaccctcccccagccggcaatacaccgaaattagccaactcgatggtaccgatggcaaccagctggaggacaacctggaaagctcagagcaaagactattctggcacgaggatagcaaacctggaactctcgtgtag

SEQ ID NO: 279229 - DNA, 2061 bp, Artificial Sequence
  derived and/or modified sequence
atggccatcagccagcaccagttctacctggacaggaagcagagcaaggccaagatccccagcgcccggagcctggatgagatcgccatggacctgacagaaacaggcacccagagggccagcaagctggtgaccctggagaccaagagccagttcatcatggccagcaatggcagcctcatcagcagcggcagccaggacagcgaggtgtctgaggagcagaagcgggagaagatcctggagctgaagaagaaggagaagctgctgcaggagaagctgctgaagaaggtggaggagctgaagaagatctgcctgcgggaggccgagctgaccgggaagatgcccaaggagtaccccctgaacatcggggagaagccaccccaggtgagaagaagagtgggcacagccttcaagctggatgacaacctgctgcccagcgaggaggaccctgccctgcaggagctggagagcaacttcctgatccagcagaagctggtggaggccgccaagaagctggccaatgaaccagacctgtgcaagacagtgaagaagaagaggaagcaggactacacagatgccatgaagaagctgcaggagattgaaaatgccatcaatgagtaccgcatccgctgtgggaagaagcccagccagaaggccaccgtgctgcctgaggacatcatccccagcgagagcagcagcctgagtgacaccaccacctatgatgaccccagtgatgccttcaccttccctggccagaggagcagctctgtgccccacagcccccgcatcctgccccccaagagcctgggcatcgagcgcatccacttcaggaagagcagcatcaatgagcagtttgtggacacccggcagagccgggagatgctgagcacccacagcagcccctacaagaccctggagcggcggccccagggcggccgctccatgcccaccacccctgtgctgaccagaaatgcctacagcagcagccacctggagcctgagagcagcagccagcactgccggcagaggagcggcagcctggagagccagagccacctgctgtctgagatggacagcgacaagcccttcttcagcctgagcaagagccagaggagcagcagcacagagatcctggatgatggcagcagctacaccagccagagcagcacagagtactactgtgtgacccctgtgacaggcccctactacaccacccagaccctggacaccaggacccggggcagaagaagaagcaagaagcagaatgtgtccaccagcaacagcggctccatgcccaacctggcccagaaggacagcctgagaaatggagtgtacagcaagagccaggagccccccagcagcagctactacatcgccggctacaccccctatgcagaatgtgacttctactacagcggcggctacgtgtatgaaaatgacacagagggccagtacagcgtgaaccccagctaccgcagcagcgcccactacggctatgagcggcagagggactacagccgctccttccatgaagatgaggtggacagagtgccccacaacccctatgccaccctgcggctgcccaggaaggccgccgccaagtctgagcacatcaccaagaacatccacaaggccctggtggccgagcacctgcggggctggtaccagagggccagcggccagaaggaccagggccacagcccccagaccagctttgacagcgaccggggcagccagcgctgcctgggctttgctggcctgcaggtgccctgcagccccagcagccgggccagcagctacagctctgtgagcagcaccaatgccagcggcaactggaggacccagctgaccatcggcctgagtgactatgagaccccagcccacagcagctacaccagctgctatggaaatgtgtacaaccccctgcccagccccagccggcagtacacagagatcagccagctggatggaacagatggcaaccagctggaggacaacctggagagcagcgagcagaggctcttctggcatgaggacagcaagccaggcaccctggtgtag

SEQ ID NO: 279230 - DNA, 2061 bp, Artificial Sequence
  derived and/or modified sequence
atggccatcagccagcaccagttctacctggaccggaagcagagcaaagcaaagattcctagtgccagatcactggatgagatcgccatggacctcacagagacaggaacacaacgagcctccaaactggtcacattggagaccaagagccagtttattatggcgtctaacggatcgttgatatcgagcggtagtcaagacagcgaagtatccgaagagcagaaaagggagaagattcttgaactaaagaaaaaagagaagctgctgcaggagaaattgctcaagaaggtggaggagctgaagaagatttgccttcgcgaagctgagctcacaggcaagatgccaaaagagtaccctctcaatataggcgaaaaaccaccccaggtgcggcgacgggtgggaaccgcgtttaagttggacgataatctgctcccctcagaagaggatccagccctacaggaactggaatctaattttctgatacagcagaagttggtggaggcagctaagaagctggccaacgaaccagacctctgcaagactgtgaagaagaaaaggaaacaagactacacagatgcgatgaaaaagctgcaagagattgagaacgcaattaacgagtacaggattcgttgcggcaaaaagcccagccagaaggctactgtgcttcccgaggacatcatcccctctgagagcagtagtctatccgataccaccacatacgatgacccgtctgacgccttcacattcccaggacagaggagctctagcgttcctcattcacctcgaatactgcctcctaagtccctgggcatcgaaagaattcattttaggaaatcctccatcaatgaacagttcgtagatacccgtcagtctcgggaaatgctgtctacccactcgtctccatataagaccctcgagagacgaccacagggaggcaggtcaatgccgaccaccccagtcttaactagaaacgcatactcctcctcccatctcgaacctgaatctagcagtcagcattgtcgccagaggtcagggagcctcgagtctcaatctcacctgttgtccgaaatggatagcgataaaccctttttttctctttcaaaatcacaacgctctagctcgaccgaaattctggacgatggatcaagttatacctcccagtcatcaacagagtattattgtgtgacacccgtaacgggtccttattacacaacccagacactggacacccgcacacggggacgacggcggtcaaagaagcagaacgtgtctacgagcaacagcggaagcatgccaaatctggcacagaaggactctctgcgcaatggtgtctatagcaagtctcaagaaccaccaagcagttcctactacattgctggttacactccatacgcagagtgcgacttttattacagtggcggttacgtttacgaaaacgatactgagggccaatattccgtgaacccaagctaccgcagcagtgctcattacggctatgaacggcagagggattactccagaagtttccacgaggacgaagttgacagagtgccacataatccctacgctaccctccgactccctcgcaaggcggccgctaaatcagagcatatcacaaagaacattcacaaggctctggtggccgagcatctaagagggtggtatcagcgagcgtcagggcagaaagatcagggccactctccgcaaacgtcgtttgactccgacagaggcagccagcggtgcctgggctttgccggactccaagtgccttgtagcccctcctcccgggcatcctcatacagcagcgtgtcttctactaacgcgagcggaaattggcggacccagctgaccattgggctgagcgactatgagacacccgcccactcctcctacacttcatgctatgggaatgtgtacaatccattgccaagtccttcgagacagtacaccgagatttcacagctggacgggactgatggaaaccagttggaggataacctagagtctagcgagcagcgactgttttggcacgaggactctaaaccagggacactggtgtag

SEQ ID NO: 279231 - DNA, 2061 bp, Artificial Sequence
  derived and/or modified sequence
atggccatttcacagcatcaattttaccttgatcggaagcagtcaaaagcaaaaatcccgtcagcacgatctttggacgagatcgccatggacctgacggagaccggcactcagagagccagtaagttggtgactctggagaccaagtctcaatttattatggccagcaatggaagcctgatatcttccggatcgcaggactccgaggttagtgaggagcagaaaagggaaaaaatcctggaattaaagaaaaaggaaaaacttttacaggagaaactactcaagaaagtggaggaactcaagaagatctgtttgagggaggctgaattgactggcaaaatgcccaaagagtatcctctgaacattggggagaaaccccctcaagtgcgtcggcgagtcggcacagcctttaaactggacgacaacttgcttccctcagaagaggaccccgcactccaggagctggagagcaatttcctgatccagcaaaagctggtggaggccgctaagaagctggcaaacgagccagacctgtgcaagactgtaaaaaagaagagaaaacaggattacacagatgccatgaagaaactgcaggaaattgagaatgcgattaacgagtacaggatccgctgcggaaagaaaccctcccagaaggctaccgtactgcccgaagacattattcccagcgagtcgagcagcctgagcgacacaacaacatatgatgatccatcagatgcctttacctttccaggccagagaagcagcagtgtcccacatagtcccaggattcttcctccaaagtccctgggtattgaacgtatccattttcgcaaatcgtccattaacgaacaattcgtggataccagacagtccagagagatgctctccacccatagctccccatataaaactttggagaggcgcccacagggcggtcgctcgatgcctactacaccagtcctgactcgcaacgcttactcctccagccatttagagcctgagagtagcagccagcactgccgacaacgatccggttcactggagtctcaatctcatctcttgtccgagatggatagcgacaaaccatttttcagtctcagtaagtcacagagatcatcatcgacggagatactggacgacggaagcagctacactagccagtcttctacagaatactactgcgttactccggtcaccggaccatactacaccacccaaacccttgatacacgtacccggggacggagaaggtcaaagaaacagaatgtcagcacaagtaactcaggttcaatgcccaatttggcacaaaaggatagtctgcgaaacggagtatactccaaatcccaggaacctccatcgagttcgtattatatcgccggatacacaccatacgcagaatgcgatttttactacagtggagggtacgtctatgaaaatgacaccgagggccaatacagcgtaaacccttcttaccgctcctctgcccattatggctatgagcgccagcgcgactactctcggtcgttccacgaggacgaagtggaccgagtacctcataacccctacgcgaccctcaggcttcccaggaaagcggcagctaagtctgagcacatcaccaaaaacattcataaggccctcgttgccgagcacttgagaggatggtatcagagggcatcaggacagaaagatcaggggcacagtccacagacctcttttgactctgaccgcggatcccagcgctgcctggggtttgccggattgcaagttccgtgttcccctagctctcgtgcatcatcttattccagcgtgtcctccacaaacgcttcgggtaactggcgcacccagctgacaataggtctgagtgattacgaaactccagctcatagcagttatacctcttgttacggaaacgtgtataatcctctgcctagtccatctcgtcagtataccgaaatttcccagcttgatggaacagatggtaatcaattagaagacaacttagaatcaagcgagcagagattattttggcatgaggattcgaagcctggcactctggtttag

SEQ ID NO: 279232 - DNA, 5132 bp, Artificial Sequence
  derived and/or modified sequence
atgatgacacctcaagttatcactccccagcaaatgcagcagatcctccagcaacaagtgctgagccctcagcagctccaggttctcctccagcagcagcaggccctcatgcttcaactgcagcagctctggaaagaagtgacaagtgctcatactgcagaagaaaccacaggcaacaatcacagcagtttggatctgaccacgacatgtgtctcctcctctgcaccttccaagacctccttaataatgaacccacatgcctctaccaatggacagctctcagtccacactcccaaaagggaaagtttgtcccatgaggagcacccccatagccatcctctctatggacatggtgtatgcaagtggccaggctgtgaagcagtgtgcgaagatttccaatcatttctaaaacatctcaacagtgagcatgcgctggacgatagaagtacagcccaatgtagagtacaaatgcaggttgtacagcagttagagctacagcttgcaaaagacaaagaacgcctgcaagccatgatgacccacctgcatgtgaagtctacagaacccaaagccgcccctcagcccttgaatctggtatcaagtgtcactctctccaagtccgcatcggaggcttctccacagagcttacctcatactccaacgaccccaaccgcccccctgactcccgtcacccaaggcccctctgtcatcacaaccaccagcatgcacacggtgggacccatccgcaggcggtactcagacaaatacaacgtgcccatttcgtcagcagatattgcgcagaaccaagaattttataagaacgcagaagttagaccaccatttacatatgcatctttaattaggcaggccattctcgaatctccagaaaagcagctaacactaaatgagatctataactggttcacacgaatgtttgcttacttccgacgcaacgcggccacgtggaagaatgcagtgcgtcataatcttagtcttcacaagtgttttgtgcgagtagaaaacgttaaaggggcagtatggacagtggatgaagtagaattccaaaaacgaaggccacaaaagatcagtggtaacccttcccttattaaaaacatgcagagcagccacgcctactgcacacctctcaatgcagctttacaggcttcaatggctgagaatagtatacctctatacactaccgcttccatgggaaatcccactctgggcaacttagccagcgcaatacgggaagagctgaacggggcaatggagcataccaacagcaacgagagtgacagcagtccaggcagatctcctatgcaagccgtgcatcctgtacacgtcaaagaagagcccctcgatccagaggaagctgaagggcccctgtccttagtgacaacagccaaccacagtccagattttgaccatgacagagattacgaagatgaaccagtaaacgaggacatggagtgactatcggggcgggccaaccccgagaatgaagattggaaaaaggaaaaaaaaaaaaacacgtcaaaagttagcagtgaaattgttctccatttgttgtacagtctggaggattttcactacgttttgacaactctgaaatgtgttaactcttagtgccatcaagaaccccatttgggagtatttttgatttttctactttttgttgaaaaaaggaatttgtactctgtgcattggatggacttgtttggtacttgggattttcctctcttaaccgtcaacatcagtgttgtaaatttgctaaactgattcacttttagcagcagactttgaactgcagtcctgccaacgttggacactgaggacgcccgacagagcttgtgcacctaagctgcagaccaagcctttgcccagaatttaaggattccaatggacgacctatttgcacagtactgcatgttgattatcactgcctttactccttttttttttttttttttttttttttttttgcttccagttgggatggggaaggcctttgtgtgtgtattggggggaggggttaaaaaataattatcccaaactttttaatgtattgctttttttttttttttttttccttctactataccattttaagttctgacctcaggcctccatttgggccgatggcctcttggaggcttaaagttttctgtaccttgtgatgaatgttaataggtgtttttattatacaaagctgaatgtcatttctcgtttgtagctttctgtcactcattccatcttccttcagacatcaccacgtttctctaaagtcagaaaacattccgttttggtctttttcaaaaaggtcccaaatgctgcactctacacatgaaggccctctcacacagacgtgacgtcctgccagaaagagaatgaatgacagaaaaaaaaaagagagacaaactctaggaacaatgccgattcattccacgcagcagtattgggggtggttcgggggaggggtgtttcggattttctttttttcttttcttttctttttttttttttgcagcaaccattaataaatgccaccacattctaccagcacaaggaaacataggcagcactgaaaaaaaaaaaaaagctcatattaattagactgacaatatggccttggaaggctctcccttgtggaaccaagttgccatgggccttgggtgctctgcgataacgggtgtgggttggttttgtttgcaaaatggccaaaaaaaaaaaccggcttccccgagcagctgccctgaaagtaggggtggcggcggcggcgctgagtttatacattagttcagacctacttggtggcattaaactgtttgaatgcaaattcgatttcagattgaacttgttaagggagttaacgagggctgagttcagcaaatgctaaagtgttaatttcaaatatgcaaatttggtactgcagtttgttatgcaatattatatcaccaacccagtatcacaaaaactcatagaagatatcatgtaggccctgggctttgggggggtcccaaacatggtatgcagaaatgtgatggttacaggtcagtacaacctcagtccttagaacccctccacacttcagctctgcacccactttcctgtcatttatttatataggactgtagttttttttagttcgagagcctttcgaagcttaatttatattctttctttgtaccttttttctaaaattaccaaagatattacacaaaggtaaattatgttctctgttttatgctttatctgatgaagccaaatatcctcttattgttgatcaaaggaggcaaaagaatttagaggcaaatgacaagcgataggctattgcaacctgagaaagagaactgctccttcatcgtaaatttagaagaccaagtagataatggaaccaaagttgttacttttttctagtagttatttttcctttttctttttgtgtacctctacagagaccaaaactcattctcttaaagagattttatggggctactgcagataaaaataggacacaatattaaaggagctacagaaggaagggagtcccatctcaaaaaaaaaatgaatgtatgccactgcaattagagtatccaataaaggagacagtttagagtcaggacagaaaagcttccataattgaactagattacataatagtatttctagaaaaagagatatttttagattgtatgccacttttgtttaagaactgtgctgtgatcactgtattaattttggtttatcttggcatatatccttcagtttgtttttatttttaatttttcctttttttccgattaggctttggtcagcatttttcatttaaagaaaagtaacactcccatccactcataagcttggtacaaaaacttctctggcagttacttttgaagcttcactctgctttctgtataaagggcagtctgtggtcacgcaagactttaaaaaaaaaaaaaaaaaaaaaaaaaaaaaaaaaaaaaaaaacttttccaggcagcttcatgatgtgcaggcagtagccagacagggtcatgggaagggggccctgtgcttctaaactgagtggttgctggttagtttggtattcaaaagaggataaaaatctggtagattagttcattctcagcatgtgtagctagacatgagtaaagataacagcatgagaaactgttagtacgcatacctcagttcaaacctttagggaatgattaaaatttaaaaaaaaaacatttcactcagttgcacttagtcgtatgtcttgcatgcttagtctaaagactgtagcaaaaaaaaaaaaaaaagaaaaattagattttacatatctttgcaggtatcacagccttgcagaagaaccaactgaaaaaaaaattctcaggctttacagcaagcaaacttcactatgatttttacaattctgattctgtatcccctgggggttatcccagttgcttctttaggatggggtttattacgttgtacatatatcccgatgtgtctgtgtgaatctttgtcttttttgggggagggcagagggcggttctttttttagatattgttcctaaaaaggaataaatgcatacacctgtttgtcaaaacacctttgctttttgtgcaactgctttatattaacgatactaaaaaaaaatagctttggaaaaaaaactactgtatgtaacggaattgcagaatatgctgcacatgtattttatttagttatccttgctttaagaatattggatgacatttcctgacatgtgggagggagaaactccctaactttttttttctgcttttaaactgtaacatagttgaagatttcttttttctgttctcattgattggagcattttgtacaggttttgtgtgtgtgtgtgtgtgtgtgtgcgcgcgtgcgtgtgtgttaatctgttttttgatacattcctatcccttgtgtttatcctaccactgccttcctggctatcttaaacaagttcatacatttgaaaagaaaaaaaaatgttgtttaaaaaatgttttctcctgctgcagtaaatattttgcatgatgaaattccagggtcacacttttccaagtttatcagtgaagtagtgattaacaatggggagtgtcaaaactattgaacttttgta

SEQ ID NO: 279233 - DNA, 1077 bp, Artificial Sequence
  derived and/or modified sequence
atgatgaccccacaggtgatcacaccgcaacaaatgcaacagatccttcaacagcaggtgctgtcgccgcagcaactgcaagttctgctccagcagcagcaggcattaatgctgcagcagcagcagctacaggagttttacaaaaagcagcaggagcaattacagctccagctattgcaacagcaacatgcagggaaacagcccaaggaacaacagcaggtagcaacccaacaactcgcatttcagcagcagctgctccaaatgcagcagctgcagcagcagcatctcttgtcacttcagcgacagggacttctgaccatccaacctggccagccggcactgccactccagcctctcgcgcagggaatgattcccactgagctccagcaactttggaaggaagtaacaagcgctcacacagccgaggagacgacagggaataatcacagtagccttgatctgactactacctgtgtgtcgagctcagcccccagcaagacgagcctgataatgaacccccacgccagcacaaatggtcaactcagtgtacatacacctaagagggagagcctgtcgcatgaggaacacccccactctcatcccttgtacggccacggagtgtgtaagtggccaggatgtgaggcagtgtgcgaagattttcagagttttctgaagcaccttaactctgagcatgccctggacgacaggtccactgctcaatgtagagtgcagatgcaggtcgtacagcaactggaattgcagctggctaaagacaaggagaggttacaggccatgatgacccacttacacgtcaagtctactgagcccaaagccgctccgcagccactgaacctggtgagtagcgtcacgttgagcaagtccgcatctgaagcgtcaccacaaagcctccctcacaccccaaccacccccacaccccctgacagcagacaccccaggccactctgtcatcataatcaccaacacgcccacggaggcacacacccccaagccgtcctgcgtcagattcagagggcgcacttcgtgtctcgttactgtgcagaaccccggatcttgtag

SEQ ID NO: 279234 - DNA, 1470 bp, Artificial Sequence
  derived and/or modified sequence
atgatgacgccacaggttatcaccccccaacagatgcagcaaattctgcagcagcaggtgttatcaccacagcagttacaggtgttgctacagcagcagcaggccctcatgctgcagctgcagcaactatggaaggaggttactagtgctcacactgcggaggaaaccaccggaaataaccacagctcgctcgatcttacaacgacgtgtgtttcatcctcagcgccaagcaagacatcgctaatcatgaatccgcatgcctcgactaatggacagctgtcggtgcacaccccaaagcgagaatcactatctcacgaagagcacccccactctcatccgctgtacgggcatggtgtctgcaagtggccgggctgtgaggccgtttgcgaggatttccagagctttctgaaacacttaaatagcgaacacgcgctggatgatcggagcactgcccaatgtcgggttcagatgcaggtcgttcagcaacttgaactgcagctcgccaaggacaaagagcggttgcaggcgatgatgacgcacttacacgttaaatcaacggaaccaaaggcagctcctcagcctttgaatctggtctccagtgtaactttgtcaaaatccgcctccgaggcctccccccagtcacttccccacacacccaccacaccgaccgcccctctcacgcccgtcacgcagggaccgagcgtcataacaaccacatccatgcataccgtgggcccaatcaggaggaggtattccgacaagtacaacgtgcccattagcagcgctgatatcgcgcagaatcaagagttctacaaaaacgcggaggtccgtcctccctttacatatgcatctcttattcgtcaagccattctggaatcacctgagaaacagcttaccttgaacgagatatataattggttcaccagaatgttcgcatattttcggcgcaatgccgcaacatggaagaacgctgtccgccataacttgtctctgcacaaatgttttgttcgagtggagaatgtgaaaggcgcggtatggaccgtcgatgaggttgaattccagaagcggaggcctcagaagatctctggaaatccatcattaattaagaatatgcagtcttcacacgcctattgcaccccgctgaatgcagcactacaggcgtcaatggctgaaaacagcatccctctgtacaccacggcttccatgggaaacccaaccttgggcaatctggccagcgcaatacgagaagagctgaacggcgctatggaacacaccaactctaatgagagcgacagcagtcctggccgcagccctatgcaagctgtgcatccagttcatgtcaaggaggagcctctcgaccccgaggaggctgaaggccctctgtcgttagttactactgctaaccactcacccgattttgaccatgatcgggactatgaagacgagcctgtgaacgaagacatggaatag

SEQ ID NO: 279235 - DNA, 675 bp, Artificial Sequence
  derived and/or modified sequence
atgatgactccccaggtgatcacccctcagcagatgcagcagattctgcagcagcaggtgctgtctccacagcagctgcaagtgctgcttcaacaacaacaagcacttatgctccagcagcaacagctgcaagagttctataaaaagcagcaggaacagctccagctccagctgctgcaacagcagcacgccgggaaacagccgaaggaacagcaacaggtcgctacgcagcaactcgccttccagcaacagctattacagatgcagcagctgcagcagcagcatctgttgtcgctccagaggcaggggctgttaaccatccagcctgggcagcccgcattgccattacagcccctggctcaaggaatgatacctaccgaacttcagcagctatggaaggaggtgactagcgctcacacggccgaagagaccactggaaacaaccattcaagtttggacttgaccactacatgcgtgtcaagctccgctccctcaaagacttcgctgatcatgaacccacatgcaagcacaaatggtcaactgtccgtgcatactcccaaaagagaatctctatcacatgaggagcatcctcatagtcaccccttgtatggccacggcgtttgtaagtggcccggatgcgaggccgtatgtgaggacttccagagctttctctag

SEQ ID NO: 279236 - DNA, 1077 bp, Artificial Sequence
  derived and/or modified sequence
atgatgaccccccaggtgatcaccccccagcagatgcagcagatcctgcagcagcaggtgctgagcccccagcagctgcaggtgctgctgcagcagcagcaggccctgatgctgcagcagcagcagctgcaggagttctacaagaagcagcaggagcagctgcagctgcagctgctgcagcagcagcacgccggcaagcagcccaaggagcagcagcaggtggccacccagcagctggccttccagcagcagctgctgcagatgcagcagctgcagcagcagcacctgctgagcctgcagaggcagggcctgctgaccatccagcccggccagcctgccctgcccctgcagcccctggcccagggcatgatccccacagagctgcagcagctgtggaaggaggtgaccagcgcccacacagctgaggagaccactggaaacaaccacagcagcctggacctgaccaccacctgtgtgagcagcagcgcccccagcaagaccagcctcatcatgaacccccacgccagcaccaacggccagctgtctgtgcacacccccaagcgggagagcctgagccatgaggagcacccccacagccaccccctgtatggccatggagtgtgcaagtggccaggctgtgaggccgtgtgtgaggacttccagagcttcctgaagcacctgaacagcgagcacgccctggatgacaggagcacagcccagtgccgggtgcagatgcaggtggtgcagcagctggagctgcagctggccaaggacaaggagcggctgcaggccatgatgacccacctgcacgtgaagagcacagagcccaaggccgccccccagcccctgaacctggtgtcctctgtgaccctgagcaagagcgccagcgaggccagcccccagagcctgccccacacccccaccacccccaccccaccagacagccgccacccccggcccctgtgccaccacaaccaccagcacgcccacggcggcacccacccccaggccgtgctgcggcagatccagagggcccactttgtgagccgctactgtgccgagccccgcatcctgtag

SEQ ID NO: 279237 - DNA, 1470 bp, Artificial Sequence
  derived and/or modified sequence
atgatgaccccccaggtgatcaccccccagcagatgcagcagatcctgcagcagcaggtgctgagcccccagcagctgcaggtgctgctgcagcagcagcaggccctgatgctgcagctgcagcagctgtggaaggaggtgaccagcgcccacacagctgaggagaccactggaaacaaccacagcagcctggacctgaccaccacctgtgtgagcagcagcgcccccagcaagaccagcctcatcatgaacccccacgccagcaccaacggccagctgtctgtgcacacccccaagcgggagagcctgagccatgaggagcacccccacagccaccccctgtatggccatggagtgtgcaagtggccaggctgtgaggccgtgtgtgaggacttccagagcttcctgaagcacctgaacagcgagcacgccctggatgacaggagcacagcccagtgccgggtgcagatgcaggtggtgcagcagctggagctgcagctggccaaggacaaggagcggctgcaggccatgatgacccacctgcacgtgaagagcacagagcccaaggccgccccccagcccctgaacctggtgtcctctgtgaccctgagcaagagcgccagcgaggccagcccccagagcctgccccacacccccaccacccccacagcccccctgacccctgtgacccagggccccagcgtcatcaccaccacctccatgcacacagtgggccccatcagaagacgctacagcgacaagtacaacgtgcccatcagcagcgctgacatcgcccagaaccaggagttctacaagaatgctgaggtgcggccccccttcacctacgccagcctcatccggcaggccatcctggagagccctgagaagcagctgaccctgaatgagatctacaactggttcaccaggatgtttgcctacttcagaagaaatgctgccacctggaagaatgctgtgcgccacaacctgagcctgcacaagtgctttgtgcgggtggagaatgtgaagggagctgtgtggacagtggatgaggtggagttccagaagaggcggccccagaagatcagcggcaaccccagcctcatcaagaacatgcagagcagccacgcctactgcacccccctgaatgctgccctgcaggcctccatggctgaaaattccatccccctgtacaccacagcctccatgggcaaccccaccctgggcaacctggccagcgccatccgggaggagctgaatggagccatggagcacaccaacagcaatgaaagtgacagcagccctggccgcagccccatgcaggccgtgcaccctgtgcacgtgaaggaggagcccctggaccctgaggaggccgagggccccctgagcctggtgaccacagccaaccacagcccagactttgaccatgaccgggactatgaagatgagcctgtgaatgaagacatggagtag

SEQ ID NO: 279238 - DNA, 675 bp, Artificial Sequence
  derived and/or modified sequence
atgatgaccccccaggtgatcaccccccagcagatgcagcagatcctgcagcagcaggtgctgagcccccagcagctgcaggtgctgctgcagcagcagcaggccctgatgctgcagcagcagcagctgcaggagttctacaagaagcagcaggagcagctgcagctgcagctgctgcagcagcagcacgccggcaagcagcccaaggagcagcagcaggtggccacccagcagctggccttccagcagcagctgctgcagatgcagcagctgcagcagcagcacctgctgagcctgcagaggcagggcctgctgaccatccagcccggccagcctgccctgcccctgcagcccctggcccagggcatgatccccacagagctgcagcagctgtggaaggaggtgaccagcgcccacacagctgaggagaccactggaaacaaccacagcagcctggacctgaccaccacctgtgtgagcagcagcgcccccagcaagaccagcctcatcatgaacccccacgccagcaccaacggccagctgtctgtgcacacccccaagcgggagagcctgagccatgaggagcacccccacagccaccccctgtatggccatggagtgtgcaagtggccaggctgtgaggccgtgtgtgaggacttccagagcttcctgtag

SEQ ID NO: 279239 - DNA, 1077 bp, Artificial Sequence
  derived and/or modified sequence
atgatgaccccccaggtgatcaccccccagcagatgcagcagatcctccagcagcaggtgctcagccctcagcagcttcaggtgcttcttcagcagcagcaggccctgatgctgcagcagcagcaactccaagagttctataaaaaacagcaggagcagcttcaactgcagcttttgcagcagcagcacgcaggcaagcaaccgaaagagcagcagcaagtggccactcagcagctggcctttcagcagcaactgctccaaatgcagcagctccaacagcagcaccttctgtcactgcaacgccagggcctgctgactattcagccgggccaacccgctctgccgttgcagccccttgcacaaggaatgatccctacagagctgcagcagctgtggaaagaagtcacctccgcacacaccgccgaggagaccacaggtaataatcactcatctctggacctgaccactacgtgtgtctcttcctctgccccgagcaaaacttccctaatcatgaatccccatgccagcactaatggccagctgtcagtacacacccctaagcgggaatctttgagtcacgaagagcatccacattctcacccattgtacggccatggagtgtgcaagtggcccggatgcgaggctgtttgcgaagactttcagtctttcctcaagcatctgaattccgagcacgcattggacgaccggagcaccgctcaatgtcgagtgcagatgcaggttgtccaacaattagagctgcaacttgccaaggacaaagagagattacaggcgatgatgacacacctccacgtcaaaagcacagagcccaaggccgcaccacagcccctcaatttagtgagttcagtaacacttagcaaatcggcttccgaagcctcccctcagagtttacctcatactcctactactcctacccctcctgactcacgccatcctcgtccactgtgtcaccataatcaccagcatgctcacggggggacacatcctcaggcggtattgaggcagatccagagagctcactttgtctctcgttactgcgctgagcccaggatcctgtag

SEQ ID NO: 279240 - DNA, 1470 bp, Artificial Sequence
  derived and/or modified sequence
atgatgaccccccaggtgatcaccccccagcagatgcagcagatcttgcaacagcaggtcctgagtccccagcagctgcaggttctgctccagcagcagcaggccctgatgcttcaactgcagcagttgtggaaggaagtgacatctgcccacaccgctgaggagacaacagggaacaatcatagttcactggatctgacaacaacctgcgtttcatctagcgctcccagcaaaacatctctgatcatgaatccacacgccagcacaaacggccagttatctgttcacacaccaaagagagagtccctctcacatgaagaacaccctcactcccaccctctgtatggtcacggcgtatgcaagtggcctggatgcgaagctgtctgcgaggacttccagtcgttcctgaagcatctgaacagtgagcatgccttggatgaccgcagcaccgcgcagtgccgcgttcaaatgcaggtggtccagcagctggagttacaactggctaaagataaggagagactccaggctatgatgacgcacctccacgtgaaatcaacagagcccaaagccgccccccagccactcaacctggtgtcttcagtgaccctctccaagagtgcatccgaggcctccccccaaagtctccctcatacccccacaaccccaacagcaccccttacccccgtcacacagggcccaagtgtgattaccaccactagcatgcatactgtcggcccgatccgcagacgatactcagacaaatacaatgttcctatctcttccgctgacattgctcagaaccaggagttctataagaacgcggaggtgcgccccccattcacatacgcgagcctgatcagacaggctattcttgaatccccggagaaacaactgacactgaacgaaatctataattggtttacgcgtatgttcgcctattttcgacgaaatgctgctacttggaaaaacgccgtaaggcacaatctgtcgctgcataagtgcttcgtgagagtcgaaaacgtcaaaggggccgtgtggacagtggacgaggtagaattccagaagagaagaccacagaaaattagcggcaatcctagccttattaaaaacatgcagagttctcacgcatactgcacgccgttaaatgctgcgctgcaggccagtatggccgaaaatagcatccctttgtacaccaccgcgtcaatgggtaatcctaccctgggcaacctcgccagtgccatccgagaggagctgaacggcgcgatggaacacactaattctaatgagtcagacagttccccgggcaggagtccaatgcaggccgtgcaccctgtgcatgtgaaggaggagccacttgacccggaggaggccgaagggcctctttcactcgtaacaaccgctaatcatagccccgattttgaccacgacagggattatgaagatgaacctgtgaacgaggatatggaatag

SEQ ID NO: 279241 - DNA, 675 bp, Artificial Sequence
  derived and/or modified sequence
atgatgaccccccaggtgatcaccccccagcagatgcagcagatcctacaacaacaagtgctctctccccagcagcttcaggttctcctgcaacagcaacaagctctgatgctgcagcaacagcaactacaggaattctataagaagcagcaggagcagcttcaactgcagctgctgcaacagcaacatgccggaaaacagccaaaggagcaacagcaggttgccacccaacaactagccttccagcaacagcttctgcaaatgcagcaactacagcagcaacacctgttgtcattgcagcggcaaggcctcctcacaatacagcccggccagcccgcgttgccgctgcagccactagctcagggtatgattcccactgaactccagcaactctggaaagaggtcacgagtgcacatacagctgaagaaaccaccgggaacaaccattcctcgctggacctgaccaccacttgcgtgtccagctccgctccatccaaaacaagtctgatcatgaatccccacgcctctactaatgggcagttatcggtgcatacccctaagagggagtcactctcgcacgaagagcacccacacagccatcctctttatgggcatggggtctgtaagtggcccgggtgcgaagcagtttgtgaggatttccagagtttcctgtag

SEQ ID NO: 279242 - DNA, 1077 bp, Artificial Sequence
  derived and/or modified sequence
atgatgactccccaggtgattactcctcagcagatgcagcaaattctacagcaacaggtcctgtcccctcaacagctgcaagtgctgcttcagcaacagcaagctctcatgcttcagcagcagcagttgcaggaattctacaagaaacaacaggagcagctccagctccagctactgcaacagcagcatgccggaaagcagccaaaagagcagcagcaggtcgccacccagcagctggcgttccagcagcagctgctgcagatgcagcagctgcagcagcaacatctgttgtcacttcagcggcagggcctgttaacaattcagccaggccagccggctctgcccctgcagccacttgctcagggcatgatacctaccgaactgcagcagctgtggaaggaggtgacctccgcccatacagcggaagagactactggtaataatcatagcagcctagacctgactaccacatgcgtgagtagctccgctccttccaaaaccagtctaattatgaatccacatgcttctacaaacggccagctgtcggttcacacccctaagagagagtctctgagtcacgaagaacaccctcatagtcacccactgtacgggcacggagtctgtaagtggccgggttgcgaggcagtttgtgaggactttcaatcatttctgaaacacctcaacagtgagcacgccctggacgacaggagcactgcccagtgccgggttcagatgcaggtagtccagcagctggaattgcagctggccaaggacaaggagcgcctgcaggccatgatgactcatcttcatgtgaagagtactgaaccaaaagcggcaccacagcctcttaatcttgttagctccgtaaccctaagtaagtcagcgagtgaggcaagtccgcagagtctccctcacacccctaccacccccacccccccagatagccgccaccctcgccctctttgccatcacaatcaccagcatgcgcatggcggaactcatccgcaggccgtgttgcgccagattcagagagcccattttgtgtcacgttattgcgctgaaccacggattctgtag

SEQ ID NO: 279243 - DNA, 1470 bp, Artificial Sequence
  derived and/or modified sequence
atgatgactcctcaagtgatcaccccgcagcagatgcagcagatactccagcagcaggtgttgagcccacagcaattacaggtcttattacagcagcagcaggcccttatgctacaattgcagcagctgtggaaggaagtgaccagtgctcacaccgctgaagagactactggaaataatcactcgagcctggacctgacgactacgtgcgtgagcagttctgccccttccaagacctccctgatcatgaacccacacgctagcacaaacggccagctcagtgtgcatacccccaagagagagtccttaagccatgaggagcatccccattctcatccgctctatgggcatggggtgtgcaagtggccgggttgtgaggcggtatgcgaggattttcagtcatttcttaaacatctgaatagcgaacacgctttggacgaccggtctaccgcacagtgccgggtgcagatgcaggtggtgcaacagctggagctgcagctggcaaaggacaaggagcggctgcaggccatgatgacccacctccatgtgaaatccactgagccaaaggcagcccctcaacccctgaacttagtctcttccgtcacattaagcaagagcgcctccgaggcatctccacagtccctccctcataccccaacaacccccacagccccactcacccccgtgacacagggacctagcgtgattacaactaccagcatgcataccgttggcccaatccggcgacggtactccgacaaatataatgtcccaatttcaagcgccgatatcgcccaaaaccaggaattctacaagaacgctgaggtgaggcccccttttacatacgcatcccttatccgccaggccatcttagagtccccagaaaagcaactgacattgaatgaaatttacaactggttcaccagaatgtttgcttactttcggcgaaatgctgccacatggaagaacgcagtcagacacaatttgagcctgcacaagtgcttcgtgcgcgtcgaaaatgtgaaaggggcagtatggacagttgatgaggtggagttccaaaagcgccgtcctcagaaaatctccgggaacccctctttgatcaagaacatgcagtcaagtcacgcatattgtacccccctgaacgcagctctgcaagcttcaatggctgagaattctatcccactctacaccaccgcctcaatggggaacccgacactggggaatctggcctctgcgatccgcgaagaactgaatggggcaatggaacacaccaatagcaacgaatccgatagctcaccgggtcgctcccctatgcaagcggtgcaccccgtccacgtcaaagaagaacccctggaccccgaggaagccgaaggccctttatctctcgtcaccaccgctaaccacagcccagacttcgaccacgacagggactatgaggacgagcctgttaacgaagacatggaatag

SEQ ID NO: 279244 - DNA, 675 bp, Artificial Sequence
  derived and/or modified sequence
atgatgacaccccaggtgattactccccagcagatgcagcagatattacaacagcaggtattaagcccccagcagctccaagtgctcctccagcagcaacaagctctgatgctgcagcagcagcagcttcaggagttttacaaaaagcagcaggaacagctgcaactgcaattactgcaacagcaacatgccggaaaacagccaaaagagcaacagcaagtcgctactcaacagctcgcttttcagcagcaactgctccaaatgcagcagctccaacagcagcacctactgagcctacagcgccagggccttctcactattcagccaggccagccagctctacccctacagcccttggcacagggcatgatacctaccgaattacagcagctttggaaggaagtgacctcggctcacaccgctgaggagacgacaggcaacaatcacagttctttagacctaaccacaacttgcgtgtcttcatcagccccttcaaagacaagcctcatcatgaacccacatgctagcacaaacgggcagctctcagtgcatacgcccaaaagagagagcttgtcacacgaagagcatccacacagtcacccactgtacggccatggagtctgcaagtggccaggatgtgaggcagtctgcgaggacttccagagctttttgtag

SEQ ID NO: 279245 - DNA, 1077 bp, Artificial Sequence
  derived and/or modified sequence
atgatgaccccccaggtgatcaccccccagcagatgcagcagatcctgcagcagcaggtgctgagcccccagcagctgcaggtgctgctgcagcagcagcaggccctgatgctgcagcagcagcagctgcaggagttctacaagaagcagcaggagcagctgcagctgcagctgctgcagcagcagcacgccggcaagcagcccaaggagcagcagcaggtggccacccagcagctggccttccagcagcagctgctgcagatgcagcagctgcagcagcagcacctgctgagcctgcagagacagggcctgctgaccatccagcccggccagcccgccctgcccctgcagcccctggcccagggcatgatccccaccgagctgcagcagctgtggaaggaggtgaccagcgcccacaccgccgaggagaccaccggcaacaaccacagcagcctggacctgaccaccacctgcgtgagcagcagcgcccccagcaagaccagcctgatcatgaacccccacgccagcaccaacggccagctgagcgtgcacacccccaagagagagagcctgagccacgaggagcacccccacagccaccccctgtacggccacggcgtgtgcaagtggcccggctgcgaggccgtgtgcgaggacttccagagcttcctgaagcacctgaacagcgagcacgccctggacgacagaagcaccgcccagtgcagagtgcagatgcaggtggtgcagcagctggagctgcagctggccaaggacaaggagagactgcaggccatgatgacccacctgcacgtgaagagcaccgagcccaaggccgccccccagcccctgaacctggtgagcagcgtgaccctgagcaagagcgccagcgaggccagcccccagagcctgccccacacccccaccacccccaccccccccgacagcagacaccccagacccctgtgccaccacaaccaccagcacgcccacggcggcacccacccccaggccgtgctgagacagatccagagagcccacttcgtgagcagatactgcgccgagcccagaatcctgtag

SEQ ID NO: 279246 - DNA, 1470 bp, Artificial Sequence
  derived and/or modified sequence
atgatgaccccccaggtgatcaccccccagcagatgcagcagatcctgcagcagcaggtgctgagcccccagcagctgcaggtgctgctgcagcagcagcaggccctgatgctgcagctgcagcagctgtggaaggaggtgaccagcgcccacaccgccgaggagaccaccggcaacaaccacagcagcctggacctgaccaccacctgcgtgagcagcagcgcccccagcaagaccagcctgatcatgaacccccacgccagcaccaacggccagctgagcgtgcacacccccaagagagagagcctgagccacgaggagcacccccacagccaccccctgtacggccacggcgtgtgcaagtggcccggctgcgaggccgtgtgcgaggacttccagagcttcctgaagcacctgaacagcgagcacgccctggacgacagaagcaccgcccagtgcagagtgcagatgcaggtggtgcagcagctggagctgcagctggccaaggacaaggagagactgcaggccatgatgacccacctgcacgtgaagagcaccgagcccaaggccgccccccagcccctgaacctggtgagcagcgtgaccctgagcaagagcgccagcgaggccagcccccagagcctgccccacacccccaccacccccaccgcccccctgacccccgtgacccagggccccagcgtgatcaccaccaccagcatgcacaccgtgggccccatcagaagaagatacagcgacaagtacaacgtgcccatcagcagcgccgacatcgcccagaaccaggagttctacaagaacgccgaggtgagaccccccttcacctacgccagcctgatcagacaggccatcctggagagccccgagaagcagctgaccctgaacgagatctacaactggttcaccagaatgttcgcctacttcagaagaaacgccgccacctggaagaacgccgtgagacacaacctgagcctgcacaagtgcttcgtgagagtggagaacgtgaagggcgccgtgtggaccgtggacgaggtggagttccagaagagaagaccccagaagatcagcggcaaccccagcctgatcaagaacatgcagagcagccacgcctactgcacccccctgaacgccgccctgcaggccagcatggccgagaacagcatccccctgtacaccaccgccagcatgggcaaccccaccctgggcaacctggccagcgccatcagagaggagctgaacggcgccatggagcacaccaacagcaacgagagcgacagcagccccggcagaagccccatgcaggccgtgcaccccgtgcacgtgaaggaggagcccctggaccccgaggaggccgagggccccctgagcctggtgaccaccgccaaccacagccccgacttcgaccacgacagagactacgaggacgagcccgtgaacgaggacatggagtag

SEQ ID NO: 279247 - DNA, 675 bp, Artificial Sequence
  derived and/or modified sequence
atgatgaccccccaggtgatcaccccccagcagatgcagcagatcctgcagcagcaggtgctgagcccccagcagctgcaggtgctgctgcagcagcagcaggccctgatgctgcagcagcagcagctgcaggagttctacaagaagcagcaggagcagctgcagctgcagctgctgcagcagcagcacgccggcaagcagcccaaggagcagcagcaggtggccacccagcagctggccttccagcagcagctgctgcagatgcagcagctgcagcagcagcacctgctgagcctgcagagacagggcctgctgaccatccagcccggccagcccgccctgcccctgcagcccctggcccagggcatgatccccaccgagctgcagcagctgtggaaggaggtgaccagcgcccacaccgccgaggagaccaccggcaacaaccacagcagcctggacctgaccaccacctgcgtgagcagcagcgcccccagcaagaccagcctgatcatgaacccccacgccagcaccaacggccagctgagcgtgcacacccccaagagagagagcctgagccacgaggagcacccccacagccaccccctgtacggccacggcgtgtgcaagtggcccggctgcgaggccgtgtgcgaggacttccagagcttcctgtag

SEQ ID NO: 279248 - protein, 320 aa, Artificial Sequence
  derived and/or modified sequence
MSCAEVMYHPQPYGASQYLPNPMAATTCPTAYYQPAPQPGQQKKLAVFSKMQDSLEVTLPSKQEEEDEEEEEEEKDQPAEMEYLNSRCVLFTYFQGDIGSVVDEHFSRALGQAITLHPESAISKSKMGLTPLWRDSSALSSQRNSFPTSFWTSSYQPPPAPCLGGVHPDFQVTGPPGTFSAADPSPWPGHNLHQTGPAPPPAVSESWPYPLTSQVSPSYSHMHDVYMRHHHPHAHMHHRHRHHHHHHHPPAGSALDPSYGPLLMPSVHAARIPAPQCDITKTEPTTVTSATSAWAGAFHGTVDIVPSVGFDTGWSAMARS

SEQ ID NO: 279249 - DNA, 963 bp, Artificial Sequence
  derived and/or modified sequence
atgagctgcgccgaggtgatgtaccacccccagccctacggcgccagccagtacctgcccaaccccatggccgccaccacctgccccaccgcctactaccagcccgccccccagcccggccagcagaagaagctggccgtgttcagcaagatgcaggacagcctggaggtgaccctgcccagcaagcaggaggaggaggacgaggaggaggaggaggaggagaaggaccagcccgccgagatggagtacctgaacagcagatgcgtgctgttcacctacttccagggcgacatcggcagcgtggtggacgagcacttcagcagagccctgggccaggccatcaccctgcaccccgagagcgccatcagcaagagcaagatgggcctgacccccctgtggagagacagcagcgccctgagcagccagagaaacagcttccccaccagcttctggaccagcagctaccagcccccccccgccccctgcctgggcggcgtgcaccccgacttccaggtgaccggcccccccggcaccttcagcgccgccgaccccagcccctggcccggccacaacctgcaccagaccggccccgcccccccccccgccgtgagcgagagctggccctaccccctgaccagccaggtgagccccagctacagccacatgcacgacgtgtacatgagacaccaccacccccacgcccacatgcaccacagacacagacaccaccaccaccaccaccacccccccgccggcagcgccctggaccccagctacggccccctgctgatgcccagcgtgcacgccgccagaatccccgccccccagtgcgacatcaccaagaccgagcccaccaccgtgaccagcgccaccagcgcctgggccggcgccttccacggcaccgtggacatcgtgcccagcgtgggcttcgacaccggctggagcgccatggccagaagctag

SEQ ID NO: 279250 - DNA, 963 bp, Artificial Sequence
  derived and/or modified sequence
atgagttgtgccgaggtgatgtaccacccacagccttacggcgcgtcccagtacttgccaaaccccatggctgccacaacctgtccgactgcctactatcagcctgctcctcagcctggccaacagaagaagcttgctgtattcagtaagatgcaggatagtctggaggttacactcccatctaaacaagaggaggaggatgaggaggaagaggaggaggaaaaggatcagcccgccgaaatggaatatctcaactcccgctgcgttctgtttacatactttcagggcgacattggatctgtagtggacgagcatttttcgagggccctaggccaggcaataaccttgcatccagaatccgccatcagtaagagtaagatggggcttacacctctttggcgggattcttccgccttgagctctcagaggaatagctttcctaccagcttctggacaagctcctaccagccccctcctgctccttgcctaggcggcgtccatccggacttccaggtgaccgggccacctgggacattttctgctgcagatccgtccccctggccgggacataatctgcaccagactggcccagcgccacctccggctgtcagcgagtcctggccatatccactgacttcacaagtgtcacctagctattcccatatgcatgatgtgtatatgcggcatcatcatcctcacgcccatatgcaccataggcaccgtcaccatcaccatcaccaccaccccccagcaggatccgcacttgatccttcttatgggcctctgctcatgcctagcgtgcatgctgctcggatacccgctccgcagtgcgatattacaaagaccgaacccaccaccgtgacatcggcaacctcagcgtgggcgggagcctttcatggaaccgtggatattgtgcccagcgtgggcttcgataccggatggagcgctatggcccggtcctag

SEQ ID NO: 279251 - DNA, 963 bp, Artificial Sequence
  derived and/or modified sequence
atgagctgtgccgaggtgatgtaccacccccagccctatggagccagccagtacctgcccaaccccatggccgccaccacctgccccacagcctactaccagcctgccccccagcccggccagcagaagaagctggccgtgttcagcaagatgcaggacagcctggaggtgaccctgcccagcaagcaggaggaggaggatgaggaggaggaggaggaggagaaggaccagcctgctgagatggagtacctgaacagccgctgtgtgctcttcacctacttccagggcgacatcggctctgtggtggatgagcacttcagccgggccctgggccaggccatcaccctgcaccctgagagcgccatcagcaagagcaagatgggcctgacccccctgtggagggacagcagcgccctgagcagccagagaaattccttccccaccagcttctggaccagcagctaccagcccccaccagccccctgcctgggcggcgtgcacccagacttccaggtgactggacctcctggcaccttctctgctgctgaccccagcccctggccaggccacaacctgcaccagacaggccctgcccctcctcctgctgtgtctgagagctggccctaccccctgaccagccaggtgagccccagctacagccacatgcatgatgtgtacatgaggcaccaccacccccacgcccacatgcaccaccgccaccgccaccaccaccaccaccaccaccccccagctggcagcgccctggaccccagctatggccccctgctgatgcccagcgtgcatgctgcccgcatcccagccccccagtgtgacatcaccaagacagagcccaccaccgtgaccagcgccaccagcgcctgggccggggccttccatggaacagtggacatcgtgcccagcgtgggctttgacaccggctggagcgccatggcccggagctag

SEQ ID NO: 279252 - DNA, 963 bp, Artificial Sequence
  derived and/or modified sequence
atgagctgcgccgaggtgatgtaccacccccagccctacggcgcctcacagtacttgcccaatccgatggctgccaccacctgtcccactgcttactaccaacctgctccccagccaggacagcagaaaaaattggccgtgttctccaaaatgcaggattcgcttgaggtgacattgccctcgaagcaggaggaagaagatgaagaggaggaagaggaagaaaaggaccaacctgccgagatggaataccttaattccagatgcgtcctttttacgtatttccaaggcgacatcgggtcagtggttgacgagcacttctcgcgtgctctgggccaggccataaccttgcaccctgagagcgctattagcaaaagtaaaatgggcctcacgccactctggcgagattcctctgccttgtccagccagaggaactcattcccaacttccttctggaccagttcgtatcaaccccctcctgctccatgtctgggcggcgtacatccagatttccaggtgaccggcccacccggcaccttctcagccgcagacccatccccctggcctggacataatcttcaccagaccggcccagccccacctcccgctgtatcggagtcatggccttacccattgacctcccaggtgtccccctcctattctcacatgcatgatgtgtatatgcgccatcatcatccccacgcgcacatgcaccacaggcataggcaccaccaccatcaccatcacccccccgcgggcagcgccttagatccctcttacggacctctactaatgccatctgtacatgccgcaagaatcccagcaccccagtgtgatatcacaaagacggaacctacaacggtgacaagcgcaactagcgcctgggcaggagcctttcacgggacagtggacatagtccccagcgtgggatttgatactggttggtctgcaatggcccggtcatag

SEQ ID NO: 279253 - DNA, 963 bp, Artificial Sequence
  derived and/or modified sequence
atgtcctgcgccgaggtgatgtatcacccacagccttacggggcaagtcagtacctccctaaccctatggccgcaactacatgccccacagcatactatcaacccgcacctcagcccggacagcagaagaagctggcagtgtttagtaaaatgcaggatagcctggaggtgacccttccaagtaagcaagaggaggaggacgaggaggaggaggaggaagagaaagaccagccagcagaaatggagtacctgaactccagatgcgtgctttttacctactttcagggggatatcggctccgtcgttgatgagcacttttctagagcactaggtcaggcgatcaccctccatccggagagcgcgatttccaagtctaagatgggcctgaccccactgtggagagactcctcggcactttccagccagaggaactcgtttcccacctccttctggacctcgagctaccagccaccgcctgcaccatgtcttggaggggtccatcctgacttccaggttacaggcccaccaggcaccttctcagccgctgatccttccccctggccaggccacaacctgcaccagaccggtcccgcacccccaccagctgtctccgagtcctggccgtatcccctaacaagccaggtttcacctagctattctcatatgcacgatgtctacatgcgccatcaccacccacatgcgcacatgcaccataggcacagacaccaccatcatcatcaccaccccccagctggcagcgccctagacccgtcttacggacctctgctaatgccttccgtccacgctgctcggattccggcaccacaatgtgatatcactaaaaccgagcctaccactgtcacatctgccactagcgcatgggctggggctttccatgggactgtggatatagtcccatccgtgggctttgataccgggtggtcagctatggctcgctcctag

SEQ ID NO: 279254 - DNA, 2475 bp, Artificial Sequence
  derived and/or modified sequence
ggctgcccgacccgggcctgggctgtggctgtgactggcgctgccgtgggcgccgcagccctcgcgggagccggacgcggtaatgccccagcggcgcagcgggcggctgcgtccctgagccgctatataagcgcggcagggaacatccggaggggctgaagatgaaggtgcccgcgcatgggcccccgctgattgccagtccctcccgaccccgcgccccgcgcggagcccgaggccgccgaggacccgccttcgccgcagtagcagctggagcagcgacagaggcggcagctgcggcggcggcggcgcccgcgcccctcgcgccagcgcgtagagcggcggcggcagctcgggggccgccactgccccggctgccatgagttgtgcggaggtgatgtatcacccccagccttatggagcgtcccagtatctgcccaaccccatggcagcgacaacctgccccacagcctactatcagccggcgccccaacctggccagcagaagaagttagcggtattcagcaagatgcaggactctctggaagtcacccttcccagcaaacaagaggaggaggatgaggaggaggaggaggaggagaaagaccagcctgccgagatggagtaccttaactctcgctgtgtccttttcacttatttccagggagacattgggtcagtagtggatgaacacttctcaagagctttgggccaagccatcaccctccatccagaatctgccatttcaaaaagcaagatggggctaacccccctatggcgagacagctcagctctctcaagccagcggaatagtttcccaacttccttttggaccagctcttaccagcccccacctgcaccttgtttggggggagttcatcctgacttccaggtcactggaccccctggcaccttttctgcagctgatcccagtccttggccgggacacaacctgcatcagactggcccagcccctccccctgctgtgtctgagtcctggccttatcctttgacatctcaggtgagcccatcctacagccatatgcatgacgtgtacatgcggcaccaccaccctcatgcccacatgcaccaccgccaccgccaccatcatcaccatcaccaccctcctgctggctctgccctggatccatcctatgggcctctgctgatgccttcagtgcatgcggccaggattcctgctccccagtgtgacatcacaaagacagaaccaactacagtcacctctgctacctcagcatgggctggagcctttcatggaacagtagacatagtgcccagcgtgggattcgatacaggctggagtgcaatggcgagatcttgactcactgcaacctctgcctcccgagttcaaccaattgtcctgcctcagccacctgagtagctggaattacaggcatctgccaccacgcccggctaattttttgtatttttagtagatagtcactattttgaatagtgaaggctggcttccctattttgaatagtgaaggctggcttccctattttgaatagtgaaggctggcttccctattttggccaggctggtctcaaactcctgacctcgtgatccacctgcctcggactcccaaggtgctgggattacaggtgtgagccactgtgtccagccctcatgtacaaatttttaagtaaatgtgtgtttaattctcttggaaatatatctaggagtagaactgtggggttaagagaacctcactttttattttatgtatttctatattttttgaatttttttcaaagagcatatatatgcaatttttaaaatatttaaatttaaatttttgttttttaaatttttttttagtatttaaattgttaagattcattacaacatattatagtagagtttgaggtttggtaggcaaaactgccataggaatgaagtaaggtggtccattttttccgaagggctgagtggtggtgaggacagtgaggtgcctctggcacaaaatttaaaaggatccatactgtgagggctgtgcaagtgtatgccaccccatattttgcacccagggctccttattcctctaacctctgtcttggtgttgctttgctgtcatgcgagctcactcttactttttgctccctctgttgaacaggtattacatacaggtaccttgaaatgatcagtatggtatgatcataagtcatttgtatttgccctccacgtgaaaaatgctcatctttaccaagaggctgttatcacaaatctcacattaggctttttccctttcctttatcagtctttaaactgagtttcatgggttccataggaaaaatactcagaatgtgataataagggcttaattgaaaaaagaaaagatctattatcaaatgaatttatttacattgcctaccatatacctcttagagatcacagttccctatagcatataaaatgttttatatattcttcagtaaaaaagcattttaaattgt

SEQ ID NO: 279255 - protein, 526 aa, Artificial Sequence
  derived and/or modified sequence
MQSESGIVPDFEVGEEFHEEPKTYYELKSQPLKSSSSAEHPGASKPPISSSSMTSRILLRQQLMREQMQEQERREQQQKLQAAQFMQQRVPVSQTPAINVSVPTTLPSATQVPMEVLKVQTHLENPTKYHIQQAQRQQVKQYLSTTLANKHANQVLSLPCPNQPGDHVMPPVPGSSAPNSPMAMLTLNSNCEKEGFYKFEEQNRAESECPGMNTHSRASCMQMDDVIDDIISLESSYNEEILGLMDPALQMANTLPVSGNLIDLYGNQGLPPPGLTISNSCPANLPNIKRELTACIFPTESEARALAKERQKKDNHNLIERRRRFNINDRIKELGTLIPKSNDPDMRWNKGTILKASVDYIRKLQREQQRAKELENRQKKLEHANRHLLLRIQELEMQARAHGLSLIPSTGLCSPDLVNRIIKQEPVLENCSQDLLQHHADLTCTTTLDLTDGTITFNNNLGTGTEANQAYSVPTKMGSKLEDILMDDTLSPVGVTDPLLSSVSPGASKTSSRRSSMSMEETEHTC

SEQ ID NO: 279256 - DNA, 1581 bp, Artificial Sequence
  derived and/or modified sequence
atgcagagcgagagcggcatcgtgcccgacttcgaggtgggcgaggagttccacgaggagcccaagacctactacgagctgaagagccagcccctgaagagcagcagcagcgccgagcaccccggcgccagcaagccccccatcagcagcagcagcatgaccagcagaatcctgctgagacagcagctgatgagagagcagatgcaggagcaggagagaagagagcagcagcagaagctgcaggccgcccagttcatgcagcagagagtgcccgtgagccagacccccgccatcaacgtgagcgtgcccaccaccctgcccagcgccacccaggtgcccatggaggtgctgaaggtgcagacccacctggagaaccccaccaagtaccacatccagcaggcccagagacagcaggtgaagcagtacctgagcaccaccctggccaacaagcacgccaaccaggtgctgagcctgccctgccccaaccagcccggcgaccacgtgatgccccccgtgcccggcagcagcgcccccaacagccccatggccatgctgaccctgaacagcaactgcgagaaggagggcttctacaagttcgaggagcagaacagagccgagagcgagtgccccggcatgaacacccacagcagagccagctgcatgcagatggacgacgtgatcgacgacatcatcagcctggagagcagctacaacgaggagatcctgggcctgatggaccccgccctgcagatggccaacaccctgcccgtgagcggcaacctgatcgacctgtacggcaaccagggcctgcccccccccggcctgaccatcagcaacagctgccccgccaacctgcccaacatcaagagagagctgaccgcctgcatcttccccaccgagagcgaggccagagccctggccaaggagagacagaagaaggacaaccacaacctgatcgagagaagaagaagattcaacatcaacgacagaatcaaggagctgggcaccctgatccccaagagcaacgaccccgacatgagatggaacaagggcaccatcctgaaggccagcgtggactacatcagaaagctgcagagagagcagcagagagccaaggagctggagaacagacagaagaagctggagcacgccaacagacacctgctgctgagaatccaggagctggagatgcaggccagagcccacggcctgagcctgatccccagcaccggcctgtgcagccccgacctggtgaacagaatcatcaagcaggagcccgtgctggagaactgcagccaggacctgctgcagcaccacgccgacctgacctgcaccaccaccctggacctgaccgacggcaccatcaccttcaacaacaacctgggcaccggcaccgaggccaaccaggcctacagcgtgcccaccaagatgggcagcaagctggaggacatcctgatggacgacaccctgagccccgtgggcgtgaccgaccccctgctgagcagcgtgagccccggcgccagcaagaccagcagcagaagaagcagcatgagcatggaggagaccgagcacacctgctag

SEQ ID NO: 279257 - DNA, 1581 bp, Artificial Sequence
  derived and/or modified sequence
atgcaatcagaatccgggattgtcccagactttgaagtgggtgaggagttccatgaggaaccaaagacatattacgagttaaagagtcagcccttgaagagctctagttctgctgagcatcccggcgcctccaaaccacccatttcctctagtagtatgaccagtagaatactgctccgtcagcagctgatgcgggaacagatgcaggagcaggaacgaagagagcagcagcaaaagcttcaggcagctcagtttatgcagcagcgggtccctgtatcccagactccggccattaacgtgtcagtacccaccaccctgccatcagcaacgcaagttccaatggaagtgcttaaggtgcagacgcatctggagaaccctaccaagtatcacattcaacaggcccagcggcaacaggtgaagcagtacttgagcactacactggccaacaaacatgcaaatcaggtgctgtccctgccttgtcccaatcaaccgggggatcacgtgatgcctccggtgcctggttcctcggctcccaattcgccgatggctatgttaacgttgaattcaaattgtgagaaggaaggcttctacaaattcgaggaacagaatcgagcagagagtgagtgccccggtatgaacacacatagcagagccagttgcatgcaaatggatgatgtgattgacgacatcatatctctggagtcatcatacaatgaagagatcctaggactcatggaccccgctctgcagatggctaataccctccccgtttctggaaacctcatcgatctctacggcaaccaaggtctcccaccccccgggttgacaatctcaaatagttgtccagctaaccttcctaatattaagcgagagcttacagcatgtatttttcccacagagagtgaggcaagggccttggccaaggagcgacaaaagaaggacaaccacaatctgatcgagcgccgtaggcggtttaatattaatgaccgcatcaaggaactggggacactcatccctaaatccaatgatcccgatatgagatggaacaaagggactatcctgaaagccagcgtggattacattcgcaagctgcagcgagagcagcagcgcgctaaggagctggaaaatcgtcagaaaaagctggaacacgcaaaccgtcatctgctgctccggatccaagaactggaaatgcaggccagagcccatggactgagcttgataccttctacaggactgtgctcccctgatctggtaaaccgaattatcaaacaggagcctgtactggagaactgtagccaggatctgttgcagcatcatgccgacctgacgtgtacgactactctcgatctgaccgatggtacaatcacctttaataacaaccttgggacaggcacagaggctaaccaggcatattcagtgcccacaaagatggggtccaagttagaagacatcttaatggacgacacactgagtccagtcggggtaacggaccctctgcttagctccgtgtcacccggcgcgagcaaaaccagctcacggcgctcatctatgtctatggaagaaacagagcacacatgttag

SEQ ID NO: 279258 - DNA, 1581 bp, Artificial Sequence
  derived and/or modified sequence
atgcagagcgagagcggcatcgtgcctgactttgaggtgggggaggagttccacgaggagcccaagacctactatgagctgaagagccagcccctgaagagcagcagcagcgctgagcaccctggggccagcaagccacccatcagcagcagctccatgaccagccgcatcctgctgcggcagcagctgatgagggagcagatgcaggagcaggagcggcgggagcagcagcagaagctgcaggccgcccagttcatgcagcagagggtgcctgtgtcccagaccccagccatcaacgtgtctgtgcccaccaccctgcccagcgccacccaggtgcccatggaggtgctgaaggtgcagacccacctggagaaccccaccaagtaccacatccagcaggcccagaggcagcaggtgaagcagtacctgagcaccaccctggccaacaagcacgccaaccaggtgctgagcctgccctgccccaaccagcccggggaccacgtgatgcctcctgtgcccggcagcagcgcccccaacagccccatggccatgctgaccctgaacagcaactgtgagaaggagggcttctacaagtttgaggagcagaacagagctgagagcgagtgccccggcatgaacacccacagccgggccagctgcatgcagatggatgatgtgattgatgacatcatcagcctggagagcagctacaatgaggagatcctgggcctgatggaccctgccctgcagatggccaacaccctgcctgtgtctggcaacctgattgacctgtatggcaaccagggcctgcccccacctggcctgaccatcagcaacagctgcccagccaacctgcccaacatcaagcgggagctgacagcctgcatcttccccacagaaagtgaggcccgggccctggccaaggagcggcagaagaaggacaaccacaacctgattgaaagaagaagacgcttcaacatcaatgaccgcatcaaggagctgggcaccctcatccccaagagcaatgaccctgacatgcgctggaacaagggcaccatcctgaaggcctctgtggactacatcaggaagctgcagcgggagcagcagagggccaaggagctggagaaccggcagaagaagctggagcacgccaacagacacctgctgctgcgcatccaggagctggagatgcaggcccgggcccacggcctgagcctcatccccagcacaggcctgtgcagcccagacctggtgaaccgcatcatcaagcaggagcctgtgctggagaactgcagccaggacctgctgcagcaccacgccgacctgacctgcaccaccaccctggacctgacagatggcaccatcaccttcaacaacaacctgggcactggaacagaggccaaccaggcctacagcgtgcccaccaagatgggcagcaagctggaggacatcctgatggatgacaccctgagccctgtgggcgtgacagaccccctgctgagctctgtgtcccctggggccagcaagaccagcagcagaagaagctccatgtccatggaggagacagagcacacctgctag

SEQ ID NO: 279259 - DNA, 1581 bp, Artificial Sequence
  derived and/or modified sequence
atgcagagcgagagcggcatcgtgcccgacttcgaggtgggcgaggaattccatgaagagcctaagacttattacgagctgaagagccaacctctgaagtcttcttcatccgcagaacacccgggagcgtctaaaccaccaatttcctctagcagcatgacctcaaggattctgctaaggcaacagctcatgagagagcagatgcaggaacaggagcgtcgcgaacagcagcagaagcttcaggctgctcaatttatgcagcagcgcgtgcccgtgagtcaaactcctgcaattaatgttagcgtacctactactttgccaagcgctacacaagtgccgatggaggtcctaaaagtgcagacccatctggagaatccgacaaagtatcacatacaacaagcccagaggcaacaggtcaaacagtatctctctacgacactagcaaataaacacgccaaccaggttctgtccctcccttgtccaaaccagcccggggatcacgtgatgccacctgtgcccggctcaagtgcccccaattcccctatggctatgctgaccctgaatagtaactgcgagaaggaaggtttttataagttcgaagagcagaaccgagccgagagcgaatgccctggcatgaatacgcattcccgggccagttgcatgcagatggacgatgtcatcgacgatatcataagcctggaatcatcttacaatgaggagattctgggactgatggacccagccttgcaaatggcaaacacactgccagtctcagggaaccttatcgatctttatggtaaccagggactgcctccaccaggtttgactatctccaacagctgtccagccaacctgcccaatatcaaaagggagctgacagcttgtatctttcccacggagagtgaggctcgcgctctggctaaggagcggcagaagaaagataatcacaacctgattgagagacgcagacgtttcaatataaacgaccgcattaaggaactggggactctgatacctaaaagtaacgatccggacatgcgatggaataaaggtaccatactgaaggccagcgtggattacatccgcaagctgcagcgtgagcagcagagagctaaggaactggagaaccgtcagaagaagctggaacatgctaaccgccacttgttgctgcggatccaagaactggagatgcaagcccgcgcccatgggctctcattgatccccagcacaggcctttgcagcccagaccttgtgaatagaatcataaagcaggagccagttctggaaaattgttctcaggacctgctgcaacatcacgccgacctaacatgtaccactaccttggatctgacggatggtacaattaccttcaataacaacctagggactggcacggaagccaaccaggcctactctgtgcccacgaaaatggggagtaagctggaggatattcttatggatgataccctgagtccagtgggggttacggaccccctccttagctccgtgagtcctggggcctctaaaacatcttcgcgccggagctcgatgtcgatggaggagacagagcatacgtgctag

SEQ ID NO: 279260 - DNA, 1581 bp, Artificial Sequence
  derived and/or modified sequence
atgcagagcgaatcgggcatcgtgcccgacttcgaggtgggagaggaatttcatgaagagcctaagacatattacgaactgaaatcccagccactcaagtcaagctctagcgccgagcaccccggagcatcaaaacccccaatctcctccagctctatgacatcacgaatcttgttaagacagcaacttatgagggagcagatgcaggagcaggagcgcagggagcagcagcagaaactgcaagcagcccaatttatgcaacaaagagtgccggtgtcccaaacccccgcaattaatgtgagcgtcccgactacccttccatcagctactcaggtccccatggaagtcttaaaagtacagacccacctggagaatccaactaagtatcatattcaacaggcccagaggcagcaggtaaagcagtatctctccacaacactggccaacaaacacgccaatcaagttctgtcacttccgtgccctaaccaacctggcgaccacgtgatgccccctgtgcccggaagctcggccccaaatagccctatggcgatgctgacgttgaactctaattgcgagaaggaggggttttataaatttgaggagcagaatagggcagaatcagagtgccccggaatgaatactcactcccgggctagctgcatgcagatggatgacgtgattgacgacatcatcagcctcgagtccagttacaatgaggaaattctgggccttatggaccctgcactgcagatggcgaacacactgcctgtgagtggcaatctcatcgatctttacggaaaccagggactgcctccccctgggctgacgattagcaattcgtgtcccgctaatcttccaaacattaagagagaactcactgcctgtatattcccgactgaatccgaggcgagggcgctggccaaagagagacagaagaaagacaaccacaatctgatcgagaggcggaggcggttcaatatcaatgataggatcaaagaactcggtacactcatacctaagtctaacgatccagatatgcggtggaataagggtactatcttaaaagctagtgtggattatattagaaaactgcaacgggaacagcagagggcaaaagaattagagaatagacaaaaaaaactggagcacgcaaacaggcacctgcttctaaggattcaggaacttgaaatgcaggccagagcccatggccttagcttgattcctagcacaggcctctgctcgcccgaccttgtgaaccgaatcattaaacaggagcctgtcctagagaattgctcacaagacctgttgcagcaccacgccgacctgacttgcaccaccactctggatcttactgacggtactattacatttaataacaatttggggacgggcactgaagccaatcaagcatatagcgtcccaaccaaaatggggagcaaactggaggacatcctcatggacgataccctgagccccgtcggagttacagatcctctcctgtcaagcgtgagcccgggtgcgtccaagacaagctcaaggagaagttcaatgtccatggaggaaactgagcacacatgctag

SEQ ID NO: 279261 - DNA, 2489 bp, Artificial Sequence
  derived and/or modified sequence
ggcgagcgggcagagctcggcactgcgccggggcgcacggctcgggggacccaggcccagctaccttccctccgcccccgggctctgttctcactttccagcagtggaaggacgggaagcgggagccatgcagtccgaatcggggatcgtgccggatttcgaagtcggggaggagtttcatgaagagcccaaaacctattacgaactcaaaagtcaaccgctgaagagcagcagttccgccgagcatcctggggcctccaagcctccgataagctcctccagtatgacatcacgcatcttgctacgccagcaactcatgcgtgagcagatgcaggagcaggagcgcagggagcagcagcagaagctgcaggcggcccagttcatgcaacagagagtgcccgtgagtcagacaccagccataaacgtcagtgtgcccaccacccttccctctgccacgcaggtgccgatggaagtccttaaggtgcagacccacctcgaaaaccccaccaagtaccacatacagcaagcccaacggcagcaggtaaagcagtacctttctaccactttagcaaataaacatgccaaccaagtcctgagcttgccatgtccaaaccagcctggcgatcatgtcatgccaccggtgccggggagcagcgcacccaacagccccatggctatgcttacgcttaactccaactgtgaaaaagagggattttataagtttgaagagcaaaacagggcagagagcgagtgcccaggcatgaacacacattcacgagcgtcctgtatgcagatggatgatgtaatcgatgacatcattagcctagaatcaagttataatgaggaaatcttgggcttgatggatcctgctttgcaaatggcaaatacgttgcctgtctcgggaaacttgattgatctttatggaaaccaaggtctgcccccaccaggcctcaccatcagcaactcctgtccagccaaccttcccaacataaaaagggagctcacagcgtgtatttttcccacagagtctgaagcaagagcactggccaaagagaggcagaaaaaggacaatcacaacctgattgaacgaagaagaagatttaacataaatgaccgcattaaagaactaggtactttgattcccaagtcaaatgatccagacatgcgctggaacaagggaaccatcttaaaagcatccgtggactatatccgaaagttgcaacgagaacagcaacgcgcaaaagaacttgaaaaccgacagaagaaactggagcacgccaaccggcatttgttgctcagaatacaggaacttgaaatgcaggctcgagctcatggactttcccttattccatccacgggtctctgctctccagatttggtgaatcggatcatcaagcaagaacccgttcttgagaactgcagccaagacctccttcagcatcatgcagacctaacctgtacaacaactctcgatctcacggatggcaccatcaccttcaacaacaacctcggaactgggactgaggccaaccaagcctatagtgtccccacaaaaatgggatccaaactggaagacatcctgatggacgacaccctttctcccgtcggtgtcactgatccactcctttcctcagtgtcccccggagcttccaaaacaagcagccggaggagcagtatgagcatggaagagacggagcacacttgttagcgaatcctccctgcactgcattcgcacaaactgcttcctttcttgattcgtagatttaataacttacctgaaggggttttcttgataattttcctttaatatgaaattttttttcatgctttatcaatagcccaggatatattttatttttagaattttgtgaaacagacttgtatattctattttacaactacaaatgcctccaaagtattgtacaaataagtgtgcagtatctgtgaactgaattcaccacagactttagctttctgagcaagaggattttgcgtcagagaaatgtctgtccatttttattcaggggaaacttgatttgagatttttatgcctgtgacttccttggaaatcaaatgtaaagtttaattgaaagaatgtaaagcaaccaaaaagaaaaaaaaaaagaaagaaagaggaaaagaaatccatactaacccttttccattttataaatgtattgattcattggtactgccttaaagatacagtacccctctagctttgtttagtctttatactgcaaactatttaaagaaatatgtattctgtaaaagaaaaaaaaaatgcggccttttcatgaggatcgtctggttagaaaacataactgataccaaccgaaactgaagggagttagaccaaggctctgaaatataaagtctaatcttgctctcttttattctgtgctgttacagttttcttcatcaatgagtgtgatccagtttttcataagatattttattttgaaatggaaattaatgtcctctcaaag

SEQ ID NO: 279262 - protein, 361 aa, Artificial Sequence
  derived and/or modified sequence
MEALRVQMFMPCSFESLYLSSAEHPGASKPPISSSSMTSRILLRQQLMREQMQEQERREQQQKLQAAQFMQQRVPVSQTPAINVSVPTTLPSATQVPMEVLKVQTHLENPTKYHIQQAQRQQVKQYLSTTLANKHANQVLSLPCPNQPGDHVMPPVPGSSAPNSPMAMLTLNSNCEKEGFYKFEEQNRAESECPGMNTHSRASCMQMDDVIDDIISLESSYNEEILGLMDPALQMANTLPVSGNLIDLYGNQGLPPPGLTISNSCPANLPNIKRELTACIFPTESEARALAKERQKKDNHNLIERRRRFNINDRIKELGTLIPKSNDPDMRWNKGTILKASVDYIRKLQREQQRAKELENR

SEQ ID NO: 279263 - DNA, 1086 bp, Artificial Sequence
  derived and/or modified sequence
atggaggccctgagagtgcagatgttcatgccctgcagcttcgagagcctgtacctgagcagcgccgagcaccccggcgccagcaagccccccatcagcagcagcagcatgaccagcagaatcctgctgagacagcagctgatgagagagcagatgcaggagcaggagagaagagagcagcagcagaagctgcaggccgcccagttcatgcagcagagagtgcccgtgagccagacccccgccatcaacgtgagcgtgcccaccaccctgcccagcgccacccaggtgcccatggaggtgctgaaggtgcagacccacctggagaaccccaccaagtaccacatccagcaggcccagagacagcaggtgaagcagtacctgagcaccaccctggccaacaagcacgccaaccaggtgctgagcctgccctgccccaaccagcccggcgaccacgtgatgccccccgtgcccggcagcagcgcccccaacagccccatggccatgctgaccctgaacagcaactgcgagaaggagggcttctacaagttcgaggagcagaacagagccgagagcgagtgccccggcatgaacacccacagcagagccagctgcatgcagatggacgacgtgatcgacgacatcatcagcctggagagcagctacaacgaggagatcctgggcctgatggaccccgccctgcagatggccaacaccctgcccgtgagcggcaacctgatcgacctgtacggcaaccagggcctgcccccccccggcctgaccatcagcaacagctgccccgccaacctgcccaacatcaagagagagctgaccgcctgcatcttccccaccgagagcgaggccagagccctggccaaggagagacagaagaaggacaaccacaacctgatcgagagaagaagaagattcaacatcaacgacagaatcaaggagctgggcaccctgatccccaagagcaacgaccccgacatgagatggaacaagggcaccatcctgaaggccagcgtggactacatcagaaagctgcagagagagcagcagagagccaaggagctggagaacagatag

SEQ ID NO: 279264 - DNA, 1086 bp, Artificial Sequence
  derived and/or modified sequence
atggaggccctgcgcgtgcagatgtttatgccgtgtagcttcgaaagcctttacctgagtagcgccgagcacccaggtgccagcaagcccccaattagtagctccagcatgacatctaggatcttattacggcagcagcttatgagagaacagatgcaggaacaagagcgccgcgagcaacaacagaagctccaagctgctcagtttatgcagcagcgagtccccgtcagccaaacacctgctatcaacgtcagtgtgcccacaacactgcccagcgctacccaggtgccaatggaagtcttgaaggtgcagacccacctggaaaatcccaccaagtaccatatccagcaggcgcagagacagcaagtaaaacagtaccttagcaccacactggcaaacaagcatgccaatcaagtgctttcacttccgtgccccaatcagccaggggaccacgttatgcccccagtccccggctccagcgcacctaactcaccaatggcaatgttaacacttaatagtaattgtgaaaaggagggattctataagttcgaagagcagaacagggcagaatctgagtgccccggtatgaatacccactcacgcgccagttgtatgcaaatggatgatgttattgatgatattatctccctcgaatccagttataatgaagaaatccttggattgatggatcctgcactgcagatggctaacacactgcctgtgtcagggaatctgatcgacctgtacggaaatcaggggctaccacctccagggctcaccattagtaacagctgccctgcaaacctgccaaacattaagagggagctcacagcttgcattttccccaccgaatcggaggcacgggccctggccaaggaaagacagaagaaagataatcacaacctgatcgaaaggcgcagaaggttcaacatcaatgacagaatcaaggagttgggaactcttatccctaaatcaaacgacccagatatgcgctggaataagggcacaatccttaaggcttccgttgactacatcaggaagctgcagcgcgagcagcagagagccaaggagctggagaaccgatag

SEQ ID NO: 279265 - DNA, 1086 bp, Artificial Sequence
  derived and/or modified sequence
atggaggccctgcgggtgcagatgttcatgccctgcagctttgagagcctgtacctgagcagcgctgagcaccctggggccagcaagccacccatcagcagcagctccatgaccagccgcatcctgctgcggcagcagctgatgagggagcagatgcaggagcaggagcggcgggagcagcagcagaagctgcaggccgcccagttcatgcagcagagggtgcctgtgtcccagaccccagccatcaacgtgtctgtgcccaccaccctgcccagcgccacccaggtgcccatggaggtgctgaaggtgcagacccacctggagaaccccaccaagtaccacatccagcaggcccagaggcagcaggtgaagcagtacctgagcaccaccctggccaacaagcacgccaaccaggtgctgagcctgccctgccccaaccagcccggggaccacgtgatgcctcctgtgcccggcagcagcgcccccaacagccccatggccatgctgaccctgaacagcaactgtgagaaggagggcttctacaagtttgaggagcagaacagagctgagagcgagtgccccggcatgaacacccacagccgggccagctgcatgcagatggatgatgtgattgatgacatcatcagcctggagagcagctacaatgaggagatcctgggcctgatggaccctgccctgcagatggccaacaccctgcctgtgtctggcaacctgattgacctgtatggcaaccagggcctgcccccacctggcctgaccatcagcaacagctgcccagccaacctgcccaacatcaagcgggagctgacagcctgcatcttccccacagaaagtgaggcccgggccctggccaaggagcggcagaagaaggacaaccacaacctgattgaaagaagaagacgcttcaacatcaatgaccgcatcaaggagctgggcaccctcatccccaagagcaatgaccctgacatgcgctggaacaagggcaccatcctgaaggcctctgtggactacatcaggaagctgcagcgggagcagcagagggccaaggagctggagaacagatag

SEQ ID NO: 279266 - DNA, 1086 bp, Artificial Sequence
  derived and/or modified sequence
atggaggccctgcgggtgcagatgttcatgccctgcagcttcgagagcttgtacctgtccagcgcggagcaccccggagcctcaaaacctccaatttcttccagcagcatgactagtcgcatactgctgcgccagcagctgatgcgtgagcagatgcaagagcaggaacggagggagcaacagcagaagcttcaagctgctcaatttatgcaacagagggtacccgtatcccaaactcctgccattaatgttagcgtgcccaccactctgccttcagcaacacaagtacccatggaggttctgaaagtgcagactcacttagagaacccaaccaagtatcatatacaacaggcccaacgacaacaggtgaaacagtacctgagcactacactggccaacaaacacgcaaatcaagtgctgagccttccatgtcctaaccagccgggggaccatgttatgccacctgttccaggaagctctgccccgaactcaccaatggccatgttgacactaaactcaaattgcgaaaaagagggtttttataaatttgaggagcaaaatcgagctgagtccgagtgcccaggtatgaacactcacagcagagcctcctgtatgcagatggacgacgtcattgatgatatcatctctctggagtctagctacaatgaagaaatactcggcctcatggacccagctttgcaaatggcgaacacactgcctgttagcggcaacctgattgatctctacgggaatcagggactgccgccccctgggctgactatcagtaactcctgtcccgcaaacctgccgaacattaagcgagagctcaccgcttgtattttcccaaccgagagcgaagcacgcgcgttggctaaagagcgacagaagaaggacaaccataacttaattgagcgtcgtcggcgcttcaatatcaatgaccgaatcaaggaactcgggacgctgatcccaaaatcgaatgaccccgacatgcggtggaacaaaggcaccatcctgaaggctagtgtagactatatccggaaattacagagggaacaacaacgggcaaaggagctcgagaacaggtag

SEQ ID NO: 279267 - DNA, 1086 bp, Artificial Sequence
  derived and/or modified sequence
atggaggctctccgagtgcagatgtttatgccctgcagcttcgaatccctatatctctcttcggctgagcatcccggtgccagtaagcctccgatcagttcctcctcaatgacaagtagaatcttactgcgtcaacagctaatgagagagcagatgcaggagcaagagaggcgcgaacagcagcagaagttacaggccgctcagtttatgcaacagcgggtccctgtatcacaaacccccgctattaatgtgtctgtacctacgacactccccagtgccacacaggtaccaatggaggtactcaaggtccagacacacctcgagaaccctaccaagtatcatattcagcaggctcaacgacagcaggtaaaacagtacctttctaccaccctggcgaacaaacacgcaaatcaggtgctgtctctgccctgtcccaatcagcctggagatcacgtgatgccgcctgtgcctggatcaagtgccccaaacagtcctatggcgatgctgacccttaacagcaactgcgaaaaagaggggttttataaattcgaggagcagaatcgggctgaatctgaatgcccgggtatgaatacccacagccgcgcatcatgtatgcagatggacgacgttatcgatgacatcatctcactggagtccagctataatgaggagatcctgggccttatggatccggcactgcagatggccaatacgctccctgtgagtggcaatctgatcgatctctacggcaaccaaggcttacccccacctggacttactatctcgaactcgtgccccgctaacctccctaatattaagcgggagctcactgcctgtattttcccaaccgagagcgaggctcgggcactcgccaaagagagacaaaaaaaagataatcataacctcattgaacggagaagacgattcaatatcaacgataggatcaaggagctgggaacacttattcctaagagtaacgaccccgatatgagatggaataagggcactatccttaaggcctccgtcgattatatcagaaaacttcaacgagagcaacagcgcgctaaggagctcgagaacaggtag

SEQ ID NO: 279268 - DNA, 1163 bp, Artificial Sequence
  derived and/or modified sequence
agtgacacagccagtgccagaactaactttgactttcactcttcgccaagggcttgcagaacaccttaaaggaaaaaagatggaggcgcttagagttcagatgttcatgccatgctcctttgaaagcttgtatctcagttccgccgagcatcctggggcctccaagcctccgataagctcctccagtatgacatcacgcatcttgctacgccagcaactcatgcgtgagcagatgcaggagcaggagcgcagggagcagcagcagaagctgcaggcggcccagttcatgcaacagagagtgcccgtgagtcagacaccagccataaacgtcagtgtgcccaccacccttccctctgccacgcaggtgccgatggaagtccttaaggtgcagacccacctcgaaaaccccaccaagtaccacatacagcaagcccaacggcagcaggtaaagcagtacctttctaccactttagcaaataaacatgccaaccaagtcctgagcttgccatgtccaaaccagcctggcgatcatgtcatgccaccggtgccggggagcagcgcacccaacagccccatggctatgcttacgcttaactccaactgtgaaaaagagggattttataagtttgaagagcaaaacagggcagagagcgagtgcccaggcatgaacacacattcacgagcgtcctgtatgcagatggatgatgtaatcgatgacatcattagcctagaatcaagttataatgaggaaatcttgggcttgatggatcctgctttgcaaatggcaaatacgttgcctgtctcgggaaacttgattgatctttatggaaaccaaggtctgcccccaccaggcctcaccatcagcaactcctgtccagccaaccttcccaacataaaaagggagctcacagcgtgtatttttcccacagagtctgaagcaagagcactggccaaagagaggcagaaaaaggacaatcacaacctgattgaacgaagaagaagatttaacataaatgaccgcattaaagaactaggtactttgattcccaagtcaaatgatccagacatgcgctggaacaagggaaccatcttaaaagcatccgtggactatatccgaaagttgcaacgagaacagcaacgcgcaaaagaacttgaaaaccgac

SEQ ID NO: 279269 - protein, 465 aa, Artificial Sequence
  derived and/or modified sequence
MLKRIYRSTPPEVIVEVLEPYVRLTTANVRIIKNRTGPMGHTYGFIDLDSHAEALRVVKILQNLDPPFSIDGKMVAVNLATGKRRNDSGDHSDHMHYYQGKKYFRDRRGGGRNSDWSSDTNRQGQQSSSDCYIYDSATGYYYDPLAGTYYDPNTQQEVYVPQDPGLPEEEEIKEKKPTSQGKSSSKKEMSKRDGKEKKDRGVTRFQENASEGKAPAEDVFKKPLPPTVKKEESPPPPKVVNPLIGLLGEYGGDSDYEEEEEEEQTPPPQPRTAQPQKREEQTKKENEEDKLTDWNKLACLLCRRQFPNKEVLIKHQQLSDLHKQNLEIHRKIKQSEQELAYLERREREGKFKGRGNDRREKLQSFDSPERKRIKYSRETDSDRKLVDKEDIDTSSKGGCVQQATGWRKGTGLGYGHPGLASSEEAEGRMRGPSVGASGRTSKRQSNETYRDAVRRVMFARYKELD

SEQ ID NO: 279270 - DNA, 2324 bp, Artificial Sequence
  derived and/or modified sequence
agcggcgcggcgcctttgtggtagcagtggccccgcgcggaggaagttccggtgtccgcggcgctgggtcggtggcggaggctgaggagaaggaggagcgggccgtggaggcttcgccgcctaggtactgctataaccagaatttggtagaaaaaggatttacttgttggggccctcttgataaaaagagatgtggggggattctcgacctgctaacagaactggaccttttcggatcaagattataggaccggcccaagtgaggagaaacccagcaggcttattcgattaagtggggtacctgaagatgccacaaaagaagagattcttaatgcttttcggactcctgatggcatgcctgtaaagaacttgcagttgaaggagtataacacagggaactctaatgatccaggacaaagaagttaccctggagtatgtatcaagcctggatttttggtactgcaaacgatgtaaggcaaacattggtgggcaccgatcttcctgttcattctgcaagaacccaagagaagtgacagaggccaagcaagaattaataacctaccctcagcctcagaaaacatccataccagcaccattggaaaaacagcccaaccagcccctaagaccagctgataaggaacctgaacccaggaagagggaagaaggccaagagtcacgcttaggacatcaaaagagagaagcagaaaggtatctgcctccttctcgaagggaagggccaactttccgaagagaccgagagagggagtcatggtctggagagacacgccaggatggagagagcaaaactatcatgctaaagcgtatctatcgttccacaccacctgaggtgatagtggaagtgctggagccctatgtccgccttactactgccaacgtccgtatcatcaagaacagaacaggccctatggggcatacctatggctttattgacctcgactcccatgcggaagctcttcgtgtggtgaagatcttacagaaccttgatccgccatttagcattgatgggaagatggtagctgtaaacctggccactggaaaacgaagaaatgattctggggaccattctgaccacatgcattactatcagggtaaaaaatatttccgagataggaggggaggtggcagaaattcagactggtcttcagatacaaatcgacaaggacaacagtcatcatctgactgctacatatatgattctgctactggctactattatgaccccttggcaggaacttattatgaccccaatacccagcaagaagtctatgtgccccaggatcctggattacctgaggaagaagagatcaaggaaaaaaaacccaccagtcaaggaaagtcaagtagcaagaaggaaatgtctaaaagagatggcaaggagaaaaaagacagaggagtgacgaggtttcaggaaaatgccagtgaagggaaggcccctgcagaagacgtctttaagaagcccctgcctcctactgtgaagaaggaagagagtccccctccacctaaagtggtaaacccactgatcggcctcttgggtgaatatggaggagacagtgactatgaggaggaagaagaggaggaacagacccctcccccacagccccgcacagcacagccccagaagcgagaggagcaaaccaagaaggagaatgaagaagacaaactcactgactggaataaactggcttgtctgctttgcagaaggcagtttcccaataaagaagttctgatcaaacaccagcagctgtcagacctgcacaagcaaaacctggaaatccaccggaagataaaacagtctgagcaggagctagcctatctggaaaggagagaacgagagggaaagtttaaaggaagaggaaatgatcgcagggaaaagctccagtcttttgactctccagaaaggaaacggattaagtactccagggaaactgacagtgatcgtaaacttgttgataaagaagatatcgacactagcagcaaaggaggctgtgtccaacaggctactggctggaggaaagggacaggcctgggatatggccatcctggattggcttcatcagaggaggctgaaggccggatgaggggccccagtgttggagcctcaggaagaaccagcaaaagacagtccaacgagacttaccgagatgctgttcgaagagtcatgtttgctcgatataaagaactcgattaagaaaggagacaagttccatgggatacaacctccctcttgttttgtttgtctctccttttcttttgttactgttcttgctgctagaacttttttaaataaactttttttcaatgtg

SEQ ID NO: 279271 - DNA, 2260 bp, Artificial Sequence
  derived and/or modified sequence
gaaggcaagtcccctgcgcgcggggcacggcgggagtaagagtctgcgggaccggcagctgtacttcatctcccagcgggccgagcgctgaaggcagcggcgcggcgcctttgtggtagcagtggccccgcgcggaggaagttccggtgtccgcggcgctgggtcggtggcggaggctgaggagaaggaggagcgggccgtggaggcttcgccgcctaggtactgctataaccagaatttggtagaaaaaggatttacttgttggggccctcttgataaaaagagatgtggggggattctcgacctgctaacagaactggaccttttcgggaactctaatgatccaggacaaagaagttaccctggagtatgtatcaagcctggatttttggtactgcaaacgatgtaaggcaaacattggtgggcaccgatcttcctgttcattctgcaagaacccaagagaagtgacagaggccaagcaagaattaataacctaccctcagcctcagaaaacatccataccagcaccattggaaaaacagcccaaccagcccctaagaccagctgataaggaacctgaacccaggaagagggaagaaggccaagagtcacgcttaggacatcaaaagagagaagcagaaaggtatctgcctccttctcgaagggaagggccaactttccgaagagaccgagagagggagtcatggtctggagagacacgccaggatggagagagcaaaactatcatgctaaagcgtatctatcgttccacaccacctgaggtgatagtggaagtgctggagccctatgtccgccttactactgccaacgtccgtatcatcaagaacagaacaggccctatggggcatacctatggctttattgacctcgactcccatgcggaagctcttcgtgtggtgaagatcttacagaaccttgatccgccatttagcattgatgggaagatggtagctgtaaacctggccactggaaaacgaagaaatgattctggggaccattctgaccacatgcattactatcagggtaaaaaatatttccgagataggaggggaggtggcagaaattcagactggtcttcagatacaaatcgacaaggacaacagtcatcatctgactgctacatatatgattctgctactggctactattatgaccccttggcaggaacttattatgaccccaatacccagcaagaagtctatgtgccccaggatcctggattacctgaggaagaagagatcaaggaaaaaaaacccaccagtcaaggaaagtcaagtagcaagaaggaaatgtctaaaagagatggcaaggagaaaaaagacagaggagtgacgaggtttcaggaaaatgccagtgaagggaaggcccctgcagaagacgtctttaagaagcccctgcctcctactgtgaagaaggaagagagtccccctccacctaaagtggtaaacccactgatcggcctcttgggtgaatatggaggagacagtgactatgaggaggaagaagaggaggaacagacccctcccccacagccccgcacagcacagccccagaagcgagaggagcaaaccaagaaggagaatgaagaagacaaactcactgactggaataaactggcttgtctgctttgcagaaggcagtttcccaataaagaagttctgatcaaacaccagcagctgtcagacctgcacaagcaaaacctggaaatccaccggaagataaaacagtctgagcaggagctagcctatctggaaaggagagaacgagagggaaagtttaaaggaagaggaaatgatcgcagggaaaagctccagtcttttgactctccagaaaggaaacggattaagtactccagggaaactgacagtgatcgtaaacttgttgataaagaagatatcgacactagcagcaaaggaggctgtgtccaacaggctactggctggaggaaagggacaggcctgggatatggccatcctggattggcttcatcagaggaggctgaaggccggatgaggggccccagtgttggagcctcaggaagaaccagcaaaagacagtccaacgagacttaccgagatgctgttcgaagagtcatgtttgctcgatataaagaactcgattaagaaaggagacaagttccatgggatacaacctccctcttgttttgtttgtctctccttttcttttgttactgttcttgctgctagaacttttttaaataaactttttttcaatgtga

SEQ ID NO: 279272 - DNA, 2128 bp, Artificial Sequence
  derived and/or modified sequence
agctgtacttcatctcccagcgggccgagcgctgaaggcagcggcgcggcgcctttgtggtagcagtggccccgcgcggaggaagttccggtgtccgcggcgctgggtcggtggcggaggctgaggagaaggaggagcgggccgtggaggcttcgccgcctaggtactgctataaccagaatttggtagaaaaaggatttacttgttggggccctcttgataaaaagagatgtggggggattctcgacctgctaacagaactggaccttttcgtgtaaggcaaacattggtgggcaccgatcttcctgttcattctgcaagaacccaagagaagtgacagaggccaagcaagaattaataacctaccctcagcctcagaaaacatccataccagcaccattggaaaaacagcccaaccagcccctaagaccagctgataaggaacctgaacccaggaagagggaagaaggccaagagtcacgcttaggacatcaaaagagagaagcagaaaggtatctgcctccttctcgaagggaagggccaactttccgaagagaccgagagagggagtcatggtctggagagacacgccaggatggagagagcaaaactatcatgctaaagcgtatctatcgttccacaccacctgaggtgatagtggaagtgctggagccctatgtccgccttactactgccaacgtccgtatcatcaagaacagaacaggccctatggggcatacctatggctttattgacctcgactcccatgcggaagctcttcgtgtggtgaagatcttacagaaccttgatccgccatttagcattgatgggaagatggtagctgtaaacctggccactggaaaacgaagaaatgattctggggaccattctgaccacatgcattactatcagggtaaaaaatatttccgagataggaggggaggtggcagaaattcagactggtcttcagatacaaatcgacaaggacaacagtcatcatctgactgctacatatatgattctgctactggctactattatgaccccttggcaggaacttattatgaccccaatacccagcaagaagtctatgtgccccaggatcctggattacctgaggaagaagagatcaaggaaaaaaaacccaccagtcaaggaaagtcaagtagcaagaaggaaatgtctaaaagagatggcaaggagaaaaaagacagaggagtgacgaggtttcaggaaaatgccagtgaagggaaggcccctgcagaagacgtctttaagaagcccctgcctcctactgtgaagaaggaagagagtccccctccacctaaagtggtaaacccactgatcggcctcttgggtgaatatggaggagacagtgactatgaggaggaagaagaggaggaacagacccctcccccacagccccgcacagcacagccccagaagcgagaggagcaaaccaagaaggagaatgaagaagacaaactcactgactggaataaactggcttgtctgctttgcagaaggcagtttcccaataaagaagttctgatcaaacaccagcagctgtcagacctgcacaagcaaaacctggaaatccaccggaagataaaacagtctgagcaggagctagcctatctggaaaggagagaacgagagggaaagtttaaaggaagaggaaatgatcgcagggaaaagctccagtcttttgactctccagaaaggaaacggattaagtactccagggaaactgacagtgatcgtaaacttgttgataaagaagatatcgacactagcagcaaaggaggctgtgtccaacaggctactggctggaggaaagggacaggcctgggatatggccatcctggattggcttcatcagaggaggctgaaggccggatgaggggccccagtgttggagcctcaggaagaaccagcaaaagacagtccaacgagacttaccgagatgctgttcgaagagtcatgtttgctcgatataaagaactcgattaagaaaggagacaagttccatgggatacaacctccctcttgttttgtttgtctctccttttcttttgttactgttcttgctgctagaacttttttaaataaactttttttcaatgtg

SEQ ID NO: 279273 - DNA, 1806 bp, Artificial Sequence
  derived and/or modified sequence
atgattcaggataaagaagtaactctagagtatgtgagcagccttgatttctggtactgtaagcgatgcaaagccaatatcgggggtcacagaagctcttgctctttttgcaaaaaccccagggaggttacggaagcgaaacaggagctgattacctacccacagccacaaaagacgtcaatccccgctcctttagagaaacagcccaatcagcccctgcggccagccgacaaggaaccagaaccgagaaagcgggaggagggtcaggagagcaggctcgggcaccagaagcgagaggcagagcggtatttacctccatcaaggcgggaaggtccaacgtttcgtcgcgacagagaaagggaaagttggtccggtgagaccagacaggacggcgagagtaagactatcatgttgaagaggatttaccgatccactccaccggaagtcattgtggaagtgcttgagccgtacgtccggctgaccacagccaacgtgcgcattattaagaatcggacaggacctatgggacatacatatggatttatcgatttggatagccacgcagaagccctacgcgtggtcaagatactccagaacttggacccacctttttccattgacgggaagatggtggccgtcaacctggctaccggcaaaaggcggaacgacagcggagatcattccgaccatatgcactactatcaagggaagaagtactttcgagacagaaggggtggcggccgcaatagcgactggtcctctgataccaataggcagggtcagcaatctagctctgactgttatatttatgactccgcaaccggatactactacgaccctctcgctggcacctactacgatcctaatacccagcaagaagtgtacgtgcctcaggatcctggtctacccgaagaggaggagatcaaagaaaaaaagccgaccagccaggggaagtcttcatccaagaaagagatgtctaaaagagacggaaaagagaaaaaagatcgaggcgttacgcgatttcaggaaaatgcttcagaaggtaaggctcccgccgaggacgtgttcaaaaagcctctgcctccaaccgtaaaaaaggaagagtccccacccccacctaaggtggttaatccgctgattgggctccttggcgagtatggcggtgactccgactacgaggaggaagaagaagaggagcagacccccccgcctcagcctcgcactgcccagccgcaaaagagggaggaacagaccaagaaggaaaatgaagaagataagttgaccgactggaacaaactcgcctgcctgctttgtcgcagacaattccccaataaggaagtcttgataaaacatcagcaactgtctgatcttcataagcagaatcttgagatccaccggaagattaagcagtccgaacaggagcttgcatatttggaaaggcgagaacgcgaaggaaagttcaaaggtaggggtaatgaccggcgcgagaaactacagagctttgacagcccagagcggaaacgcattaaatattcgcgggagacagacagcgaccgaaagttggtcgacaaggaggacattgatacctcctcgaaaggaggctgcgtgcagcaggctactggctggagaaaagggaccggacttggctatggccaccccggcctggcctcgagcgaggaggccgagggccgcatgcgaggtccgagcgtcggcgcaagtggccggacatccaaacggcaatctaatgagacctaccgcgatgccgtccgcagagtgatgtttgcacgttacaaagagctcgattag

SEQ ID NO: 279274 - DNA, 1806 bp, Artificial Sequence
  derived and/or modified sequence
atgattcaggataaggaagtgaccctggagtatgtttccagtctcgatttctggtactgcaaacggtgcaaggccaatattgggggccacaggtcgagttgcagcttctgcaaaaatccccgcgaagtgactgaagcaaagcaggagctgataacttacccacagccacagaagacatccatccccgcgccattggaaaaacagcccaaccagccactccggccggccgataaagagcctgagccccggaaaagagaggaggggcaggagtcccggttaggtcatcagaagcgcgaggcagagcgctatctgcccccatcccgaagggaagggcctactttccgaagggacagagaaagagaatcttggtccggagagacacgtcaggacggggaatcaaaaacaattatgttaaagagaatctatcggtcaacaccacctgaagtgattgtagaagtgctcgaaccctacgtccggttaaccacagccaatgttagaatcatcaaaaatcgcacaggacctatggggcacacttacggatttatcgacctggatagtcatgccgaagccttacgcgtggtgaaaattctgcaaaatctcgatccgcctttctccatcgacggaaagatggtggctgtcaacctggccactggaaagcgcagaaatgactcaggggatcattccgatcatatgcactattatcagggtaaaaagtacttccgcgataggagagggggtggcaggaactccgattggtcatccgatactaaccgacaagggcagcagtcgagctcagactgttacatatatgactccgctactggttattattatgaccccctggctggaacgtactacgaccccaatacccaacaagaggtttatgttccacaggacccaggacttcccgaagaagaggaaatcaaagagaaaaagcctacgtcccagggtaagtcctcaagcaaaaaagagatgtcaaaacgggacggtaaagaaaagaaagaccgcggcgtcactcggttccaggagaacgcctccgaggggaaagccccagcagaagacgtgtttaaaaagcccctccccccaacagtcaagaaggaggagtcgccgcccccaccaaaggttgtgaatccactgataggtttactgggagaatacggcggcgacagtgattacgaggaggaggaagaggaagagcaaactcctcctccccagccccgcaccgcgcagccccagaaacgcgaagaacagacgaaaaaagaaaatgaggaggataaactgaccgactggaataagctcgcatgcctgctctgccgacgacagtttcctaacaaggaggtgttaattaagcatcaacaattatcagacctgcacaagcagaacctggagattcacaggaaaatcaagcagagtgagcaggagcttgcgtatctggagagacgggagagagaggggaaatttaagggccgtggaaacgaccgccgcgagaaacttcagtcattcgactcgccagaacgaaagaggatcaaatactcacgggaaacggactcagatcgaaaactcgttgacaaagaagacattgatacatcgtctaaggggggctgtgtgcagcaggccactggttggcgaaaagggaccggcctgggatacggtcatcctggacttgcttcctcagaagaggctgaaggccgcatgaggggacccagcgtgggggcctcaggccgcaccagcaagagacagagtaacgagacgtaccgagacgctgtacggcgggtgatgtttgcccggtacaaagaactggattag

SEQ ID NO: 279275 - DNA, 1398 bp, Artificial Sequence
  derived and/or modified sequence
atgttaaagagaatttatcgcagcacccctccggaggttatcgtggaggtgctggagccatatgtaaggcttactacagccaacgtgcggataatcaagaatcgcacgggtcccatgggccatacatacgggtttatagacttagactcacacgcggaggcactccgagtagtgaagattttgcaaaacctcgaccctcccttcagtatagacggaaagatggtggccgtgaacctggccacaggcaaacggcggaacgactcaggggatcactctgaccacatgcactattatcaggggaagaaatatttcagggatagacgcggggggggacggaacagcgattggtcctccgacactaataggcagggacagcagtcctcttccgactgctatatatacgactcggctactggctactactacgaccctttagctggcacttattacgacccgaacacccagcaggaagtctatgttccccaagaccctggtcttcctgaagaagaagagatcaaggagaaaaaacccacctctcagggcaagtcctcttctaagaaagagatgagcaagcgtgatggcaaggaaaaaaaagacaggggcgtaactaggtttcaggagaacgccagcgaagggaaagccccagcagaagatgtatttaaaaagccccttcccccgacggtcaagaaggaagagagtccaccaccgcctaaggtggttaaccccctgattgggctgttgggtgagtacgggggtgactcagactatgaggaggaggaggaagaggagcagaccccaccaccccaaccaagaaccgcacagccacagaagcgagaggaacagactaaaaaggagaacgaagaggataaactcacagactggaacaagctggcatgcttgctctgccggcgtcagttccccaacaaagaggtgctgatcaagcaccagcagctgagtgatctccacaagcagaacctggagatccaccgaaaaattaagcagtctgagcaggaacttgcatatctggaacggcgagaacgggagggtaagttcaaggggcgaggcaacgataggcgcgagaaactgcagtcctttgatagccccgagcgtaaacggatcaagtattccagagaaaccgattccgaccggaaactggttgacaaggaagacattgatacatcttccaaaggggggtgtgttcagcaggccacaggctggagaaagggcactggactgggctacggacacccagggctcgcctcctcagaagaggcggagggtcggatgcgcggcccttccgtgggcgcctccgggcggacgagcaagagacagtccaatgaaacgtaccgagacgccgttcggcgggtaatgtttgcccggtataaggaattagactag

SEQ ID NO: 279276 - DNA, 1806 bp, Artificial Sequence
  derived and/or modified sequence
atgatccaggacaaggaggtgaccctggagtatgtgagcagcctggacttctggtactgcaagcgctgcaaggccaacattggaggccacaggagcagctgcagcttctgcaagaacccccgggaggtgacagaggccaagcaggagctgatcacctacccccagccccagaagaccagcatcccagcccccctggagaagcagcccaaccagcccctgcggcctgctgacaaggagcctgagcccaggaagcgggaggagggccaggagagccggctgggccaccagaagcgggaggccgagcgctacctgccccccagccggcgggagggccccaccttcagaagagaccgggagcgggagagctggagcggggagacccggcaggatggagagagcaagaccatcatgctgaagaggatctaccgcagcaccccacctgaggtgattgtggaggtgctggagccctacgtgcggctgaccacagccaacgtgcgcatcatcaagaacagaacaggccccatgggccacacctacggcttcatcgacctggacagccacgccgaggccctgcgggtggtgaagatcctgcagaacctggacccccccttcagcattgatggcaagatggtggccgtgaacctggccaccgggaagagaagaaatgacagcggggaccacagcgaccacatgcactactaccagggcaagaagtacttccgggacagaagaggaggcggcaggaacagcgactggagcagtgacaccaaccggcagggccagcagagcagcagtgactgctacatctatgacagcgccaccggctactactatgaccccctggccggcacctactatgaccccaacacccagcaggaggtgtatgtgccccaggaccccggcctgcctgaggaggaggagatcaaggagaagaagcccaccagccagggcaagagcagcagcaagaaggagatgagcaagagagatggcaaggagaagaaggacagaggagtgacccgcttccaggagaatgccagcgagggcaaggccccagcagaagatgtgttcaagaagcccctgcccccaacagtgaagaaggaggagagccccccaccacccaaggtggtgaaccccctcatcggcctgctgggggagtatggaggagacagcgactatgaggaggaggaggaggaggagcagaccccaccaccccagcccaggacagcccagccccagaagcgggaggagcagaccaagaaggaaaatgaggaggacaagctgacagactggaacaagctggcctgcctgctgtgccggcggcagttccccaacaaggaggtgctgatcaagcaccagcagctgagtgacctgcacaagcagaacctggagatccacaggaagatcaagcagagcgagcaggagctggcctacctggagcggcgggagcgggagggcaagttcaagggcagaggaaatgaccggcgggagaagctgcagagctttgacagccctgagaggaagaggatcaagtacagccgggagacagacagcgacaggaagctggtggacaaggaggacatcgacaccagcagcaagggcggctgtgtgcagcaggccaccggctggaggaagggcaccggcctgggctacggccaccctggcctggccagcagcgaggaggccgagggccgcatgaggggccccagcgtgggcgccagcggccgcaccagcaagaggcagagcaatgagacctacagagatgctgtgcggcgggtgatgtttgcccgctacaaggagctggactag

SEQ ID NO: 279277 - DNA, 1398 bp, Artificial Sequence
  derived and/or modified sequence
atgctgaagaggatctaccgcagcaccccacctgaggtgattgtggaggtgctggagccctacgtgcggctgaccacagccaacgtgcgcatcatcaagaacagaacaggccccatgggccacacctacggcttcatcgacctggacagccacgccgaggccctgcgggtggtgaagatcctgcagaacctggacccccccttcagcattgatggcaagatggtggccgtgaacctggccaccgggaagagaagaaatgacagcggggaccacagcgaccacatgcactactaccagggcaagaagtacttccgggacagaagaggaggcggcaggaacagcgactggagcagtgacaccaaccggcagggccagcagagcagcagtgactgctacatctatgacagcgccaccggctactactatgaccccctggccggcacctactatgaccccaacacccagcaggaggtgtatgtgccccaggaccccggcctgcctgaggaggaggagatcaaggagaagaagcccaccagccagggcaagagcagcagcaagaaggagatgagcaagagagatggcaaggagaagaaggacagaggagtgacccgcttccaggagaatgccagcgagggcaaggccccagcagaagatgtgttcaagaagcccctgcccccaacagtgaagaaggaggagagccccccaccacccaaggtggtgaaccccctcatcggcctgctgggggagtatggaggagacagcgactatgaggaggaggaggaggaggagcagaccccaccaccccagcccaggacagcccagccccagaagcgggaggagcagaccaagaaggaaaatgaggaggacaagctgacagactggaacaagctggcctgcctgctgtgccggcggcagttccccaacaaggaggtgctgatcaagcaccagcagctgagtgacctgcacaagcagaacctggagatccacaggaagatcaagcagagcgagcaggagctggcctacctggagcggcgggagcgggagggcaagttcaagggcagaggaaatgaccggcgggagaagctgcagagctttgacagccctgagaggaagaggatcaagtacagccgggagacagacagcgacaggaagctggtggacaaggaggacatcgacaccagcagcaagggcggctgtgtgcagcaggccaccggctggaggaagggcaccggcctgggctacggccaccctggcctggccagcagcgaggaggccgagggccgcatgaggggccccagcgtgggcgccagcggccgcaccagcaagaggcagagcaatgagacctacagagatgctgtgcggcgggtgatgtttgcccgctacaaggagctggactag

SEQ ID NO: 279278 - DNA, 1806 bp, Artificial Sequence
  derived and/or modified sequence
atgatccaggacaaggaggtgaccctggagtacgtgagcagcctggatttttggtactgcaagcgctgcaaggcaaatatcggaggtcataggtcatcatgttctttctgcaagaatcctagagaggtgaccgaggctaagcaggagttgatcacataccctcagccccaaaaaacttccatccccgctccgcttgaaaaacagcctaatcagccgctccgccctgccgacaaggaaccagaaccacggaaacgagaggaagggcaagagtccaggcttggtcaccagaagagggaggccgagcggtatctaccaccttcacgacgcgaggggcccactttccggagggatagagagcgcgaatcttggtccggggagaccaggcaagacggcgagagtaagactattatgctcaagaggatatacaggagcacaccacccgaagttatcgtcgaggtgctggagccctacgtcaggctcactacagctaatgtgagaatcatcaagaaccgtactggacccatggggcatacctacggattcattgacttggactcccatgcagaggcgctgcgggtggtgaagattttacagaacctggatcctccgttcagcatcgatggaaagatggtagcggttaacctggccactggaaaacggagaaacgatagcggtgaccacagcgatcacatgcactactatcagggtaaaaagtatttcagagatcggcggggcggcgggaggaactccgattggagctctgacaccaaccggcagggtcaacaatctagttcggactgctacatctacgacagcgctacaggttactactatgacccactcgccggtacttattatgatcccaacactcagcaggaggtgtatgttccgcaggaccctggactgcctgaagaggaggaaatcaaggaaaaaaagcccacctcacagggcaaaagtagttcaaaaaaggagatgtccaaacgcgatggaaaggagaaaaaggatcgcggggtcacccggtttcaggaaaacgccagtgaaggcaaagctcccgccgaggatgtgtttaagaaacccctcccaccgactgtgaaaaaggaggaatctccccccccaccaaaggtagtcaatccgctgatcggcctcctaggagaatacggcggcgactccgattacgaggaggaagaagaagaggaacagactcctcctccacagccaaggactgcgcagccccagaaaagagaagaacagaccaagaaagagaacgaagaggataagctcaccgactggaataaactggcctgtttgctgtgtcggaggcagtttccaaataaagaggtgctgattaagcatcagcagctgtccgacctgcacaaacagaacctggaaatccataggaaaataaagcagtctgagcaagagctggcctacttggaacgacgtgaacgcgagggcaaatttaagggcagaggaaacgaccgccgcgaaaagctgcagtctttcgattctccagagagaaagcgaattaaatattctcgcgagaccgacagtgatcggaagctggtcgacaaggaagatatcgatacatcttctaaaggcgggtgcgtacagcaggcaaccggctggaggaagggaaccggtcttggatatgggcatcccgggctggcatcaagcgaggaagctgagggacgtatgagagggccatccgtgggcgcatcgggaaggacaagcaagcgtcagagtaacgagacatacagagacgccgtgcgacgcgtcatgtttgctaggtataaggagttggactag

SEQ ID NO: 279279 - DNA, 1806 bp, Artificial Sequence
  derived and/or modified sequence
atgatccaggacaaggaggtgaccctggagtacgtgagcagcctggatttttggtactgcaaacggtgcaaggccaatattggcggacataggagttcatgttccttctgtaaaaacccgagggaggtaacagaggcaaagcaggagctgatcacctatcctcagcctcagaagacttcgatcccggcaccgcttgaaaagcagcccaaccagccattgagacccgctgataaggagcccgaaccacgcaagcgggaagagggacaggaaagccgactgggacatcagaagcgggaggctgagcgttatcttcccccaagccgccgcgagggaccaactttccgacgcgaccgtgaacgggagagttggtctggcgaaacaaggcaggacggagagtctaaaaccatcatgttgaaacgcatttataggagcacgccgccagaagttatagtggaagtcctggagccatacgtgaggcttaccaccgctaatgtgagaataattaagaataggactggtcctatgggacacacctacggctttattgacctggattcccatgcagaagcactgcgggtggtaaagatactgcagaatctagacccccctttctcaattgacgggaagatggttgccgtcaacctagccactgggaaaagaaggaacgatagcggcgaccattctgatcacatgcactactaccagggcaagaagtatttccgcgacagacgcggcggtgggcgtaactctgattggtcttctgatacgaatcgtcaaggacagcaatcttcatccgattgttacatctatgactctgctaccggctactactacgatcccctggccgggacctattacgaccctaatacccagcaggaggtttacgtacctcaggatcccggtctgcctgaagaagaagagatcaaggagaaaaaaccaacttcccagggcaagagctcctcaaagaaagaaatgtctaaacgcgacgggaaagaaaaaaaggatagaggcgtaacccgcttccaagagaacgcctctgagggtaaggctccagccgaggatgtattcaaaaagcccctaccacccaccgtgaaaaaggaggaaagcccccccccaccaaaggtggttaatccgctgattggcctgctgggagagtacggaggagactccgattacgaagaggaagaggaggaggagcagacaccaccccctcaacccagaactgctcagccgcaaaaaagggaggaacaaacaaagaaggagaacgaagaggacaaattaactgactggaataagttggcctgtctactttgcaggaggcagttcccaaacaaggaggtgttgatcaagcaccaacaactcagcgacttgcacaagcagaacctagaaatccataggaagatcaagcagtccgaacaggagctggcctatttggaacggagggagagggaaggcaagttcaagggccgcgggaatgatcggcgggaaaagctccagagctttgactcacccgagagaaagcggattaaatattcacgggagactgacagtgaccggaagttggtcgacaaagaggatatagacacatccagcaaagggggctgcgttcagcaggctactggatggcgcaagggtactggacttggctacggccaccccggactggcttcttcagaggaggcggaggggagaatgagaggcccttctgtgggagccagtggccgaacaagcaagagacagagcaacgagacataccgggatgccgtcaggagagtaatgttcgcaagatacaaggaactggattag

SEQ ID NO: 279280 - DNA, 1398 bp, Artificial Sequence
  derived and/or modified sequence
atgctgaagcggatctaccggagcaccccccccgaggtgatcgtggaagttctggaaccatacgtacgcctcaccacggctaatgtgcgcatcatcaaaaatcgaacaggaccgatgggacatacatacggattcattgacctggattctcatgccgaagccctccgtgtggtgaaaattttgcaaaatctagatccaccctttagtatagatggcaagatggtggctgtaaatctggcaaccggtaagcgccggaatgatagcggagatcattctgaccacatgcactactaccagggtaaaaagtactttcgggatcgccgagggggaggccgaaattctgactggagtagcgatacaaatcgtcaggggcagcaatcctcgtccgattgctacatctacgacagtgcaacgggttattattatgaccccctcgctggaacatattacgatcccaatacccagcaggaagtgtatgtgccgcaggacccgggacttcccgaggaagaggagatcaaggagaaaaaaccaacctctcaggggaagtcctcctccaaaaaggagatgagcaagagagatggaaaagagaagaaagaccgcggagtgactcggtttcaggagaacgcctcagagggcaaggcccctgcagaggacgtcttcaaaaagcccttgccaccaactgtcaagaaggaggagagccccccacccccgaaggtggtgaaccccctgatcggcctccttggggaatacggaggcgatagcgattacgaggaggaggaggaagaggaacagacgccccctcctcagcctcgtaccgctcagccgcaaaagcgagaagagcagactaagaaagagaatgaggaagacaagctgacagattggaacaaacttgcttgtttgctctgtcggagacagttccccaataaggaagttttgatcaagcatcagcaactgagtgatctgcataagcagaatctggagatccaccggaaaatcaagcagagtgagcaagagctcgcctacctggaacggcgggaaagggagggaaagtttaagggaagaggcaatgaccgcagggagaagttgcagtcttttgactcaccagaacgcaaacgcattaaatacagcagggaaaccgattctgacagaaaattggtagataaggaagacattgatacctcaagtaaaggcggttgcgtgcagcaggcaacgggctggcggaagggcaccgggttggggtatggtcatcctggcttggcctcaagcgaagaggccgaggggagaatgagaggacccagtgtcggggcctctgggcggactagtaaacggcagagcaatgaaacctatcgagatgctgtgagacgcgttatgtttgctaggtacaaagagctggactag

SEQ ID NO: 279281 - DNA, 1806 bp, Artificial Sequence
  derived and/or modified sequence
atgatccaggacaaagaggtgactttggaatacgtcagcagtctggacttttggtactgcaagcggtgtaaagcaaatattggtggccatagatctagctgctctttttgtaaaaatccacgcgaagtgacggaggccaagcaggaattgatcacgtatccacagccccagaagacaagtatcccagcgccactggaaaagcagcctaaccaacctttaaggcccgctgataaagagcctgagcctagaaaacgtgaggaaggtcaggagtcacgcctcggccaccaaaagagggaggcagagcgttacctgcctccctcccggagagaaggcccaactttccgtcgggatcgggagcgtgagagctggagtggagaaacacgtcaagacggggagagtaagactatcatgctcaaaaggatctaccggagtacaccaccggaggttattgtcgaagtgctagagccatatgtcagactcacaaccgcaaatgtccggattatcaaaaaccggacaggccctatgggccacacctatggtttcattgacctggattcacacgccgaggccctccgtgtcgtgaagatactgcagaatttggaccctccctttagtattgatggcaagatggttgctgtgaatcttgctactggaaaacgcaggaatgactccggcgaccacagtgaccacatgcactactaccagggaaaaaagtatttccgagataggaggggcggaggcagaaacagtgattggtcttccgataccaatcggcaagggcagcagagttcctcagattgttatatctatgactctgcaacgggctactactatgatccactggctggaacatactacgaccctaacacgcagcaggaagtttatgtgccacaggatcccggacttccggaagaagaagaaatcaaggagaaaaagccaacttcacaaggaaaaagctccagtaagaaggaaatgagcaaaagggacgggaaggaaaaaaaggacagaggcgtgacgaggtttcaggagaacgcttcagaagggaaggctcccgcagaagatgtcttcaaaaagcccctgccacctacagtaaaaaaagaagagagcccaccgcctcctaaagtcgtaaatcccctgattgggctgttaggcgaatacgggggtgattccgactatgaggaggaggaggaggaagagcagacgcccccaccacagcccagaactgcccagccgcaaaagcgggaggagcagaccaaaaaggagaacgaggaagataaacttacagattggaacaagctggcttgcttattatgtcgacgtcagttcccgaacaaggaagtgctcataaaacaccaacagttatccgatcttcataagcagaatcttgagatacacagaaagatcaagcagagtgaacaggaattggcttacttggagcgtcgggaaagggaaggcaagttcaaggggaggggcaacgacagacgcgaaaagttacagagtttcgactcccctgaaagaaagaggatcaaatactccagagagacagacagtgacagaaagttggtggataaagaggacatcgacacctcttcaaagggaggatgcgtacagcaagcaacagggtggagaaagggcaccggtcttgggtatggccatcctggcctggcttccagcgaggaagccgagggtcgcatgcgcggaccatccgtgggtgctagcggacggacatctaaaagacaaagcaatgaaacataccgcgatgccgtcagacgtgtgatgttcgccagatataaggagcttgattag

SEQ ID NO: 279282 - DNA, 1806 bp, Artificial Sequence
  derived and/or modified sequence
atgattcaggacaaagaagtgaccctcgaatacgtcagcagcctcgacttttggtattgtaaaagatgcaaagctaacatcggtgggcaccggtcctcctgctctttctgtaagaatcccagggaagtgaccgaggcgaagcaggaattaattacctatccacagcctcagaagacctcaatacctgcacccctggagaagcagccaaatcaacctctacgtcctgccgacaaagagcctgagccgagaaagcgggaagagggtcaggaatctcgcctaggacaccagaaacgcgaagctgaaaggtaccttcccccaagcagacgggaagggcctacattccgccgagaccgggagcgcgaaagctggtccggagagaccaggcaggatggcgagagcaagactataatgctgaaaaggatttacaggagtacacccccagaagtgatcgtcgaagtgctggagccatatgtgcggctgacaaccgcaaatgttaggatcatcaagaatcgcactggtccgatgggccacacttatggattcattgacttggacagccatgcggaagctctgcgcgtggtcaaaatcttacagaacctggaccccccatttagtattgacggaaagatggttgcagtcaatctagccacaggcaagagacgaaatgacagcggcgaccactctgaccacatgcactattatcagggcaagaaatactttcgcgatagacgcggtgggggacgaaactccgactggagctcagatacaaaccgccaggggcaacagagcagcagcgactgctatatctacgactccgccaccgggtactattacgacccactggctggtacatactacgaccccaatacccaacaagaagtgtacgtcccacaggatcccggactgccagaggaggaagaaatcaaagaaaagaagcccacttcacaagggaaatcttcgtccaagaaagagatgtccaagagagatggcaaggagaaaaaagacagaggcgttacacggtttcaagagaacgcctccgagggcaaggccccagccgaagacgtctttaagaagccattacctccaactgtcaaaaaagaagaatcccccccaccacctaaggtggtgaacccactgattgggttattgggagagtacggaggtgattctgattatgaggaagaagaagaagaggaacagactcccccaccccagccacgcacagcacagccccagaagcgtgaggaacagaccaagaaggaaaatgaggaagacaaactcactgattggaacaaattggcttgtctgttgtgcagacggcagttcccaaataaagaggtactcataaaacaccaacaactgtcagatctgcataagcagaatctggagattcaccggaaaattaaacaatctgaacaggagttagcttacttggagagacgcgagcgtgaaggcaagttcaagggccgtggcaacgaccggagagagaagctgcagagttttgactcccctgaacggaagcgcattaagtattctagggagacggacagcgaccggaagctggttgataaggaagacatcgacacttcgagcaagggcggttgtgtccagcaggcgacagggtggcgcaaaggcaccggccttggatacggccacccaggtttggccagtagtgaggaggccgagggcagaatgcggggacccagcgtcggcgcatcaggcaggacttccaagcgacaatctaacgaaacctacagagatgccgtacgccgtgtcatgtttgccaggtacaaagagctcgactag

SEQ ID NO: 279283 - DNA, 1398 bp, Artificial Sequence
  derived and/or modified sequence
atgctgaaaagaatatacagaagcaccccacccgaggtaattgtcgaagttttggagccctacgtgcgactgactacagctaacgttaggattattaagaatcgcaccgggcctatgggccacacatacggatttatcgacctggattctcacgctgaagccctcagggttgtaaaaatattacagaatctggatccccctttttccattgacgggaaaatggtggctgttaacctggccactggcaagaggcgtaatgactcgggcgatcacagcgatcacatgcactactaccagggcaagaaatattttagggaccgtcgaggcggagggcgtaactcagattggtcctccgataccaaccgacagggccagcagagcagtagcgattgttatatttacgactctgccaccgggtattattacgatccgctcgctggtacttattatgaccccaacacccagcaggaagtgtacgtgccccaggatccagggttgcctgaagaggaggaaatcaaagagaaaaagccaacaagccaagggaagtcctcttctaagaaggagatgtccaaacgggatggcaaagaaaagaaggatcgcggagttacacgctttcaggagaacgcctcagaaggcaaggctccagctgaggacgtgttcaaaaagccgcttccccctacagtaaaaaaggaagaatccccccctccccctaaggtagttaaccctctgatcggcttgcttggcgagtatggaggcgatagcgattacgaggaggaggaggaggaggagcagacacccccaccacagcctaggactgcccagccacagaaacgggaggagcagactaagaaagaaaacgaagaagataagctcactgattggaacaagctagcctgcctgctctgccggagacagtttcccaacaaagaagtgctgatcaagcaccagcaactgtccgatctccacaagcagaatctggagatccatcggaaaatcaagcagtctgagcaggaattagcttacttagaacggcgagagagggagggaaagtttaagggacggggaaacgacaggagggagaagctgcaatctttcgacagtccagaacgaaaaagaatcaagtactcccgcgaaaccgactcagacagaaagctggtcgacaaggaagatatcgatacctcaagcaaaggcggttgcgtgcagcaggccaccggctggaggaaaggcaccggacttggatacggccatcccggtcttgctagctccgaggaagcggaggggagaatgagaggcccatcagtgggagcatccggtcgaacttccaaaaggcagtccaatgagacctatagagacgcagtgagacgggtaatgtttgccagatataaagagctggattag

SEQ ID NO: 279284 - DNA, 1806 bp, Artificial Sequence
  derived and/or modified sequence
atgatccaggacaaggaggtgaccctggagtacgtgagcagcctggacttctggtactgcaagagatgcaaggccaacatcggcggccacagaagcagctgcagcttctgcaagaaccccagagaggtgaccgaggccaagcaggagctgatcacctacccccagccccagaagaccagcatccccgcccccctggagaagcagcccaaccagcccctgagacccgccgacaaggagcccgagcccagaaagagagaggagggccaggagagcagactgggccaccagaagagagaggccgagagatacctgccccccagcagaagagagggccccaccttcagaagagacagagagagagagagctggagcggcgagaccagacaggacggcgagagcaagaccatcatgctgaagagaatctacagaagcaccccccccgaggtgatcgtggaggtgctggagccctacgtgagactgaccaccgccaacgtgagaatcatcaagaacagaaccggccccatgggccacacctacggcttcatcgacctggacagccacgccgaggccctgagagtggtgaagatcctgcagaacctggacccccccttcagcatcgacggcaagatggtggccgtgaacctggccaccggcaagagaagaaacgacagcggcgaccacagcgaccacatgcactactaccagggcaagaagtacttcagagacagaagaggcggcggcagaaacagcgactggagcagcgacaccaacagacagggccagcagagcagcagcgactgctacatctacgacagcgccaccggctactactacgaccccctggccggcacctactacgaccccaacacccagcaggaggtgtacgtgccccaggaccccggcctgcccgaggaggaggagatcaaggagaagaagcccaccagccagggcaagagcagcagcaagaaggagatgagcaagagagacggcaaggagaagaaggacagaggcgtgaccagattccaggagaacgccagcgagggcaaggcccccgccgaggacgtgttcaagaagcccctgccccccaccgtgaagaaggaggagagcccccccccccccaaggtggtgaaccccctgatcggcctgctgggcgagtacggcggcgacagcgactacgaggaggaggaggaggaggagcagaccccccccccccagcccagaaccgcccagccccagaagagagaggagcagaccaagaaggagaacgaggaggacaagctgaccgactggaacaagctggcctgcctgctgtgcagaagacagttccccaacaaggaggtgctgatcaagcaccagcagctgagcgacctgcacaagcagaacctggagatccacagaaagatcaagcagagcgagcaggagctggcctacctggagagaagagagagagagggcaagttcaagggcagaggcaacgacagaagagagaagctgcagagcttcgacagccccgagagaaagagaatcaagtacagcagagagaccgacagcgacagaaagctggtggacaaggaggacatcgacaccagcagcaagggcggctgcgtgcagcaggccaccggctggagaaagggcaccggcctgggctacggccaccccggcctggccagcagcgaggaggccgagggcagaatgagaggccccagcgtgggcgccagcggcagaaccagcaagagacagagcaacgagacctacagagacgccgtgagaagagtgatgttcgccagatacaaggagctggactag

SEQ ID NO: 279285 - DNA, 1398 bp, Artificial Sequence
  derived and/or modified sequence
atgctgaagagaatctacagaagcaccccccccgaggtgatcgtggaggtgctggagccctacgtgagactgaccaccgccaacgtgagaatcatcaagaacagaaccggccccatgggccacacctacggcttcatcgacctggacagccacgccgaggccctgagagtggtgaagatcctgcagaacctggacccccccttcagcatcgacggcaagatggtggccgtgaacctggccaccggcaagagaagaaacgacagcggcgaccacagcgaccacatgcactactaccagggcaagaagtacttcagagacagaagaggcggcggcagaaacagcgactggagcagcgacaccaacagacagggccagcagagcagcagcgactgctacatctacgacagcgccaccggctactactacgaccccctggccggcacctactacgaccccaacacccagcaggaggtgtacgtgccccaggaccccggcctgcccgaggaggaggagatcaaggagaagaagcccaccagccagggcaagagcagcagcaagaaggagatgagcaagagagacggcaaggagaagaaggacagaggcgtgaccagattccaggagaacgccagcgagggcaaggcccccgccgaggacgtgttcaagaagcccctgccccccaccgtgaagaaggaggagagcccccccccccccaaggtggtgaaccccctgatcggcctgctgggcgagtacggcggcgacagcgactacgaggaggaggaggaggaggagcagaccccccccccccagcccagaaccgcccagccccagaagagagaggagcagaccaagaaggagaacgaggaggacaagctgaccgactggaacaagctggcctgcctgctgtgcagaagacagttccccaacaaggaggtgctgatcaagcaccagcagctgagcgacctgcacaagcagaacctggagatccacagaaagatcaagcagagcgagcaggagctggcctacctggagagaagagagagagagggcaagttcaagggcagaggcaacgacagaagagagaagctgcagagcttcgacagccccgagagaaagagaatcaagtacagcagagagaccgacagcgacagaaagctggtggacaaggaggacatcgacaccagcagcaagggcggctgcgtgcagcaggccaccggctggagaaagggcaccggcctgggctacggccaccccggcctggccagcagcgaggaggccgagggcagaatgagaggccccagcgtgggcgccagcggcagaaccagcaagagacagagcaacgagacctacagagacgccgtgagaagagtgatgttcgccagatacaaggagctggactag

SEQ ID NO: 279286 - DNA, 757 bp, Artificial Sequence
  derived and/or modified sequence
gaaggaccctgcgagggccgcaggctatccagcgtggcgcctggtggccgggccctgtgccggaggacaaggagtgagatggcctcaatcttgcgaagccctcaggctctccagctcactctagccctgatcaagcctgacgcagtcgcccatccactgattctggaggctgttcatcagcagattctaagcaacaagttcctgattgtacgaatgagagaactactgtggagaaaggaagattgccagaggttttaccgagagcatgaagggcgttttttctatcagaggctggtggagttcatggccagcgggccaatccgagcctacatccttgcccacaaggatgccatccagctctggaggacgctcatgggacccaccagagtgttccgagcacgccatgtggccccagattctatccgtgggagtttcggcctcactgacacccgcaacaccacccatggttcggactctgtggtttcagccagcagagagattgcagccttcttccctgacttcagtgaacagcgctggtatgaggaggaagagccccagttgcgctgtggccctgtgtgctatagcccagagggaggtgtccactatgtagctggaacaggaggcctaggaccagcctgatgcaggtctatgaagaccagtggtagtgcccagacttctcctagacatctagtctaaaacattctcctaggaccagggaagcctggcttacagtgccatttctgctgggcaccaccac

SEQ ID NO: 279287 - DNA, 174 bp, Artificial Sequence
  derived and/or modified sequence
atggcgtccttaagccggccaagtctgcctagctgcctatgtagcttcctactgctgctcctgctgcaggtgagctcctcatacgcgggcctggtggcagtggcgagatcctggctcattgccgcatccacatcacaagctcaggtcatactcctcacgcagcctttggagtag

SEQ ID NO: 279288 - DNA, 174 bp, Artificial Sequence
  derived and/or modified sequence
atggcctcgctatcgaggcctagcctgccaagctgtctctgctctttcttgcttttgctgttactacaggtctcttccagttacgccgggctggttgctgtggcccgttcttggttgatcgctgccagtacctctcaggctcaggtgatccttctgacacaaccactcgaatag

SEQ ID NO: 279289 - DNA, 174 bp, Artificial Sequence
  derived and/or modified sequence
atggcctcactgtcacgcccatctcttccctcctgcctctgttcttttcttctgttactgctgcttcaggtatctagctcctatgcgggccttgtggccgtggcgaggagttggctgattgctgcctctactagccaggctcaggtgattctactcacacagccactcgaatag

SEQ ID NO: 279290 - DNA, 174 bp, Artificial Sequence
  derived and/or modified sequence
atggcttctctgagtcgaccatcactgccctcttgcctttgtagcttcctgctgcttctgctccttcaggtgtcatccagctacgctggactcgtcgcagtggccagatcatggctgatagcggcaagcacctcccaggcccaagtaattctattgacccagcctctggaatag

SEQ ID NO: 279291 - DNA, 174 bp, Artificial Sequence
  derived and/or modified sequence
atggctagcctgtccaggccttccttaccaagttgcctgtgcagcttcttgcttttgctattgctgcaggtctccagcagctatgccggcctggtcgccgtagctcggagctggctgatagctgcaagcaccagtcaggcccaggtgatcctcttaactcagcccttagagtag

SEQ ID NO: 279292 - DNA, 174 bp, Artificial Sequence
  derived and/or modified sequence
atggcctctctcagccggccctcgctgccttcctgcttgtgtagctttctacttctgttactgctgcaggtgagctcctcctacgccggcctcgtagccgtagcccgcagttggctcatcgccgcctctacaagccaggcgcaggtcatcttactgacacaacccctggagtag

SEQ ID NO: 279293 - DNA, 174 bp, Artificial Sequence
  derived and/or modified sequence
atggcctctctgagcaggccaagcctccctagctgcctgtgttcttttctgctgctgctgctgctccaggttagctccagttatgccggtcttgtggccgttgctaggtcttggctgatagctgcaagcacatctcaggctcaggtcatcttgctgacccaaccactagagtag

SEQ ID NO: 279294 - DNA, 174 bp, Artificial Sequence
  derived and/or modified sequence
atggccagcctgagccggcccagcctgcccagctgcctgtgcagcttcctgctgctgctgctgctgcaggtgagcagcagctatgccggcctggtggccgtggcccgctcctggctgattgctgccagcaccagccaggcccaggtgatcctgctgacccagcccctggagtag

SEQ ID NO: 279295 - DNA, 174 bp, Artificial Sequence
  derived and/or modified sequence
atggccagcctgagccggcccagcctgcccagctgcctgtgcagctttctgttactcctgctgctacaggtttcatcttcttacgcggggctggtggccgtggctagaagctggttgattgcagcatctacgtcccaggcccaggtcattctcctcacccagccactggagtag

SEQ ID NO: 279296 - DNA, 174 bp, Artificial Sequence
  derived and/or modified sequence
atggccagcctgagccggcccagcctgcccagctgcctgtgcagctttctgctgcttctgctgttacaagtaagttccagttatgcagggcttgtggccgtggcaaggagctggctcatcgctgcatccacaagccaagcccaggttattctcttgacacagcctctggaatag

SEQ ID NO: 279297 - DNA, 174 bp, Artificial Sequence
  derived and/or modified sequence
atggccagcctgagccggcccagcctgcccagctgcctgtgcagcttcctgttgctgctgctccttcaggtgtcgagctcatacgcaggattagttgctgtcgcacggagctggttgattgccgcctcaacgtctcaggcccaggtaatccttttgacccaacctcttgaatag

SEQ ID NO: 279298 - DNA, 174 bp, Artificial Sequence
  derived and/or modified sequence
atggccagcctgagccggcccagcctgcccagctgcctgtgcagcttccttctgttgcttctgttgcaagtatcgtcatcctacgcgggccttgtcgccgttgccagatcttggctgatcgccgctagtaccagtcaggcacaggtgattctgctgacccagccgttagaatag

SEQ ID NO: 279299 - DNA, 174 bp, Artificial Sequence
  derived and/or modified sequence
atggccagcctgagccggcccagcctgcccagctgcctgtgcagctttctgctcctgttgcttctgcaggtgtcaagttcttatgctggtctggtggctgtcgcccgctcgtggttaatcgctgcctcaacttcccaggctcaggttattctactcacacagcctctcgagtag

SEQ ID NO: 279300 - DNA, 174 bp, Artificial Sequence
  derived and/or modified sequence
atggccagcctgagccggcccagcctgcccagctgcctgtgcagcttcttactgctgctgctcctccaggtcagctcttcttatgcaggcctcgtcgcggttgcccggtcttggttgatcgccgcatctacatcacaggcgcaggtaatcctgttgactcagcctctggaatag

SEQ ID NO: 279301 - DNA, 174 bp, Artificial Sequence
  derived and/or modified sequence
atggcttctttgagcagaccgtctctgccctcctgtttatgttcctttctactgctgctgctgttgcaggtctccagctcttacgccggtctggtggctgtggctcgctcttggctgatagccgcatctacctctcaggcacaagttatcctgttgacccaaccactagaatag

SEQ ID NO: 279302 - DNA, 174 bp, Artificial Sequence
  derived and/or modified sequence
atggcctccctatctcgcccatctttaccatcctgcctgtgctccttcctgctactgctgttattgcaggtatcaagctcatatgccggactggtggccgtcgccagaagctggttaattgctgcgtcgactagccaggcacaggttattctgctgacacagccactggaatag

SEQ ID NO: 279303 - DNA, 174 bp, Artificial Sequence
  derived and/or modified sequence
atggcttcgttgtctcggccaagtctcccatcttgtctctgttcattcctcctcctgctcctcctccaggtgtcttccagctacgccggactcgtggctgtagcaaggagctggctgatcgctgcatcaacaagtcaggctcaggtgatcctcctaacacagcccctggagtag

SEQ ID NO: 279304 - DNA, 174 bp, Artificial Sequence
  derived and/or modified sequence
atggctagtctttcgcggccatccctgccatcatgcctctgtagttttctgctactgcttcttcttcaggtgtcctcctcttacgctggtctggtggccgtggctcggtcatggctcattgctgcatccacaagtcaggctcaggtcatcttattgacgcagcctttggagtag

SEQ ID NO: 279305 - DNA, 174 bp, Artificial Sequence
  derived and/or modified sequence
atggcgtctctgagccggccttccttgcccagctgcctctgcagcttcctgctgctgttgctgctgcaggtgagcagtagttatgccggattagtcgccgtagcacggagttggttaattgccgctagcacttctcaggctcaggtgattttgctcacacagcccctggagtag

SEQ ID NO: 279306 - DNA, 174 bp, Artificial Sequence
  derived and/or modified sequence
atggcttcactgagcagaccatccctcccctcttgcctctgttccttcctgcttctacttctgttgcaggtttcgtcatcttacgccggtctcgtggcggttgccagaagctggctgattgccgcttccacaagtcaggcacaggtgatcctgctcacgcagccgcttgagtag

SEQ ID NO: 279307 - DNA, 174 bp, Artificial Sequence
  derived and/or modified sequence
atggcctctctctctaggcctagcctgccctcttgcctgtgtagctttctgctgctgctgctgctgcaggtcagcagcagttatgctggcctcgttgccgtcgctcggtcgtggctcattgccgcatctaccagtcaagcccaagtgatactcttaacccagcctctagagtag

SEQ ID NO: 279308 - DNA, 728 bp, Artificial Sequence
  derived and/or modified sequence
gaaaaagggtgaaagagaaacttggcgacctcccggaggagttcgcgaagcgaccaggagcgtgttgccatcgtcctcacccggcacccaattccaccacagagtcgggatttcgtcggtgatcgtgatggggtgcttttatttttctctttgattttcaaaaaatgtctatgtgactgtccctatcttaaggggaagttgaaagtgggggcgggggtgctcaatgagaaacgttgccttgtgtgtagttgtttggagcacactgcaaattatattggcatctctttccaaaagtcactttgattcaacttcgatagctttctcgtaaatggcacgtttaggtggtgagaggtggatgaggaaacaggcaccagtgcagctgatttgacctccagtgggatagatacgattagcaccaggatcgtgtctcattttgaacccaggctggagcgcagtggcacaatcgtggcttactgcagcgttgacctcctggcctcaagcagtcctcccactgcagcttctcaagaagccggggatacagatctgaacagaattaagacgaacgagctttcacaattgcagcagatgaagatccattggtaaattgatcaggatttttggcctaccctccaaagaaaaggagcggaaagaatgtcggagcgggccgcggatgacgtcaggggggagccgcgccgcgcggcggcggcggcgggcggagcagcggccgc

SEQ ID NO: 279309 - DNA, 174 bp, Artificial Sequence
  derived and/or modified sequence
atggccagcctgagcagacccagcctgcccagctgcctgtgcagcttcctgctgctgctgctgctgcaggtgagcagcagctacgccggcctggtggccgtggccagaagctggctgatcgccgccagcaccagccaggcccaggtgatcctgctgacccagcccctggagtag

SEQ ID NO: 279310 - DNA, 1790 bp, Artificial Sequence
  derived and/or modified sequence
cccgacccagcgttttccttgggattccgacctccccctcagagaagacaggaggtcgggaaggacctgcagcccaggggcttccaagatgaggcccagagactcggattatcaatgcagagaaatctgaattcaatgaggatcaagccgcctgtgggaagctgtgcatccggagatgtgagtttggggctgaagaagagtggctgaccctgtgcccagaggaggatgaggtgatcgggcgggagctggaggcctcaggccagatgggcggctgcacagccctggtggctgtgtccctgcagggaaagctgtacatggccaatgctggggatagcagggccatcttggtgcggagagatgagatacggccactgagcttcgagttcaccccagagactgagcggcagcggatccagcagctggcctttgtctatcctgagcttctggctggtgagttcacccgactggagttccctcggcggctgaagggggatgacttgggacagaaggttttgttcagggatcaccacatgagtggctggagctacaaacgtgtggagaaatcggatctcaagtacccactgatccatggacagggtaggcaggctcggttactaggaacactggctgtctcccggggcctgggagaccatcagctcagagtcctggacacaaacatccagctcaagcccttcttgctctctgtgccacaggtgactgtgctggatgtggaccagctggagctacaggaggatgatgtggttgtcatggcaactgatggactctgggatgtactgtccaacgagcaggtggcatggctggtgcggagcttcctccctgggaaccaagaggacccacacaggttctcaaagctggcccagatgctgatacacagcacacagggaaaggaagacagtctcacagaggaagggcaggtgtcctacgatgacgtctctgtgttcgtgattcccttgcacagtcagggccaagagagcagtgaccactgaggattcagacactgtatcccagaactgctctagtgcccgggtgtggtctgggcatccctccagtgtgaccaagagcaaatcctgcctgccctatccctagccaccgcccagtgctctcactatccacctcaacacacatccatctcaagaggaacatttataccaggcagtcagagctggaagtgtatggagagcccagcccaccaggtcctgccttttgcggtgataaccttctctggcagagtgactttacaacttaactaggaaacccatgtgaggctcctcagacaggatcttgaacagcccaaagtatcattctcagataggggcacccaagctaagggtattagccaaagatgccaggatgggtagctagcccatgtttagatccaggtctccaattcatggttatcagggcatgtgttcaacaacccccaaagtccacgcaggtggcttgtagaaacctttgggcagcctcatgtctgctaaaacagccatcttcaagacagcccctgaaaagagaccagttcaggtcctgccctgctgttctttgctggagatgaggaacaggtgctggggctaaagtttggggtagagcacaagggacaagaggaactcttggagttggctgggtgagagggctctccatttgctacctgtagtagcctgcctcttaactggttgcttctccctagttccagccctgccctggtctgatgccccaacactgcccttgctttgttttccctgtcacctccctattattaaatgttttctacagaa

SEQ ID NO: 279311 - protein, 270 aa, Artificial Sequence
  derived and/or modified sequence
MHLNGRCICPSDPQFVEEKGIRAEDLVIGALESAFQECDEVIGRELEASGQMGGCTALVAVSLQGKLYMANAGDSRAILVRRDEIRPLSFEFTPETERQRIQQLAFVYPELLAGEFTRLEFPRRLKGDDLGQKVLFRDHHMSGWSYKRVEKSDLKYPLIHGQGRQARLLGTLAVSRGLGDHQLRVLDTNIQLKPFLLSVPQVTVLDVDQLELQEDDVVVMATDGLWDVLSNEQVAWLVRSFLPGNQEDPHRYCSCWGPAWAWVGASSKPK

SEQ ID NO: 279312 - protein, 298 aa, Artificial Sequence
  derived and/or modified sequence
MHLNGRCICPSDPQFVEEKGIRAEDLVIGALESAFQECDEVIGRELEASGQMGGCTALVAVSLQGKLYMANAGDSRAILVRRDEIRPLSFEFTPETERQRIQQLAFVYPELLAGEFTRLEFPRRLKGDDLGQKVLFRDHHMSGWSYKRVEKSDLKYPLIHGQGRQARLLGTLAVSRGLGDHQLRVLDTNIQLKPFLLSVPQVTVLDVDQLELQEDDVVVMATDGLWDVLSNEQVAWLVRSFLPGNQEDPHRFSKLAQMLIHSTQGKEDSLTEEGQVSYDDVSVFVIPLHSQGQESSDH

SEQ ID NO: 279313 - protein, 247 aa, Artificial Sequence
  derived and/or modified sequence
MGGCTALVAVSLQGKLYMANAGDSRAILVRRDEIRPLSFEFTPETERQRIQQLAFVYPELLAGEFTRLEFPRRLKGDDLGQKVLFRDHHMSGWSYKRVEKSDLKYPLIHGQGRQARLLGTLAVSRGLGDHQLRVLDTNIQLKPFLLSVPQVTVLDVDQLELQEDDVVVMATDGLWDVLSNEQVAWLVRSFLPGNQEDPHRFSKLAQMLIHSTQGKEDSLTEEGQVSYDDVSVFVIPLHSQGQESSDH

SEQ ID NO: 279314 - DNA, 813 bp, Artificial Sequence
  derived and/or modified sequence
atgcacctgaatggaaggtgcatctgccctagtgatcctcagtttgtcgaagaaaagggaatccgcgcagaggatctcgtcatcggtgcacttgagtccgctttccaggaatgcgatgaagtgattggaagggagttagaagcctctggtcagatgggcgggtgcaccgcactggtggccgtcagcctccaggggaaactgtacatggctaatgccggggactcccgggctattctggtgagaagggatgagattaggcccctgtcctttgagttcacccccgaaactgagcgtcaaagaatccagcagctggcattcgtttatcccgagctcctggccggcgagttcactaggttggagtttcccagacggttaaaaggcgacgacctggggcagaaagtgctgtttcgtgatcatcacatgagcggttggagttacaaacgggtggagaagagtgacttaaagtatcccctaatacacggtcagggaagacaagccagactgctgggcacgctggctgtgtcaagaggcttgggagatcaccaactacgtgtgctcgataccaacattcagctgaagccatttctgctgtctgtgccccaggttactgtgttggacgtcgatcagctggaactgcaagaggatgatgtcgtcgtgatggctacggacgggctttgggacgtcctgtccaacgagcaagtagcctggctcgtgagatccttccttcctggcaaccaggaggacccccacaggtattgttcatgctggggccccgcctgggcatgggtgggtgcctctagcaaacccaagtag

SEQ ID NO: 279315 - DNA, 897 bp, Artificial Sequence
  derived and/or modified sequence
atgcatcttaacgggcggtgcatctgccctagcgatccgcaatttgtcgaggagaagggtatacgggccgaagacctggtcataggggcgctggaatccgcattccaggagtgtgacgaagtgatcggccgggagctggaggcctccgggcagatgggcgggtgcaccgcgctcgtagccgtgtcgttacagggtaaactctacatggccaacgcaggcgactcccgggccattctcgttcggagagacgaaattaggcctctgagctttgagttcactccagaaactgaaaggcagaggatccagcaactcgcatttgtgtacccagagctgctagccggtgaatttaccaggttggagttcccccgcaggctcaaaggcgatgatctggggcagaaggtgttgtttcgagaccatcacatgtcgggatggagctacaagagggttgaaaagagtgacttaaagtatcctctaatccatggccaagggcgacaagctaggctcttggggaccttggcagtatcaagggggctcggggaccatcagctgcgggtgctggatacaaacatacagcttaagcccttcttgttgtcggtcccccaagtgaccgttctggatgtagaccagctggagcttcaggaggacgacgtcgtggtaatggcaacagatggactgtgggacgtcctgagcaatgagcaggtggcttggcttgtgcgatcttttttaccaggtaatcaggaagatccacatagatttagtaaattggcgcagatgcttatccactccactcaggggaaggaggatagtctgacagaggagggtcaggttagctacgatgacgtctctgtgtttgtcatccctctgcattcacaggggcaggagtctagtgatcattag

SEQ ID NO: 279316 - DNA, 813 bp, Artificial Sequence
  derived and/or modified sequence
atgcacctgaatggccgctgcatctgccccagcgacccccagtttgtggaggagaagggcatccgggcagaggacctggtgattggagccctggagagcgccttccaggagtgtgatgaagtcatcggccgggagctggaggccagcggccagatgggcggctgcacagccctggtggccgtgtccctgcagggcaagctgtacatggccaatgctggggacagccgggccatcctggtgagaagagatgagatccggcccctgagctttgagttcaccccagagacagagcggcagaggatccagcagctggcctttgtgtacccagagctgctggccggggagttcacccggctggagttcccccggcggctgaagggagatgacctgggccagaaggtgctcttccgggaccaccacatgagcggctggagctacaagagggtggagaagagtgacctgaagtaccccctcatccacggccagggccggcaggcccggctgctgggcaccctggccgtgtcccggggcctgggggaccaccagctgcgggtgctggacaccaacatccagctgaagcccttcctgctgtctgtgccccaggtgacagtgctggatgtggaccagctggagctgcaggaggatgatgtggtggtgatggccacagatggcctgtgggatgtgctgagcaatgagcaggtggcctggctggtgcgctccttcctgcccggcaaccaggaggacccccaccgctactgcagctgctggggccctgcctgggcctgggtgggcgccagcagcaagcccaagtag

SEQ ID NO: 279317 - DNA, 897 bp, Artificial Sequence
  derived and/or modified sequence
atgcacctgaatggccgctgcatctgccccagcgacccccagtttgtggaggagaagggcatccgggcagaggacctggtgattggagccctggagagcgccttccaggagtgtgatgaagtcatcggccgggagctggaggccagcggccagatgggcggctgcacagccctggtggccgtgtccctgcagggcaagctgtacatggccaatgctggggacagccgggccatcctggtgagaagagatgagatccggcccctgagctttgagttcaccccagagacagagcggcagaggatccagcagctggcctttgtgtacccagagctgctggccggggagttcacccggctggagttcccccggcggctgaagggagatgacctgggccagaaggtgctcttccgggaccaccacatgagcggctggagctacaagagggtggagaagagtgacctgaagtaccccctcatccacggccagggccggcaggcccggctgctgggcaccctggccgtgtcccggggcctgggggaccaccagctgcgggtgctggacaccaacatccagctgaagcccttcctgctgtctgtgccccaggtgacagtgctggatgtggaccagctggagctgcaggaggatgatgtggtggtgatggccacagatggcctgtgggatgtgctgagcaatgagcaggtggcctggctggtgcgctccttcctgcccggcaaccaggaggacccccaccgcttcagcaagctggcccagatgctgatccacagcacccagggcaaggaggacagcctgacagaggagggccaggtgtcctatgatgatgtgtctgtgtttgtgatccccctgcacagccagggccaggagagcagtgaccactag

SEQ ID NO: 279318 - DNA, 813 bp, Artificial Sequence
  derived and/or modified sequence
atgcacctgaacggccggtgcatctgccccagcgacccccagttcgtggaggagaagggtattcgcgctgaggacctggtgatcggtgccctggagtccgcatttcaggaatgcgacgaggtgatcggaagggaattggaggctagcggacagatggggggctgtaccgctcttgttgcggtgtcactgcagggaaagctgtacatggccaacgctggtgacagccgggccattttggtgcgcagggacgagatcaggcctttgtcattcgagttcacgccagaaaccgaacgccaaagaatccagcagctggcgttcgtgtaccccgaattgctggccggagaatttacacgactggagtttccgcgaaggctgaaaggggacgacttgggtcagaaggtgctattcagagatcatcatatgtccggttggagctataagagggtggagaagtccgatttaaaataccccctgattcatggtcagggcagacaggcaagactgctgggtacactcgcggtgagccgaggcttgggtgatcatcagctgagagtcctggatactaacatccagctgaagcccttcctgctaagcgtgccgcaagttaccgtgctggatgttgaccaattagaactgcaggaagatgatgtggtggtgatggccaccgacggcttgtgggacgtgctctcaaatgagcaagtcgcgtggctagtgcgctctttccttcccggaaatcaggaggaccctcaccgctactgtagctgctggggaccagcctgggcatgggtgggagcttcttccaagcctaagtag

SEQ ID NO: 279319 - DNA, 897 bp, Artificial Sequence
  derived and/or modified sequence
atgcacctgaacggccggtgcatctgccccagcgacccccagttcgtggaggagaaaggcataagagccgaggatcttgtgataggagccctcgagtctgctttccaggaatgcgacgaggtgattggcagggagctcgaggcctcaggccagatgggtgggtgtaccgccctggtagcagtgtccttacaaggtaagttgtatatggcaaatgcaggggatagtcgcgcaattctggtcagacgggacgagattcgcccccttagcttcgagttcacccccgaaaccgaaaggcagagaatccagcaactcgcctttgtctatccagaactactggcgggtgagtttacccgcctggaatttccacgacgcttaaagggtgatgatctgggccagaaggtcctgtttagggaccaccacatgagcggatggtcatataaacgagtggaaaagagcgatcttaagtatccacttattcacggccagggacggcaggcacgcctgctgggtacattggcggtctccagaggactgggcgaccaccagcttagggtgttagatacaaatattcagctcaaacctttcctgctgtctgtgccccaagtcaccgtgctggacgtcgaccaactcgaactgcaagaagacgatgtcgtggtgatggccacagacgggttgtgggatgttttaagtaacgaacaggttgcttggctagtgagatcattcctgcctgggaaccaggaagatcctcaccgattctcgaagctagctcagatgttgattcactcaacccagggaaaagaagacagtttgaccgaggagggtcaggtctcatacgatgacgtgtctgtcttcgttatccctttgcacagccaaggccaggagtcaagcgaccattag

SEQ ID NO: 279320 - DNA, 813 bp, Artificial Sequence
  derived and/or modified sequence
atgcaccttaatggccgatgcatttgcccatccgatcctcaatttgttgaggagaaaggcattcgagcggaagacctggtaattggggcactggaatccgccttccaggaatgtgatgaggtaatcggcagagaactagaggccagcggtcagatggggggttgtaccgctcttgtagctgtgagccttcagggcaagctatatatggccaatgcaggagattccagggctatcctcgtgcggagagacgaaatccgccctttgtcgttcgaattcacccccgagactgagaggcagcgaatccagcagctggccttcgtgtatcctgagctgttagcaggggaattcacacgtctggaattccccaggaggttgaaaggtgatgacctggggcagaaggtgctcttccgcgatcatcacatgtcagggtggagctataaaagagtggaaaagagtgaccttaagtaccctctaattcatggccaaggtcgtcaggcacggttgttgggaaccctcgcagtatctcgcggtctgggagaccatcagctaagagtgctcgacaccaacatccaattaaaaccttttctgctgtctgtcccgcaagtcaccgtgctggatgttgatcagttagagttgcaggaagacgacgtggtggtgatggccactgatggtctgtgggacgttctttctaacgagcaggtggcctggcttgttcgcagttttttaccaggaaaccaggaggatccacaccggtactgtagctgctggggacccgcttgggcctgggtcggcgctagttcaaagcccaaatag

SEQ ID NO: 279321 - DNA, 897 bp, Artificial Sequence
  derived and/or modified sequence
atgcacctcaacggcaggtgcatatgtccctctgaccctcaatttgtggaggaaaaaggtatcagggcggaggatctcgtgatcggggctcttgaatcggccttccaggaatgcgacgaggtgatcgggagggagctcgaggcatccggtcagatgggtggctgcaccgccttagtcgccgtatcccttcaaggaaaactgtatatggctaacgcgggagatagtagagccatcctagtgagaagagatgaaatcagacctttgtcatttgaattcacgcccgagaccgagcgtcagcgaatccaacagttagcattcgtctaccctgagctgctcgcaggagagttcactcggttggagtttccgagacgactaaagggagatgacttagggcagaaagtcctatttcgggatcatcacatgtccggctggtcctacaagagagtagagaaatcggatctgaagtaccctcttattcatgggcaggggcgacaggcccgtctcctcggcactcttgctgtgtccagggggctgggcgatcatcagctccgcgttctggatactaatattcagctgaagcccttcctcctcagcgtgccccaagtgaccgtgcttgacgtggaccagcttgaactgcaggaagacgatgtggttgttatggctaccgacgggctgtgggacgtcttgagcaacgaacaggttgcctggctggtacgtagcttcttaccaggtaaccaggaggatcctcaccgcttctcaaagctggcacagatgttgatccacagcacccagggtaaggaggattcactgactgaggagggtcaggtgtcctatgacgacgtgtcagtcttcgttatcccacttcactcacagggacaagagagctctgaccactag

SEQ ID NO: 279322 - DNA, 813 bp, Artificial Sequence
  derived and/or modified sequence
atgcacctgaacggcagatgcatctgccccagcgacccccagttcgtggaggagaagggcatcagagccgaggacctggtgatcggcgccctggagagcgccttccaggagtgcgacgaggtgatcggcagagagctggaggccagcggccagatgggcggctgcaccgccctggtggccgtgagcctgcagggcaagctgtacatggccaacgccggcgacagcagagccatcctggtgagaagagacgagatcagacccctgagcttcgagttcacccccgagaccgagagacagagaatccagcagctggccttcgtgtaccccgagctgctggccggcgagttcaccagactggagttccccagaagactgaagggcgacgacctgggccagaaggtgctgttcagagaccaccacatgagcggctggagctacaagagagtggagaagagcgacctgaagtaccccctgatccacggccagggcagacaggccagactgctgggcaccctggccgtgagcagaggcctgggcgaccaccagctgagagtgctggacaccaacatccagctgaagcccttcctgctgagcgtgccccaggtgaccgtgctggacgtggaccagctggagctgcaggaggacgacgtggtggtgatggccaccgacggcctgtgggacgtgctgagcaacgagcaggtggcctggctggtgagaagcttcctgcccggcaaccaggaggacccccacagatactgcagctgctggggccccgcctgggcctgggtgggcgccagcagcaagcccaagtag

SEQ ID NO: 279323 - DNA, 897 bp, Artificial Sequence
  derived and/or modified sequence
atgcacctgaacggcagatgcatctgccccagcgacccccagttcgtggaggagaagggcatcagagccgaggacctggtgatcggcgccctggagagcgccttccaggagtgcgacgaggtgatcggcagagagctggaggccagcggccagatgggcggctgcaccgccctggtggccgtgagcctgcagggcaagctgtacatggccaacgccggcgacagcagagccatcctggtgagaagagacgagatcagacccctgagcttcgagttcacccccgagaccgagagacagagaatccagcagctggccttcgtgtaccccgagctgctggccggcgagttcaccagactggagttccccagaagactgaagggcgacgacctgggccagaaggtgctgttcagagaccaccacatgagcggctggagctacaagagagtggagaagagcgacctgaagtaccccctgatccacggccagggcagacaggccagactgctgggcaccctggccgtgagcagaggcctgggcgaccaccagctgagagtgctggacaccaacatccagctgaagcccttcctgctgagcgtgccccaggtgaccgtgctggacgtggaccagctggagctgcaggaggacgacgtggtggtgatggccaccgacggcctgtgggacgtgctgagcaacgagcaggtggcctggctggtgagaagcttcctgcccggcaaccaggaggacccccacagattcagcaagctggcccagatgctgatccacagcacccagggcaaggaggacagcctgaccgaggagggccaggtgagctacgacgacgtgagcgtgttcgtgatccccctgcacagccagggccaggagagcagcgaccactag

SEQ ID NO: 279324 - protein, 138 aa, Artificial Sequence
  derived and/or modified sequence
MFDLEHGSWTKLPRSLRMRDKRADFVVGSLGGHIVAIGGLGNQPCPLGSVESFSLARRRWEALPAMPTARCSCSSLQAGPRLFVIGGVAQGPSQAVEALCLRDGEGLVGAVHWSSSLPEAAISMAPFAAEDTHCGSVG

SEQ ID NO: 279325 - DNA, 417 bp, Artificial Sequence
  derived and/or modified sequence
atgttcgatttggagcacggttcttggacaaagctgccacgctccctgcggatgagggacaagcgggctgactttgtggtgggatcgttggggggccatatcgttgctatcggagggcttggcaatcagccatgtcccctcggcagcgtggaaagcttcagtctcgccaggagaagatgggaagctctccctgctatgcccacagcgcgatgtagctgcagcagtctgcaagcaggccctcgtttatttgtgatcggtggcgtcgcccagggccccagccaagcagttgaggcgctgtgcctgagggatggcgagggtctggtcggagcagtccactggagtagctccctgccggaggcagctatctctatggccccctttgccgctgaggacacccattgcggctccgtggggtag

SEQ ID NO: 279326 - DNA, 417 bp, Artificial Sequence
  derived and/or modified sequence
atgtttgacctggagcacggctcctggaccaagctgcccaggagcctgaggatgagggacaagagagctgactttgtggtgggcagcctgggcggccacatcgtggccatcggcggcctgggcaaccagccctgccccctgggctctgtggagagcttcagcctggcccggcggcgctgggaggccctgcctgccatgcccacagcccgctgcagctgcagcagcctgcaggccggcccccggctgtttgtgattggaggagtggcccagggccccagccaggccgtggaggccctgtgcctgagagatggagagggcctggtgggcgctgtgcactggagcagcagcctgcctgaggccgccatctccatggccccctttgctgctgaggacacccactgcggctctgtgggctag

SEQ ID NO: 279327 - DNA, 417 bp, Artificial Sequence
  derived and/or modified sequence
atgttcgacctggagcacggcagctggaccaagctgccccggagcttgcgcatgagagataagcgggcagactttgtggtaggcagcctgggaggtcacatcgtggctataggtggcctgggaaaccagccatgccctctcgggagtgtggaatctttttctctggcgaggagacgatgggaagctctccccgcgatgcctacggctcggtgttcgtgttctagtctgcaagctggccctcgattgtttgtgataggtggcgtagcccaaggtccctcccaagcggttgaagcattgtgcctccgagacggcgaggggcttgtcggcgctgtacattggtcatccagtttgccagaggcagcaatcagcatggcaccgttcgcagccgaggatacacattgcggctccgtgggttag

SEQ ID NO: 279328 - DNA, 417 bp, Artificial Sequence
  derived and/or modified sequence
atgtttgacctcgagcacggcagttggaccaaattgcctagaagtctgagaatgagagacaagcgagcggactttgtggtgggttccttaggcggtcatattgtcgcaatcggaggactagggaaccagccgtgccccctgggtagcgtggagagcttctcactagcaagaaggagatgggaagcactccctgcaatgcccaccgcaagatgcagctgttcaagcctgcaggcgggtcccagacttttcgttattgggggtgtagctcaggggccttcgcaggccgtggaggccctatgtttacgagatggggagggcttggtcggtgcagtgcattggagctcttcattgccagaagccgctatctctatggccccttttgctgccgaggacacccattgcggtagcgtcggatag

SEQ ID NO: 279329 - DNA, 417 bp, Artificial Sequence
  derived and/or modified sequence
atgttcgacctggagcacggcagctggaccaagctgcccagaagcctgagaatgagagacaagagagccgacttcgtggtgggcagcctgggcggccacatcgtggccatcggcggcctgggcaaccagccctgccccctgggcagcgtggagagcttcagcctggccagaagaagatgggaggccctgcccgccatgcccaccgccagatgcagctgcagcagcctgcaggccggccccagactgttcgtgatcggcggcgtggcccagggccccagccaggccgtggaggccctgtgcctgagagacggcgagggcctggtgggcgccgtgcactggagcagcagcctgcccgaggccgccatcagcatggcccccttcgccgccgaggacacccactgcggcagcgtgggctag

SEQ ID NO: 279330 - protein, 786 aa, Artificial Sequence
  derived and/or modified sequence
MALVFQFGQPVRAQPLPGLCHGKLIRTNACDVCNSTDLPEVEIISLLEEQLPHYKLRADTIYGYDHDDWLHTPLISPDANIDLTTEQIEETLKYFLLCAERVGQMTKTYNDIDAVTRLLEEKERDLELAARIGQSLLKKNKTLTERNELLEEQVEHIREEVSQLRHELSMKDELLQFYTSAAEESEPESVCSTPLKRNESSSSVQNYFHLDSLQKKLKDLEEENVVLRSEASQLKTETITYEEKEQQLVNDCVKELRDANVQIASISEELAKKTEDAARQQEEITHLLSQIVDLQKKAKACAVENEELVQHLGAAKDAQRQLTAELRELEDKYAECMEMLHEAQEELKNLRNKTMPNTTSRRYHSLGLFPMDSLAAEIEGTMRKELQLEEAESPDITHQKRVFETVRNINQVVKQRSLTPSPMNIPGSNQSSAMNSLLSSCVSTPRSSFYGSDIGNVVLDNKTNSIILETEAADLGNDERSKKPGTPGTPGSHDLETALRRLSLRRENYLSERRFFEEEQERKLQELAEKGELRSGSLTPTESIMSLGTHSRFSEFTGFSGMSFSSRSYLPEKLQIVKPLEGSATLHHWQQLAQPHLGGILDPRPGVVTKGFRTLDVDLDEVYCLNDFEEDDTAHHPGKCMSQTNSTFTFTTCRILHPSDELTRVTPSLNSAPTPACGSTSHLKSTPVATPCTPRRLSLAESFTNTRESTTTMSTSLGLVWLLKERGISAAVYDPQSWDRAGRGSLLHSHEDVTCANLGEGGVLSSFLLRSTETPKCVLIPWIGNQ

SEQ ID NO: 279331 - DNA, 2361 bp, Artificial Sequence
  derived and/or modified sequence
atggccctggtgttccagttcggccagcccgtgagagcccagcccctgcccggcctgtgccacggcaagctgatcagaaccaacgcctgcgacgtgtgcaacagcaccgacctgcccgaggtggagatcatcagcctgctggaggagcagctgccccactacaagctgagagccgacaccatctacggctacgaccacgacgactggctgcacacccccctgatcagccccgacgccaacatcgacctgaccaccgagcagatcgaggagaccctgaagtacttcctgctgtgcgccgagagagtgggccagatgaccaagacctacaacgacatcgacgccgtgaccagactgctggaggagaaggagagagacctggagctggccgccagaatcggccagagcctgctgaagaagaacaagaccctgaccgagagaaacgagctgctggaggagcaggtggagcacatcagagaggaggtgagccagctgagacacgagctgagcatgaaggacgagctgctgcagttctacaccagcgccgccgaggagagcgagcccgagagcgtgtgcagcacccccctgaagagaaacgagagcagcagcagcgtgcagaactacttccacctggacagcctgcagaagaagctgaaggacctggaggaggagaacgtggtgctgagaagcgaggccagccagctgaagaccgagaccatcacctacgaggagaaggagcagcagctggtgaacgactgcgtgaaggagctgagagacgccaacgtgcagatcgccagcatcagcgaggagctggccaagaagaccgaggacgccgccagacagcaggaggagatcacccacctgctgagccagatcgtggacctgcagaagaaggccaaggcctgcgccgtggagaacgaggagctggtgcagcacctgggcgccgccaaggacgcccagagacagctgaccgccgagctgagagagctggaggacaagtacgccgagtgcatggagatgctgcacgaggcccaggaggagctgaagaacctgagaaacaagaccatgcccaacaccaccagcagaagataccacagcctgggcctgttccccatggacagcctggccgccgagatcgagggcaccatgagaaaggagctgcagctggaggaggccgagagccccgacatcacccaccagaagagagtgttcgagaccgtgagaaacatcaaccaggtggtgaagcagagaagcctgacccccagccccatgaacatccccggcagcaaccagagcagcgccatgaacagcctgctgagcagctgcgtgagcacccccagaagcagcttctacggcagcgacatcggcaacgtggtgctggacaacaagaccaacagcatcatcctggagaccgaggccgccgacctgggcaacgacgagagaagcaagaagcccggcacccccggcacccccggcagccacgacctggagaccgccctgagaagactgagcctgagaagagagaactacctgagcgagagaagattcttcgaggaggagcaggagagaaagctgcaggagctggccgagaagggcgagctgagaagcggcagcctgacccccaccgagagcatcatgagcctgggcacccacagcagattcagcgagttcaccggcttcagcggcatgagcttcagcagcagaagctacctgcccgagaagctgcagatcgtgaagcccctggagggcagcgccaccctgcaccactggcagcagctggcccagccccacctgggcggcatcctggaccccagacccggcgtggtgaccaagggcttcagaaccctggacgtggacctggacgaggtgtactgcctgaacgacttcgaggaggacgacaccgcccaccaccccggcaagtgcatgagccagaccaacagcaccttcaccttcaccacctgcagaatcctgcaccccagcgacgagctgaccagagtgacccccagcctgaacagcgcccccacccccgcctgcggcagcaccagccacctgaagagcacccccgtggccaccccctgcacccccagaagactgagcctggccgagagcttcaccaacaccagagagagcaccaccaccatgagcaccagcctgggcctggtgtggctgctgaaggagagaggcatcagcgccgccgtgtacgacccccagagctgggacagagccggcagaggcagcctgctgcacagccacgaggacgtgacctgcgccaacctgggcgagggcggcgtgctgagcagcttcctgctgagaagcaccgagacccccaagtgcgtgctgatcccctggatcggcaaccagtag

SEQ ID NO: 279332 - DNA, 2361 bp, Artificial Sequence
  derived and/or modified sequence
atggccctggtgttccaatttgggcagcccgtgcgggcacagccactgcctggactgtgtcacggcaaactgatcaggacaaacgcttgtgatgtatgcaacagcacagatctgcccgaggtggaaatcatttccctcctggaggagcagctgcctcattataagctccgcgcagatacaatctacggatatgatcacgatgactggttacatacgcctctaatctcgccggacgccaacattgacctgacaactgaacagattgaggagaccctgaaatactttctcctatgtgctgaacgggtcgggcaaatgactaagacgtataacgacattgacgcagtgacacgcctgctagaggaaaaagagagagacttagaactggctgcacgaataggccagtctcttctcaaaaaaaacaaaactctcacagaacggaatgaactgcttgaggaacaggtcgagcacatccgggaggaagtgagccagctgagacacgagttaagcatgaaggatgagttactccaattctatacttcagccgccgaggaatcagaacccgagagcgtgtgcagtacacccctcaagagaaacgaaagtagcagtagcgttcaaaactactttcatctggatagtctgcagaaaaaacttaaagacctggaggaagagaacgtggtcctcagatcagaagcctcccagctgaagacagaaacaatcacctatgaagaaaaagaacagcaattggtgaatgactgcgtcaaagagctcagggacgccaacgtgcaaattgccagcatatccgaagagctggccaagaagacagaagatgccgccagacagcaggaagaaatcacacacctcctgagccagattgttgatttgcagaaaaaagccaaagcgtgtgcagttgaaaatgaagagctggtgcagcacctgggggccgccaaggatgcgcagcggcagctgactgctgaactgcgagaactcgaggacaagtacgctgaatgcatggagatgctgcatgaggcccaggaagaacttaagaatcttcggaataagaccatgccaaacactacgagccggcgataccacagtcttgggctctttccaatggactctttggccgcagaaattgagggaacgatgaggaaggaacttcagctagaagaggctgagtcacctgatatcacacatcaaaagagagtcttcgagaccgtgcgcaacattaaccaggtggtaaagcagcgttctctgactcctagtcctatgaatattcccggcagcaatcagagctccgccatgaacagtctgctttccagttgtgttagcacgccgcggtccagtttctatggctccgatataggtaacgtcgtgctggacaacaagaccaactccatcattttagagacagaagccgcagacctgggcaatgacgaaagatctaagaagccagggacccctggtactcctggatcccatgatcttgagacggctctgagaagattgtctctccgaagggaaaactatctgtcagagaggcgcttctttgaggaagaacaggaacggaagctccaggaactggccgaaaagggtgagctgcggtccggctcactgaccccaactgagagcatcatgagcttaggcacccattcccgcttctccgagttcaccgggttttccggaatgtcattttcttccaggtcatatctgcccgagaagctgcagatcgtcaagcccctcgaaggttctgctacccttcatcattggcagcagctggcccaaccccatctaggagggatattggatccacggcccggcgtggtcaccaaaggcttccggacgctcgacgtggatctggatgaggtgtattgccttaacgactttgaggaagacgatacagcccaccaccctggcaagtgcatgtcacaaactaattccacgttcaccttcaccacatgccgcatcctgcatccgtctgatgaacttacccgggttaccccttccctcaactccgctcctacccccgcctgtgggtccaccagccatctcaaatcgaccccagttgccaccccctgcacacccagaaggctttcattggcagaatctttcacgaacactagggagtccaccactacaatgtccacctccttagggttggtctggcttcttaaggaaagggggatctccgcggctgtctatgacccgcagagttgggacagggctggacggggatcgctgctgcactcccacgaagatgtgacttgtgcaaacttgggcgagggaggtgtgttaagctccttcctgctccgctcaaccgaaaccccgaaatgcgtactcatcccttggatcggaaaccaatag

SEQ ID NO: 279333 - DNA, 2361 bp, Artificial Sequence
  derived and/or modified sequence
atggccctggtgttccagtttggccagcctgtgcgggcccagcccctgcccggcctgtgccacggcaagctgatccgcaccaatgcctgtgatgtgtgcaacagcacagacctgcctgaggtggagatcatcagcctgctggaggagcagctgccccactacaagctgcgggctgacaccatctacggctatgaccatgatgactggctgcacacccccctcatcagcccagatgccaacatcgacctgaccacagagcagatcgaggagaccctgaagtacttcctgctgtgtgccgagcgggtgggccagatgaccaagacctacaatgacattgatgctgtgacccggctgctggaggagaaggagcgggacctggagctggccgcccgcatcggccagagcctgctgaagaagaacaagaccctgacagaaagaaatgagctgctggaggagcaggtggagcacatccgggaggaggtgtcccagctgcggcatgagctgtccatgaaggatgagctgctgcagttctacaccagcgctgctgaggagagcgagcctgagagcgtgtgcagcacccccctgaagagaaatgaaagcagcagctctgtgcagaactacttccacctggacagcctgcagaagaagctgaaggacctggaggaggagaatgtggtgctgcggtctgaggccagccagctgaagacagagaccatcacctatgaggagaaggagcagcagctggtgaatgactgtgtgaaggagctgagagatgccaacgtgcagatcgccagcatcagcgaggagctggccaagaagacagaagatgctgcccggcagcaggaggagatcacccacctgctgagccagatcgtggacctgcagaagaaggccaaggcctgtgctgtggagaatgaggagctggtgcagcacctgggcgccgccaaggatgcccagaggcagctgacagctgagctgcgggagctggaggacaagtatgcagagtgcatggagatgctgcacgaggcccaggaggagctgaagaacctgaggaacaagaccatgcccaacaccaccagccgccgctaccacagcctgggcctcttccccatggacagcctggccgctgagattgagggcaccatgaggaaggagctgcagctggaggaggccgagagcccagacatcacccaccagaagagggtgtttgaaacagtgaggaacatcaaccaggtggtgaagcagaggagcctgacccccagccccatgaacatccctggcagcaaccagagcagcgccatgaacagcctgctgagcagctgtgtgtccacccccaggagcagcttctacggcagtgacattggaaatgtggtgctggacaacaagaccaacagcatcatcctggagacagaggccgctgacctgggcaatgatgagaggagcaagaagccaggcaccccaggcaccccaggcagccatgacctggagacagccctgcggcggctgagcctgcggcgggagaactacctgtctgaaagacgcttctttgaggaggagcaggagaggaagctgcaggagctggccgagaagggggagctgcggagcggcagcctgacccccacagagagcatcatgagcctgggcacccacagccgcttcagcgagttcaccggcttcagcggcatgtccttcagcagccgcagctacctgcctgagaagctgcagatcgtgaagcccctggagggcagcgccaccctgcaccactggcagcagctggcccagccccacctgggcggcatcctggaccccaggcctggggtggtgaccaagggcttccgcaccctggatgtggacctggatgaggtgtactgcctgaatgactttgaggaggatgacacagcccaccaccctgggaagtgcatgagccagaccaacagcaccttcaccttcaccacctgccgcatcctgcaccccagtgatgagctgaccagggtgacccccagcctgaacagcgcccccaccccagcctgtggcagcaccagccacctgaagagcacccctgtggccaccccctgcaccccccggcggctgagcctggccgagagcttcaccaacacccgggagagcaccaccaccatgagcaccagcctgggcctggtgtggctgctgaaggagcggggcatctctgctgctgtgtatgacccccagagctgggacagagctggccggggcagcctgctgcacagccatgaagatgtgacctgtgccaacctgggggagggcggcgtgctgagcagcttcctgctgcggagcacagagacccccaagtgtgtgctgatcccctggattggcaaccagtag

SEQ ID NO: 279334 - DNA, 2361 bp, Artificial Sequence
  derived and/or modified sequence
atggccctggtgttccagttcggccagcccgtgcgggcccagcccctgcccggactttgtcacggaaaactcatccgcaccaacgcatgtgatgtgtgcaactccactgatctaccggaggtggaaattatttccctgttagaagaacaattgccccattataagctgcgggctgataccatatacgggtatgaccatgatgactggctgcacacaccgctgatcagtcctgatgctaacatagaccttacgactgagcagatcgaagaaactctaaagtattttctcctgtgcgccgaaagggtcggacaaatgacgaagacctacaacgacattgacgcagttacacggttgcttgaagaaaaggagcgagacctggaacttgcggcccgcataggacaaagtctactgaagaagaacaagaccctgactgagcgtaatgaactgctggaagagcaagtcgaacacataagagaggaggtcagtcagctgcggcatgaattgtcaatgaaggacgagctgcttcagttctatacctctgccgctgaggagagcgagccagaaagcgtgtgttccacacctttgaagcgcaatgagtcctcttcatctgtgcaaaactatttccatcttgattcacttcagaaaaagctcaaggacctcgaagaggaaaacgtggtacttaggagtgaagccagtcagctgaagaccgaaaccatcacatacgaagaaaaagagcagcagctcgtcaatgactgtgtgaaggaactcagggacgccaatgtgcagatcgcatctatttcggaggaactggcaaagaagacagaagatgctgcccgtcagcaggaggaaatcacgcatttgttaagtcaaatcgtggacctacaaaaaaaagctaaggcatgtgcagtggaaaatgaagaattagttcagcatctgggtgcggccaaggacgcacagcgccaactgaccgccgaactacgtgaactcgaggataaatacgctgagtgcatggagatgttacacgaggcccaggaggagttgaaaaacctgcgcaataagacaatgccaaacacgacttctcgccgataccactctctgggcttgttccccatggactctctcgccgccgaaatcgaaggaaccatgagaaaagagctgcagctagaggaggccgaatccccagacatcacgcaccaaaagcgagtattcgagacagtccggaacattaatcaggtggtgaagcagcgttctttgaccccctccccaatgaatattcctggctctaaccagtcctccgcaatgaactcgttactgtcctcatgtgtatccacccctcgatccagcttctacgggtccgacataggcaacgtcgtcctcgacaacaagactaactctattatcctggaaactgaggctgcagatctgggtaatgatgagagaagtaagaagccagggacccccggaacgcccggcagccacgatctcgagactgccttgaggcgactgagcctaaggcgggaaaactacttaagcgaaagaagattttttgaggaggaacaagagagaaaactgcaggagctggctgaaaagggcgagctgaggagcggctccttgacgccgactgagtccatcatgtcacttggtacacattcccggttttcggagttcaccggcttctctgggatgtctttttcctcacggtcctatttgccagagaaactacagatcgttaaacccctggaaggaagtgcaaccctgcaccattggcagcagctggctcagccccacttagggggcatcttagatcctaggcccggtgtggttaccaagggattcagaaccctcgatgtggatctcgatgaggtctactgtctgaatgactttgaggaagatgacacagcacaccatcccgggaaatgtatgtcacagacgaactcaacatttacgtttaccacctgtaggatcctgcacccctctgatgagcttacaagagtgacgcctagcctgaattctgccccaacaccagcctgcggttctactagccatttaaaatcaacccctgtcgcaacaccatgcacccctagaaggctgagcctagccgagtcctttacgaatactagggaatccaccactactatgtctacatctctaggcctggtatggctcctcaaggaacgagggatctctgccgctgtgtatgacccacagtcctgggacagagctgggcgcggctcactgttgcatagtcatgaagatgtgacatgcgcaaatcttggcgagggaggcgtcctcagtagctttctcctgaggtcaacagagaccccgaagtgtgtgttaataccctggatcgggaatcagtag

SEQ ID NO: 279335 - DNA, 2361 bp, Artificial Sequence
  derived and/or modified sequence
atggcactggtattccagtttggacagcccgtgagagcccagccgctgcccggattgtgtcacggtaaactgatccgcaccaatgcatgcgatgtttgcaattcaaccgacctgcccgaagtggagattattagcctgctggaagagcagttaccccactacaagctcagggccgacacaatctatggttatgatcacgacgattggcttcacacgcccctgatttcgccagatgccaatatcgacttaacgaccgagcagattgaagaaacgctcaagtatttcctgctgtgtgcagaacgcgtgggccagatgaccaaaacatataatgatatagacgccgtgacccggctcctggaagaaaaagaaagagacctggaattagctgcgcgtataggtcaatctttgttgaaaaagaataagacactcacagaacgtaatgagctgctggaggaacaggttgagcatatccgagaagaggtttcccagctgcggcatgaactgtcaatgaaagatgagctacttcagttttatacatcggccgcagaggagtcggagccggagtctgtatgcagtacaccattgaagcggaacgaatcctcctccagcgttcagaattacttccacttagacagtctgcagaagaaattgaaagacctcgaggaagagaatgttgtcttaaggagcgaggcgagccaactgaagacagagactataacatacgaagagaaagagcagcagctcgttaatgactgcgtcaaggaattaagagatgctaacgtacagatcgctagtatcagtgaggagttagcaaagaagactgaagatgccgcacgtcagcaggaagagatcactcacctactgtcccagatcgtggatctgcagaaaaaggcaaaagcgtgtgctgttgaaaacgaagaactggtccagcacctaggagccgctaaggatgcacagaggcaactcacagcggagttgagggaactcgaggataaatacgcagaatgtatggagatgttgcatgaggcccaggaagaacttaagaacctacgaaacaagacgatgcctaacacaaccagccgccgttatcacagtctgggcctattccccatggactcgcttgcagccgaaatcgagggaactatgaggaaggaactccagctggaagaagctgagtctccagatatcacgcatcagaagcgggtgtttgagaccgtccgaaatattaatcaagtggtgaagcagagaagcctgaccccttcccccatgaacattccaggatctaaccagtcaagcgctatgaattctctcctgtcctcctgcgtatccacgccgagatcgagcttttacggcagcgatatcgggaacgtagtgctggataacaaaacaaactcgataatccttgaaacggaggctgccgaccttggcaacgatgaaaggagtaagaaaccgggaacccccggaacccccggaagccacgacctcgaaacggctcttaggcggttgagcctgagaagggagaattacctttccgaaaggagatttttcgaagaggaacaggagcggaagctccaggagctagccgagaaaggcgaactccgctccggatcgttaactccaaccgaatcaattatgtccctggggacacattcaaggttttccgagtttaccggcttcagcggcatgagctttagcagccgctcttacctgcctgaaaaactgcagatcgtgaaacccctcgaaggctctgccactctccaccactggcagcagttggcccagccccacctgggcggaatcctggatcctcgcccaggagtcgtaacaaaaggctttaggactttagatgttgatctggacgaagtgtactgtctaaacgactttgaagaggatgatacggctcatcaccccggtaaatgcatgtcccagacgaattcaacgttcactttcacgacctgcagaattctccaccctagtgacgagctgacccgggtgacacccagtctcaatagtgcccctacacccgcttgtgggtccacatctcatctgaagtctacacctgtggcgactccatgtacgcccagaaggctgtctctcgccgagtcgtttacaaatacccgggagtctaccacaaccatgagcacaagcctcggcctggtctggcttttaaaagagcgagggatttctgccgctgtttacgatcctcagtcctgggacagggccggacggggttctctcctccattcacacgaggatgtgacttgtgctaatttgggtgaaggtggtgtgctgagcagcttcttgctacggagcaccgaaaccccaaaatgcgtccttatcccatggatcggtaaccagtag

SEQ ID NO: 279336 - DNA, 2835 bp, Artificial Sequence
  derived and/or modified sequence
aagcaaactcagaaaactgctgaggaaggcacgggagggtggctgtgcgaggtactgccggggctgagctctcatggaggctctctctgttctctgaagtgcctttggagtttatgtctgcacatggcattggtttttcaattcgggcagcccgtcagggctcagcctctgccaggactctgccacggcaagctcattcggacaaacgcctgtgatgtgtgcaacagcaccgatcttccggaagtcgagatcattagcctgctggaggagcagctgccccattataagttaagagccgacaccatctacggttatgaccacgacgactggctccatacacctctcatttctccagatgccaacattgacctcacaaccgagcaaattgaagagacgttaaaatacttccttttatgtgctgaaagagttggccagatgactaagacatataatgacatagatgctgtcactcggcttcttgaggagaaagagcgggatttagaattggccgctcgcatcggccagtcgttgttgaagaagaacaagaccctaaccgagaggaacgagctgctggaggagcaggtggaacacatcagggaggaggtgtctcagctccggcatgagctgtccatgaaggatgagctgcttcagttctacaccagcgctgcggaggagagtgagcccgagtccgtttgctcaaccccgttgaagaggaatgagtcgtcctcctcagtccagaattactttcatttggattctcttcaaaagaagctgaaagaccttgaagaggagaatgttgtacttcgatccgaggccagccagctgaagacagagaccatcacctatgaggagaaggagcagcagctggtcaatgactgcgtgaaggagctgagggatgccaatgtccagattgctagtatctcagaggaactggccaagaagacggaagatgctgcccgccagcaagaggagatcacacacctgctatcgcaaatagttgatttgcagaaaaaggcaaaagcttgcgcagtggaaaatgaagaacttgtccagcatctgggggctgctaaggatgcccagcggcagctcacagccgagctgcgtgagctggaggacaagtacgcagagtgcatggagatgctgcatgaggcgcaggaggagctgaagaacctccggaacaaaaccatgcccaataccacgtctcggcgctaccactcactgggcctgtttcccatggattccttggcagcagagattgagggaacgatgcgcaaggagctgcagttggaagaggccgagtctccagacatcactcaccagaagcgtgtctttgagacagtaagaaacatcaaccaggttgtcaagcagagatctctgaccccttctcccatgaacatccccggctccaaccagtcctcggccatgaactccctcctgtccagctgcgtcagcaccccccggtccagcttctacggcagcgacataggcaacgtcgtcctcgacaacaagaccaacagcatcattctggaaacagaggcagccgacctgggaaacgatgagcggagtaagaagccggggacgccgggcaccccaggctcccacgacctggagacggcgctgaggcggctgtccctgcgccgggagaactacctctcggagaggaggttctttgaggaggagcaagagaggaagctccaggagctggcggagaagggcgagctgcgcagcggctccctcacacccactgagagcatcatgtccctgggcacgcactcccgcttctccgagttcaccggcttctctggcatgtccttcagcagccgctcctacctgcctgagaagctccagatcgtgaagccgctggaaggttccgccacacttcaccactggcagcagttggcccaacctcaccttgggggcatcctggacccccggcccggtgtggtcaccaagggcttccggacgctggatgttgacctggacgaagtgtactgccttaacgactttgaagaagatgacacagcgcaccatcctgggaagtgcatgtctcagaccaactccaccttcaccttcaccacctgtcgcatcctgcatccttcagatgagctcactcgggtcacaccaagccttaactcagccccaactccagcttgtggcagcaccagccacttgaaatccacgccggtggccacaccatgcactccacggagactgagcctggctgagtccttcactaacacccgtgagtccacgaccaccatgagcacatccctggggctcgtgtggctgttgaaggagcggggcatttctgctgccgtgtacgacccccagagctgggacagggccggccggggctccctcctgcactctcacgaggacgtcacctgtgctaacctgggggaaggtggggtcctttcttctttccttttgagaagcactgaaactcccaagtgtgttcttatcccatggataggaaaccagtgaattccgtggctggcacaccacgagctgtcacgcggcacgggtcataacacatctgggtgtcatcggacacctcacctcgcccaccctgtaggagcgtaaggagcctccatcctcagccacgtgcagctgacgtggctttcctgatcggagggcttttcttttatgggtggcccagcttcttcaagaccttcactgctctgcctcagtggacagtcgtttcttttttgaggtgtgaccttttgttttcatgccttccccttgaagtcatcctgtgttttgtaatcagctgtcaggccaaatgtctgacccgaaagagaatgtatttacactcatgctgcgttgttcagcagc

SEQ ID NO: 279337 - protein, 895 aa, Artificial Sequence
  derived and/or modified sequence
MSLRDKGGEEECFEYDCQDEERKPTHRQHDTQDLLEEVLCAERVGQMTKTYNDIDAVTRLLEEKERDLELAARIGQSLLKKNKTLTERNELLEEQVEHIREEVSQLRHELSMKDELLQFYTSAAEESEPESVCSTPLKRNESSSSVQNYFHLDSLQKKLKDLEEENVVLRSEASQLKTETITYEEKEQQLVNDCVKELRDANVQIASISEELAKKTEDAARQQEEITHLLSQIVDLQKKAKACAVENEELVQHLGAAKDAQRQLTAELRELEDKYAECMEMLHEAQEELKNLRNKTMPNTTSRRYHSLGLFPMDSLAAEIEGTMRKELQLEEAESPDITHQKRVFETVRNINQVVKQRSLTPSPMNIPGSNQSSAMNSLLSSCVSTPRSSFYGSDIGNVVLDNKTNSIILETEAADLGNDERSKKPGTPGTPGSHDLETALRRLSLRRENYLSERRFFEEEQERKLQELAEKGELRSGSLTPTESIMSLGTHSRFSEFTGFSGMSFSSRSYLPEKLQIVKPLEGSATLHHWQQLAQPHLGGILDPRPGVVTKGFRTLDVDLDEVYCLNDFEEDDTGDHISLPRLATSTPVQHPETSAHHPGKCMSQTNSTFTFTTCRILHPSDELTRVTPSLNSAPTPACGSTSHLKSTPVATPCTPRRLSLAESFTNTRESTTTMSTSLGLVWLLKERGISAAVYDPQSWDRAGRGSLLHSYTPKMAVIPSTPPNSPMQTPTSSPPSFEFKCTSPPYDNFLASKPASSILREVREKNVRSSESQTDVSVSNLNLVDKVRRFGVAKVVNSGRAHVPTLTEEQGPLLCGPPGPAPALVPRGLVPEGLPLRCPTVTSAIGGLQLNSGIRRNRSFPTMVGSSMQMKAPVTLTSGILMGAKLSKQTSLR

SEQ ID NO: 279338 - DNA, 2688 bp, Artificial Sequence
  derived and/or modified sequence
atgagcctgagagacaagggcggcgaggaggagtgcttcgagtacgactgccaggacgaggagagaaagcccacccacagacagcacgacacccaggacctgctggaggaggtgctgtgcgccgagagagtgggccagatgaccaagacctacaacgacatcgacgccgtgaccagactgctggaggagaaggagagagacctggagctggccgccagaatcggccagagcctgctgaagaagaacaagaccctgaccgagagaaacgagctgctggaggagcaggtggagcacatcagagaggaggtgagccagctgagacacgagctgagcatgaaggacgagctgctgcagttctacaccagcgccgccgaggagagcgagcccgagagcgtgtgcagcacccccctgaagagaaacgagagcagcagcagcgtgcagaactacttccacctggacagcctgcagaagaagctgaaggacctggaggaggagaacgtggtgctgagaagcgaggccagccagctgaagaccgagaccatcacctacgaggagaaggagcagcagctggtgaacgactgcgtgaaggagctgagagacgccaacgtgcagatcgccagcatcagcgaggagctggccaagaagaccgaggacgccgccagacagcaggaggagatcacccacctgctgagccagatcgtggacctgcagaagaaggccaaggcctgcgccgtggagaacgaggagctggtgcagcacctgggcgccgccaaggacgcccagagacagctgaccgccgagctgagagagctggaggacaagtacgccgagtgcatggagatgctgcacgaggcccaggaggagctgaagaacctgagaaacaagaccatgcccaacaccaccagcagaagataccacagcctgggcctgttccccatggacagcctggccgccgagatcgagggcaccatgagaaaggagctgcagctggaggaggccgagagccccgacatcacccaccagaagagagtgttcgagaccgtgagaaacatcaaccaggtggtgaagcagagaagcctgacccccagccccatgaacatccccggcagcaaccagagcagcgccatgaacagcctgctgagcagctgcgtgagcacccccagaagcagcttctacggcagcgacatcggcaacgtggtgctggacaacaagaccaacagcatcatcctggagaccgaggccgccgacctgggcaacgacgagagaagcaagaagcccggcacccccggcacccccggcagccacgacctggagaccgccctgagaagactgagcctgagaagagagaactacctgagcgagagaagattcttcgaggaggagcaggagagaaagctgcaggagctggccgagaagggcgagctgagaagcggcagcctgacccccaccgagagcatcatgagcctgggcacccacagcagattcagcgagttcaccggcttcagcggcatgagcttcagcagcagaagctacctgcccgagaagctgcagatcgtgaagcccctggagggcagcgccaccctgcaccactggcagcagctggcccagccccacctgggcggcatcctggaccccagacccggcgtggtgaccaagggcttcagaaccctggacgtggacctggacgaggtgtactgcctgaacgacttcgaggaggacgacaccggcgaccacatcagcctgcccagactggccaccagcacccccgtgcagcaccccgagaccagcgcccaccaccccggcaagtgcatgagccagaccaacagcaccttcaccttcaccacctgcagaatcctgcaccccagcgacgagctgaccagagtgacccccagcctgaacagcgcccccacccccgcctgcggcagcaccagccacctgaagagcacccccgtggccaccccctgcacccccagaagactgagcctggccgagagcttcaccaacaccagagagagcaccaccaccatgagcaccagcctgggcctggtgtggctgctgaaggagagaggcatcagcgccgccgtgtacgacccccagagctgggacagagccggcagaggcagcctgctgcacagctacacccccaagatggccgtgatccccagcaccccccccaacagccccatgcagacccccaccagcagcccccccagcttcgagttcaagtgcaccagccccccctacgacaacttcctggccagcaagcccgccagcagcatcctgagagaggtgagagagaagaacgtgagaagcagcgagagccagaccgacgtgagcgtgagcaacctgaacctggtggacaaggtgagaagattcggcgtggccaaggtggtgaacagcggcagagcccacgtgcccaccctgaccgaggagcagggccccctgctgtgcggcccccccggccccgcccccgccctggtgcccagaggcctggtgcccgagggcctgcccctgagatgccccaccgtgaccagcgccatcggcggcctgcagctgaacagcggcatcagaagaaacagaagcttccccaccatggtgggcagcagcatgcagatgaaggcccccgtgaccctgaccagcggcatcctgatgggcgccaagctgagcaagcagaccagcctgagatag

SEQ ID NO: 279339 - DNA, 2688 bp, Artificial Sequence
  derived and/or modified sequence
atgagtctacgcgataagggtggcgaagaggagtgctttgaatatgattgccaggatgaagaaaggaagcccacccaccgccagcacgacactcaggaccttctggaagaggtgttgtgcgctgagagggtagggcagatgactaaaacatacaatgatatcgacgctgtaaccagactgttggaggagaaggagagagacctggaactggcagccaggattggacagtccctgttgaagaagaacaagacattgacggagagaaacgagcttctcgaggagcaggtagaacatatccgggaggaggtctcgcagcttcgccatgagctgagcatgaaagacgaactactccagttctatacctccgcggccgaggagagcgagccggaatccgtgtgttccactccgctgaaacggaacgaatcctcctctagtgtgcagaattattttcatcttgacagcctccagaaaaagcttaaggatctcgaagaggagaacgtcgttctccgatcagaggctagccagctaaagactgaaactattacatacgaagagaaagagcagcagttggtcaacgattgtgtcaaagagcttagagacgctaatgtgcagatagccagtatatcggaggagctggccaagaagaccgaagatgccgctagacagcaagaagagattacacacctcctctcccaaatagtagatctccagaagaaagcgaaggcctgcgctgtggaaaatgaggagctggttcagcaccttggcgccgcaaaggatgctcagaggcaattaaccgcggaactaagggagcttgaagataagtacgccgaatgtatggagatgctccatgaagctcaagaggaactgaaaaatctccggaacaagacaatgccaaatacaacatcgcggcggtaccacagcctgggactgttccctatggattcgttggccgccgagatcgagggtactatgcgcaaagagctgcagctggaagaggcggagagcccagacatcacccaccagaaacgagtcttcgagaccgttagaaatattaaccaggtggtaaagcagagatcacttaccccttctcccatgaatattcccggatctaatcagtcatcagccatgaatagcctgttatccagttgtgtaagcaccccaagatcatcgttttacgggtcagacattggaaatgtcgtgctggataataagaccaactctataattctcgaaacggaagccgccgatcttggcaatgatgaacggagcaaaaagcctggaacccccggcactccaggatctcacgatctggagaccgcactccggcgtctgtcattgaggagggagaactacttgtcggagcgcagattttttgaagaggaacaagaaagaaagctgcaagagctcgcagagaagggcgagttacgctccggctcccttactccgacggagtccattatgagtctgggcacccactctcggtttagcgagttcacaggcttcagtggaatgtccttctcatcccgttcttatttgcccgaaaaacttcagatcgtaaaacccttagagggctccgcgacgttgcaccactggcagcagctggctcagccccacctgggcgggatcctggatcctcggcctggagtggttacaaagggattccggacattagacgtggaccttgacgaagtgtattgcttgaatgacttcgaagaggatgatactggggaccacatatctctccctcgactggcaacatcaacccctgttcagcacccagaaacctcagctcaccaccctgggaaatgcatgagccagactaatagtacattcacattcaccacgtgccggattctgcatccatctgatgagctcacaagagttaccccctcactgaacagcgcccccacaccggcctgcggcagcacctctcacctaaaatccacacccgtcgcaaccccatgcacaccacgcaggctgagtctggccgagtcttttacaaatacccgggaatcaaccaccaccatgtcaacatctttgggtctggtgtggcttttgaaagaacgcggcatctccgccgctgtttacgatccacagtcatgggaccgcgctggcagaggatcattactccattcttacaccccaaagatggccgtgatccctagtacaccccctaactcaccaatgcagactcctacttctagccctccatcatttgagtttaaatgtacaagcccaccgtatgataacttcctggcttcaaagcctgcaagttccattctccgcgaagtgcgcgagaaaaatgtgaggtcctctgaatcccaaactgacgtgtctgtaagtaacttgaacctggtggataaggtgcggcgttttggggtcgctaaggttgtcaactctggacgagctcacgttccaaccctcacagaggagcaaggcccactcttgtgtggacctcctggaccagcgcctgcactagtgcctaggggcctggttcccgagggcctgccactcagatgtccaactgtgacttcggccatagggggcctccaactaaatagcggaatcagaaggaatagatcctttcccacaatggtgggaagcagcatgcagatgaaagctcctgttactctcacgtcagggatactgatgggagccaagctgtcaaagcagactagcctgcgctag

SEQ ID NO: 279340 - DNA, 2688 bp, Artificial Sequence
  derived and/or modified sequence
atgagcctgcgggacaagggcggggaggaggagtgctttgaatatgactgccaggatgaggagaggaagcccacccaccggcagcacgacacccaggacctgctggaggaggtgctgtgtgccgagcgggtgggccagatgaccaagacctacaatgacattgatgctgtgacccggctgctggaggagaaggagcgggacctggagctggccgcccgcatcggccagagcctgctgaagaagaacaagaccctgacagaaagaaatgagctgctggaggagcaggtggagcacatccgggaggaggtgtcccagctgcggcatgagctgtccatgaaggatgagctgctgcagttctacaccagcgctgctgaggagagcgagcctgagagcgtgtgcagcacccccctgaagagaaatgaaagcagcagctctgtgcagaactacttccacctggacagcctgcagaagaagctgaaggacctggaggaggagaatgtggtgctgcggtctgaggccagccagctgaagacagagaccatcacctatgaggagaaggagcagcagctggtgaatgactgtgtgaaggagctgagagatgccaacgtgcagatcgccagcatcagcgaggagctggccaagaagacagaagatgctgcccggcagcaggaggagatcacccacctgctgagccagatcgtggacctgcagaagaaggccaaggcctgtgctgtggagaatgaggagctggtgcagcacctgggcgccgccaaggatgcccagaggcagctgacagctgagctgcgggagctggaggacaagtatgcagagtgcatggagatgctgcacgaggcccaggaggagctgaagaacctgaggaacaagaccatgcccaacaccaccagccgccgctaccacagcctgggcctcttccccatggacagcctggccgctgagattgagggcaccatgaggaaggagctgcagctggaggaggccgagagcccagacatcacccaccagaagagggtgtttgaaacagtgaggaacatcaaccaggtggtgaagcagaggagcctgacccccagccccatgaacatccctggcagcaaccagagcagcgccatgaacagcctgctgagcagctgtgtgtccacccccaggagcagcttctacggcagtgacattggaaatgtggtgctggacaacaagaccaacagcatcatcctggagacagaggccgctgacctgggcaatgatgagaggagcaagaagccaggcaccccaggcaccccaggcagccatgacctggagacagccctgcggcggctgagcctgcggcgggagaactacctgtctgaaagacgcttctttgaggaggagcaggagaggaagctgcaggagctggccgagaagggggagctgcggagcggcagcctgacccccacagagagcatcatgagcctgggcacccacagccgcttcagcgagttcaccggcttcagcggcatgtccttcagcagccgcagctacctgcctgagaagctgcagatcgtgaagcccctggagggcagcgccaccctgcaccactggcagcagctggcccagccccacctgggcggcatcctggaccccaggcctggggtggtgaccaagggcttccgcaccctggatgtggacctggatgaggtgtactgcctgaatgactttgaggaggatgacacaggagaccacatcagcctgccccggctggccaccagcacccctgtgcagcaccctgagaccagcgcccaccaccctgggaagtgcatgagccagaccaacagcaccttcaccttcaccacctgccgcatcctgcaccccagtgatgagctgaccagggtgacccccagcctgaacagcgcccccaccccagcctgtggcagcaccagccacctgaagagcacccctgtggccaccccctgcaccccccggcggctgagcctggccgagagcttcaccaacacccgggagagcaccaccaccatgagcaccagcctgggcctggtgtggctgctgaaggagcggggcatctctgctgctgtgtatgacccccagagctgggaccgggccggccggggcagcctgctgcacagctacacccccaagatggccgtcatccccagcaccccacccaacagccccatgcagacccccaccagcagcccccccagctttgagttcaagtgcaccagccccccctatgacaacttcctggccagcaagccagccagcagcatcctgcgggaggtgcgggagaagaatgtgcgcagcagcgagagccagacagatgtgtctgtgagcaacctgaacctggtggacaaggtgcggcgcttcggcgtggccaaggtggtgaacagcggccgggcccacgtgcccaccctgacagaggagcagggccccctgctgtgtggccccccaggccctgccccagccctggtgccccggggcctggtgcctgagggcctgcccctgcgctgccccaccgtgaccagcgccatcggcggcctgcagctgaacagcggcatcagaagaaacagaagcttccccaccatggtgggcagctccatgcagatgaaggcccctgtgaccctgaccagcggcatcctgatgggcgccaagctgagcaagcagaccagcctgaggtag

SEQ ID NO: 279341 - DNA, 2688 bp, Artificial Sequence
  derived and/or modified sequence
atgagcctgcgggacaagggcggcgaggaggagtgcttcgagtacgactgccaggatgaggaacggaaacccactcatcgccagcatgacacacaggacttattggaggaagttctctgtgcagaacgagtgggccaaatgaccaagacctacaatgatatagacgcagtgacacgtttgctggaagagaaggagcgtgacctcgaattggctgcccgaatcggccaatccctgcttaaaaaaaacaaaaccctgactgagcgaaacgagctgcttgaagagcaggtggaacacatacgcgaagaggtctcacagctgaggcacgagctgtcaatgaaagacgagttgctgcaattctacacaagtgctgcggaagagtctgaacctgaaagtgtgtgttccacacccctcaaaagaaacgaatcaagctcgagcgtgcaaaattactttcatctggattccctgcagaagaaactcaaagacctcgaagaggagaatgtcgtgctacgcagcgaggcgtctcagctcaagaccgaaaccataacatatgaggaaaaagagcagcagcttgtgaatgattgtgtcaaggaactgcgcgacgctaacgtgcaaattgccagcattagcgaggagttagctaagaagacggaagatgctgcacggcaacaggaggagataacccacctgctgtcgcaaattgtggatcttcaaaaaaaagccaaagcgtgtgccgtcgagaatgaggaattggtgcagcacctgggtgcagcaaaagacgcccagcgacaattgactgccgagctgcgcgagttggaggataagtatgctgagtgcatggagatgcttcacgaggcacaagaggaactcaaaaatttgagaaataagacaatgcctaatactacaagccgccgctaccacagcctagggctgttcccaatggactccctcgccgccgagatcgaggggactatgaggaaagagctccagctcgaagaagcagagtcacccgacatcacacatcagaagcgggtgtttgagaccgtgagaaacatcaatcaggttgtcaaacagcgttctctgacccccagcccaatgaacattccaggcagtaatcaaagctccgcaatgaattcattgttgtcgtcctgtgtttcaacccccagaagcagcttttacggatctgatattggaaacgtggttttagacaacaaaaccaacagcattatcctggagacagaggcagctgatctcggaaatgatgagcgatcgaagaagccaggtacaccaggcactccagggtcccacgacctggaaactgctcttcggcgtctgagcctgcgccgagagaattacctcagcgagcgaaggtttttcgaagaggagcaggagcggaaactgcaggagttagcagagaagggtgagttgcgcagcggctccctcactccaactgagtccataatgtcccttggaacgcacagcagattttcagagtttacaggcttttctggaatgtctttcagctctcggagctatcttcctgaaaagcttcagattgtgaaaccgcttgaagggtcagcgacattacatcactggcaacagctcgcccagccacacctcggcggcatcctggacccgagacctggagttgttaccaagggctttaggactctagacgtcgacctggacgaggtatattgcctgaatgacttcgaggaagatgacaccggggatcatatttcgctgcctcgactggctacaagcacacctgtccaacaccccgaaactagcgcacaccaccccgggaaatgtatgtctcagactaactccacatttacattcactacctgtcgtattctccatcctagtgatgagctgactagagtcactccatcattaaatagcgcacccacgccagcatgcggcagtacatctcatctgaaatctaccccagtggctacaccgtgcaccccacgacgcttgagtctggccgagtcctttacaaacacccgcgaatccacaactaccatgagcacatcgctgggtttagtctggctcctgaaagagaggggcatctctgcggccgtctacgacccccagtcatgggaccgggctggcagaggcagtctcttacattcttacacaccaaagatggccgtcattccatctaccccaccaaacagcccaatgcaaaccccgaccagtagtccacccagtttcgagttcaaatgtacttcgcccccatacgacaatttcctagcgtccaagccggccagctccattctgagagaggtccgtgagaagaacgtccgaagcagcgaaagccagaccgatgtgtccgtttccaaccttaacctcgtagacaaggtacggcggtttggcgtggccaaggtagtgaattcaggacgagcccacgttcccacacttactgaagagcagggaccgttgttatgtgggcctcccgggccggctccagctcttgtgcctcgagggctggttcctgaaggcttaccgctgcgctgccctacagtgacaagcgcaatcggcggcctccagctgaatagtggtatcaggcgtaaccgatccttccccaccatggtgggatctagtatgcaaatgaaggctcccgtgactctgaccagcggaattctgatgggagccaagctgagcaagcagacgagtttgcgatag

SEQ ID NO: 279342 - DNA, 2688 bp, Artificial Sequence
  derived and/or modified sequence
atgagcctacgcgacaaggggggagaagaagaatgcttcgagtacgactgtcaggacgaagagagaaaacctacacaccggcagcacgacacccaagacctcctcgaagaagtactctgtgccgagcgtgtcggacagatgactaagacttacaacgacattgatgcagttacgcgcttgctggaagaaaaagagcgcgacctcgaattagccgctcgaattgggcagtccctgctgaagaagaataagactctgaccgagaggaatgaactccttgaagaacaggtggaacacattagggaggaagtgagccagctgcgtcacgagctgtccatgaaagatgagcttctgcaattctacacatcagctgctgaggaaagtgagccagagtcagtgtgcagcactcccttgaaacgtaacgagtcaagcagctccgtccaaaactatttccacctggactccctgcaaaagaagctcaaagacctcgaggaggagaatgtagtgctgcgaagcgaggcaagtcagttaaagacagagaccatcacatatgaggagaaggagcagcaactagtgaacgactgcgtaaaggagctgcgcgacgctaatgtgcaaatcgcatctatatccgaagagctggccaaaaaaactgaggatgccgctcgtcagcaggaggagattactcacttgttgtcacagatcgtggaccttcagaaaaaggctaaagcttgcgcagttgaaaatgaagagttggtacaacatctcggcgctgccaaagacgctcagagacagttgaccgcggagctcagagagctcgaagacaagtacgcagagtgcatggaaatgctacatgaggctcaggaagaattaaagaatttgcggaacaagacgatgcccaacacaacgtccaggcggtaccacagcctaggcctatttccaatggattctcttgctgctgaaatcgaaggaacaatgagaaaagagctccaactggaagaggcagaaagtcctgacataacacaccagaaaagggttttcgaaaccgtgagaaacataaatcaggtcgttaagcaaaggtctctgacccctagtcccatgaacataccaggctcgaaccaatcctccgccatgaactccctgctttcaagctgtgtctcaacccctcggtcaagcttttatggaagcgacatcggcaacgtggtgctagataataaaaccaatagcataattctcgagaccgaagccgctgacctaggaaacgatgaaaggtctaaaaaaccaggaacgccgggaacaccaggctctcatgatctggaaacagccctgagacggctgagtctgcggcgtgaaaactatctgtctgagcgcagattctttgaagaggagcaggaacggaaactgcaagaactggctgagaaaggagagcttcggtcaggcagtctgacccccacagagtctatcatgtctctggggactcacagcagatttagtgaattcaccgggttctccgggatgtctttctctagcaggtcatacttgccagagaaactccagatcgtgaagccactggaggggtcggccacattacatcattggcagcaactggctcaacctcatctgggcggaatccttgatccacgacctggcgtagtcaccaaaggctttcgcaccctggacgtggaccttgacgaagtgtactgtttaaatgattttgaagaggacgatacgggggaccacatctcattaccacggttggccacgagtactccggtgcagcaccccgagaccagcgctcaccatccgggtaagtgcatgtctcaaacgaatagcactttcaccttcaccacctgtcgcatcctgcacccatccgacgagctgaccagagtgacaccaagcctgaattcagccccaaccccagcatgcgggtcgacttctcatctgaaaagcacaccagtggccactccctgcacaccacgacgactgagcttggcggagtcttttactaacaccagagaatctacgacaaccatgtccactagcctcggactagtatggttgctgaaggaaagaggaatatctgccgctgtgtacgatccccaatcctgggaccgagcaggtagaggttccttacttcacagctacacccctaaaatggccgttatcccgtccacccctcctaattctccaatgcagactcctacgtcgtcgccaccttctttcgaatttaagtgcacatccccgccatatgataacttcttagcatcaaagccggctagcagcatcttaagggaggtgagagagaaaaatgtgcgtagcagcgagtcccagaccgacgtgagcgtgtcaaacttaaacctggttgacaaggtgaggaggtttggcgttgcgaaggtggtgaattcaggtcgcgctcacgtccctacactgactgaagaacagggaccattactgtgcggacccccaggtcctgcacctgccttggtaccacgcggactggttcccgagggcctgcctttaagatgcccaaccgtgaccagtgctatcggcggtctgcaactgaacagcgggattcggcgtaaccgatcattccctacaatggtgggctcctctatgcagatgaaggcgcctgtgactctgaccagcggtatcctaatgggggcaaagctttccaagcagaccagcttgcggtag

SEQ ID NO: 279343 - DNA, 5033 bp, Artificial Sequence
  derived and/or modified sequence
gggtgatgctgggccaggagctttgtgtacacccctccacttcagctgagccagggcatgtctgcggcccaggccagggcgcagtgtgtgccctgggggcccaggcctgcatggctcctctgggtagggggtcgggggcacccccaaggatggtcccttagggtgatgttttggctttggggtgacttcagcaatgtccctgcgagacaagggcggggaagaagaatgttttgaatacgactgccaggatgaagagaggaagccaacccacaggcagcatgacacccaggacctcttggaagaggttttatgtgctgaaagagttggccagatgactaagacatataatgacatagatgctgtcactcggcttcttgaggagaaagagcgggatttagaattggccgctcgcatcggccagtcgttgttgaagaagaacaagaccctaaccgagaggaacgagctgctggaggagcaggtggaacacatcagggaggaggtgtctcagctccggcatgagctgtccatgaaggatgagctgcttcagttctacaccagcgctgcggaggagagtgagcccgagtccgtttgctcaaccccgttgaagaggaatgagtcgtcctcctcagtccagaattactttcatttggattctcttcaaaagaagctgaaagaccttgaagaggagaatgttgtacttcgatccgaggccagccagctgaagacagagaccatcacctatgaggagaaggagcagcagctggtcaatgactgcgtgaaggagctgagggatgccaatgtccagattgctagtatctcagaggaactggccaagaagacggaagatgctgcccgccagcaagaggagatcacacacctgctatcgcaaatagttgatttgcagaaaaaggcaaaagcttgcgcagtggaaaatgaagaacttgtccagcatctgggggctgctaaggatgcccagcggcagctcacagccgagctgcgtgagctggaggacaagtacgcagagtgcatggagatgctgcatgaggcgcaggaggagctgaagaacctccggaacaaaaccatgcccaataccacgtctcggcgctaccactcactgggcctgtttcccatggattccttggcagcagagattgagggaacgatgcgcaaggagctgcagttggaagaggccgagtctccagacatcactcaccagaagcgtgtctttgagacagtaagaaacatcaaccaggttgtcaagcagagatctctgaccccttctcccatgaacatccccggctccaaccagtcctcggccatgaactccctcctgtccagctgcgtcagcaccccccggtccagcttctacggcagcgacataggcaacgtcgtcctcgacaacaagaccaacagcatcattctggaaacagaggcagccgacctgggaaacgatgagcggagtaagaagccggggacgccgggcaccccaggctcccacgacctggagacggcgctgaggcggctgtccctgcgccgggagaactacctctcggagaggaggttctttgaggaggagcaagagaggaagctccaggagctggcggagaagggcgagctgcgcagcggctccctcacacccactgagagcatcatgtccctgggcacgcactcccgcttctccgagttcaccggcttctctggcatgtccttcagcagccgctcctacctgcctgagaagctccagatcgtgaagccgctggaaggttccgccacacttcaccactggcagcagttggcccaacctcaccttgggggcatcctggacccccggcccggtgtggtcaccaagggcttccggacgctggatgttgacctggacgaagtgtactgccttaacgactttgaagaagatgacacaggtgaccacatttctctcccacgcctagctacctccactccagttcagcacccagagacctcagcgcaccatcctgggaagtgcatgtctcagaccaactccaccttcaccttcaccacctgtcgcatcctgcatccttcagatgagctcactcgggtcacaccaagccttaactcagccccaactccagcttgtggcagcaccagccacttgaaatccacgccggtggccacaccatgcactccacggagactgagcctggctgagtccttcactaacacccgtgagtccacgaccaccatgagcacatccctggggctcgtgtggctgttgaaggagcggggcatttctgctgccgtgtacgacccccagagctgggacagggccggccggggctccctcctgcactcctacacgcccaagatggctgtgatcccctctactccgccgaactcgcctatgcagacacccacatcctccccaccctcctttgagttcaagtgcacgagccctccctacgacaatttcctggcttccaagccagccagctccatcctgagggaagtgagagaaaagaacgtccgcagcagcgagagccagaccgacgtgtccgtctccaacctcaacctcgtggacaaagtcaggaggtttggggtggccaaagtggtgaactcagggcgagcccatgtccccaccttgactgaggagcagggacccctcctctgtgggcccccggggccagcaccagcccttgttcccagaggcctggtacctgagggcctgcccctcagatgccccactgtcaccagtgccatcggtgggctgcagctcaatagtggcatccggcggaatcgcagcttccccaccatggtgggatctagcatgcagatgaaagctcctgtgactctcacctcgggcatcttgatgggtgctaagctctccaaacaaactagcttacggtgaggactggaggggggccggttgccctagaggagacccacgttctcctctcttgctcccacctccctctcttccccccacagtgcactccctccctctgcccttctctgtccaccccctcctaagctagacaaatcaacctcgtgcctaatggaggaagtgtggaaactttgtaaaatgtgtacataggacttggagaccttgtgtccgccctgctctttcttccgatcccacaggaagtgcccctgcactgtcatcactctcacgaggacgtcacctgtgctaacctgggggaaggtggggtcctttcttctttccttttgagaagcactgaaactcccaagtgtgttcttatcccatggataggaaaccagtgaattccgtggctggcacaccacgagctgtcacgcggcacgggtcataacacatctgggtgtcatcggacacctcacctcgcccaccctgtaggagcgtaaggagcctccatcctcagccacgtgcagctgacgtggctttcctgatcggagggcttttcttttatgggtggcccagcttcttcaagaccttcactgctctgcctcagtggacagtcgtttcttttttgaggtgtgaccttttgttttcatgccttccccttgaagtcatcctgtgttttgtaatcagctgtcaggccaaatgtctgacccgaaagagaatgtatttacactcatgctgcgttgttcagcagcccctctgtgttctgtgtgatttgttttatttttccttttttttacatatatatgcagggaagtaatggtactggtagtgtatgttttctatgtggttcaaatatgaatttcgaacacaccaagccgctaatgagatagcagcttttttctgggacccagagtcacaaccaaattgatttaagaccggacccaagacacctttaacaataggactgaaaggaaaaaggatagggaaaaagcttattaaagaaatgtgtcaacaccaaatgtagaggggaagaaccacaaccaggcataataccaaaccggttccagggggaaacaaggctttggtattccgctggctccagcgctttttctgaaacccgaggctggccagggtgctgtcaccatgcggtctttgattgcagccattcaatgcccacatgcttttccttcttgtttcagaacagcacatggtcacaacaagatattttctttccctccaaagccttttgtctccttgtgcctctttttatccttaggaaaagatccaggtgcttgtgaaaagaatcatgaatgcaacaagggaggctggtcctgttgctgtcgccgattaagttttaaacttttatttattatttatgtctgccgtattttaaataaacattctcgttccttccagtttcagtcatagtgtgtctgtggcattccagtccaaccatgtgacttatttattctaatttgagggctgcactgtacaccatggtgtcctgtgacaccgtgttccagacatttatggaaggaaaacatcccatataaatgaaactgtcatgctgtgtcctccccggcagcagaagatgtgtccttccattgagtgagggtaaccttatgtccaccaaggatactttgagaaagcccctaaggaacaagcctcagtcccacggtttcagactatttattctctgaacacaagagtattggttaattatgttctcagctctccctgctgttgtatgtgtgcattcactgcaagtaacttatatctttttatttgaatgtattttaaagcagtagatagaataacaaaggaatatgaaaaccatggactgaatggaccattttatgtattcagagagagaagccactcatcattgccagaaataccatgtaaaaattggcagttcagaggttgcaatacttagtatagtaaataaataaacggtcaacattgtgcaaccactaccaaaaagtgtgttgtaatgcatcaaaaatcaacacaattttattcactaatgagtatcaataaaataagttcaaatgatggaaaccacactggtattctgatttgtattttgtttttatcttttcatcaaggagacgatctctttatgtaagacttgaaagtgtttagctctttgcaaaattaaatgaaaggcatatacttc

SEQ ID NO: 279344 - DNA, 165 bp, Artificial Sequence
  derived and/or modified sequence
atgtgtcgcgaaaccgccggttacgggtggttactggcaagtactgagctgttaagcctcctggagccactctcaccccagttactcaaagagcatatttcttgcacaagccaggtagctgcaggagccaaagtcacccccgattctgccgtatgggccccgtag

SEQ ID NO: 279345 - RNA, 165 nt, Artificial Sequence
  derived and/or modified sequence
augugucgcgaaaccgccgguuacgggugguuacuggcaaguacugagcuguuaagccuccuggagccacucucaccccaguuacucaaagagcauauuucuugcacaagccagguagcugcaggagccaaagucacccccgauucugccguaugggccccguag

SEQ ID NO: 279346 - protein, 1023 aa, Artificial Sequence
  derived and/or modified sequence
MLLHPSPNCSLRAESLVHVHFKEEIGVAELIPLVTTYIILFAYIYFSTRKIDMVKSKWGLALAAVVTVLSSLLMSVGLCTLFGLTPTLNGGEIFPYLVVVIGLENVLVLTKSVVSTPVDLEVKLRIAQGLSSESWSIMKNMATELGIILIGYFTLVPAIQEFCLFAVVGLVSDFFLQMLFFTTVLSIDIRRMELADLNKRLPPEACLPSAKPVGQPTRYERQLAVRPSTPHTITLQPSSFRNLRLPKRLRVVYFLARTRLAQRLIMAGTVVWIGILVYTDPAGLRNYLAAQVTEQSPLGEGALAPMPVPSGMLPPSHPDPAFSIFPPDAPKLPENQTSPGESPERGGPAEVVHDSPVPEVTWGPEDEELWRKLSFRHWPTLFSYYNITLAKRYISLLPVIPVTLRLNPREALEGRHPQDGRSAWPPPGPIPAGHWEAGPKGPGGVQAHGDVTLYKVAALGLATGIVLVLLLLCLYRVLCPRNYGQLGGGPGRRRRGELPCDDYGYAPPETEIVPLVLRGHLMDIECLASDGMLLVSCCLAGHVCVWDAQTGDCLTRIPRPGQRRDSGVGSGLEAQESWERLSDGGKAGPEEPGDSPPLRHRPRGPPPPSLFGDQPDLTCLIDTNFSAQPRSSQPTQPEPRHRAVCGRSRDSPGYDFSCLVQRVYQEEGLAAVCTPALRPPSPGPVLSQAPEDEGGSPEKGSPSLAWAPSAEGSIWSLELQGNLIVVGRSSGRLEVWDAIEGVLCCSSEEVSSGITALVFLDKRIVAARLNGSLDFFSLETHTALSPLQFRGTPGRGSSPASPVYSSSDTVACHLTHTVPCAHQKPITALKAAAGRLVTGSQDHTLRVFRLEDSCCLFTLQGHSGAITTVYIDQTMVLASGGQDGAICLWDVLTGSRVSHVFAHRGDVTSLTCTTSCVISSGLDDLISIWDRSTGIKFYSIQQDLGCGASLGVISDNLLVTGGQGCVSFWDLNYGDLLQTVYLGKNSEAQPARQILVLDNAAIVCNFGSELSLVYVPSVLEKLD

SEQ ID NO: 279347 - protein, 88 aa, Artificial Sequence
  derived and/or modified sequence
MTLTERLREKISRAFYNHGLLCASYPIPIILFTGFCILACCYPLLKLPLPGTGPVEFTTPVKDYSPPPVDSDRKQGEPTEQPEWVGTR

SEQ ID NO: 279348 - protein, 886 aa, Artificial Sequence
  derived and/or modified sequence
MKNMATELGIILIGYFTLVPAIQEFCLFAVVGLVSDFFLQMLFFTTVLSIDIRRMELADLNKRLPPEACLPSAKPVGQPTRYERQLAVRPSTPHTITLQPSSFRNLRLPKRLRVVYFLARTRLAQRLIMAGTVVWIGILVYTDPAGLRNYLAAQVTEQSPLGEGALAPMPVPSGMLPPSHPDPAFSIFPPDAPKLPENQTSPGESPERGGPAEVVHDSPVPEVTWGPEDEELWRKLSFRHWPTLFSYYNITLAKRYISLLPVIPVTLRLNPREALEGRHPQDGRSAWPPPGPIPAGHWEAGPKGPGGVQAHGDVTLYKVAALGLATGIVLVLLLLCLYRVLCPRNYGQLGGGPGRRRRGELPCDDYGYAPPETEIVPLVLRGHLMDIECLASDGMLLVSCCLAGHVCVWDAQTGDCLTRIPRPGQRRDSGVGSGLEAQESWERLSDGGKAGPEEPGDSPPLRHRPRGPPPPSLFGDQPDLTCLIDTNFSAQPRSSQPTQPEPRHRAVCGRSRDSPGYDFSCLVQRVYQEEGLAAVCTPALRPPSPGPVLSQAPEDEGGSPEKGSPSLAWAPSAEGSIWSLELQGNLIVVGRSSGRLEVWDAIEGVLCCSSEEVSSGITALVFLDKRIVAARLNGSLDFFSLETHTALSPLQFRGTPGRGSSPASPVYSSSDTVACHLTHTVPCAHQKPITALKAAAGRLVTGSQDHTLRVFRLEDSCCLFTLQGHSGAITTVYIDQTMVLASGGQDGAICLWDVLTGSRVSHVFAHRGDVTSLTCTTSCVISSGLDDLISIWDRSTGIKFYSIQQDLGCGASLGVISDNLLVTGGQGCVSFWDLNYGDLLQTVYLGKNSEAQPARQILVLDNAAIVCNFGSELSLVYVPSVLEKLD

SEQ ID NO: 279349 - DNA, 2316 bp, Artificial Sequence
  derived and/or modified sequence
atgaccctgaccgagagactgagagagaagatcagcagagccttctacaaccacggcctgctgtgcgccagctaccccatccccatcatcctgttcaccggcttctgcatcctggcctgctgctaccccctgctgaagctgcccctgcccggcaccggccccgtggagttcaccacccccgtgaaggactacagccccccccccgtggacagcgacagaaagcagggcgagcccaccgagcagcccgagtggtacgtgggcgcccccgtggcctacgtgcagcagatcttcgtgaagagcagcgtgttcccctggcacaagaacctgctggccgtggacgtgttcagaagccccctgagcagagccttccagctggtggaggagatcagaaaccacgtgctgagagacagcagcggcatcagaagcctggaggagctgtgcctgcaggtgaccgacctgctgcccggcctgagaaagctgagaaacctgctgcccgagcacggctgcctgctgctgagccccggcaacttctggcagaacgactgggagagattccacgccgaccccgacatcatcggcaccatccaccagcacgagcccaagaccctgcagaccagcgccaccctgaaggacctgctgttcggcgtgcccggcaagtacagcggcgtgagcctgtacaccagaaagagaatggtgagctacaccatcaccctggtgttccagcactaccacgccaagttcctgggcagcctgagagccagactgatgctgctgcaccccagccccaactgcagcctgagagccgagagcctggtgcacgtgcacttcaaggaggagatcggcgtggccgagctgatccccctggtgaccacctacatcatcctgttcgcctacatctacttcagcaccagaaagatcgacatggtgaagagcaagtggggcctggccctggccgccgtggtgaccgtgctgagcagcctgctgatgagcgtgggcctgtgcaccctgttcggcctgacccccaccctgaacggcggcgagatcttcccctacctggtggtggtgatcggcctggagaacgtgctggtgctgaccaagagcgtggtgagcacccccgtggacctggaggtgaagctgagaatcgcccagggcctgagcagcgagagctggagcatcatgaagaacatggccaccgagctgggcatcatcctgatcggctacttcaccctggtgcccgccatccaggagttctgcctgttcgccgtggtgggcctggtgagcgacttcttcctgcagatgctgttcttcaccaccgtgctgagcatcgacatcagaagaatggagctggccgacctgaacaagagactgccccccgaggcctgcctgcccagcgccaagcccgtgggccagcccaccagatacgagagaagcagcggcagactggaggtgtgggacgccatcgagggcgtgctgtgctgcagcagcgaggaggtgagcagcggcatcaccgccctggtgttcctggacaagagaatcgtggccgccagactgaacggcagcctggacttcttcagcctggagacccacaccgccctgagccccctgcagttcagaggcacccccggcagaggcagcagccccgccagccccgtgtacagcagcagcgacaccgtggcctgccacctgacccacaccgtgccctgcgcccaccagaagcccatcaccgccctgaaggccgccgccggcagactggtgaccggcagccaggaccacaccctgagagtgttcagactggaggacagctgctgcctgttcaccctgcagggccacagcggcgccatcaccaccgtgtacatcgaccagaccatggtgctggccagcggcggccaggacggcgccatctgcctgtgggacgtgctgaccggcagcagagtgagccacgtgttcgcccacagaggcgacgtgaccagcctgacctgcaccaccagctgcgtgatcagcagcggcctggacgacctgatcagcatctgggacagaagcaccggcatcaagttctacagcatccagcaggacctgggctgcggcgccagcctgggcgtgatcagcgacaacctgctggtgaccggcggccagggctgcgtgagcttctgggacctgaactacggcgacctgctgcagaccgtgtacctgggcaagaacagcgaggcccagcccgccagacagatcctggtgctggacaacgccgccatcgtgtgcaacttcggcagcgagctgagcctggtgtacgtgcccagcgtgctggagaagctggactag

SEQ ID NO: 279350 - DNA, 411 bp, Artificial Sequence
  derived and/or modified sequence
atgaccctgaccgagagactgagagagaagatcagcagagccttctacaaccacggcctgctgtgcgccagctaccccatccccatcatcctgttcaccggcttctgcatcctggcctgctgctaccccctgctgaagctgcccctgcccggcaccggccccgtggagttcaccacccccgtgaaggactacagccccccccccgtggacagcgacagaaagcagggcgagcccaccgagcagcccgagtggtacgtgggcgcccccgtggcctacgtgcagcagatcttcgtgaagagcagcgtgttcccctggcacaagaacctgctggccgtggacgtgttcagaagccccctgagcagagccttccagctggtggaggagatcagaaaccacgtgctgagagactag

SEQ ID NO: 279351 - DNA, 267 bp, Artificial Sequence
  derived and/or modified sequence
atgaccctgaccgagagactgagagagaagatcagcagagccttctacaaccacggcctgctgtgcgccagctaccccatccccatcatcctgttcaccggcttctgcatcctggcctgctgctaccccctgctgaagctgcccctgcccggcaccggccccgtggagttcaccacccccgtgaaggactacagccccccccccgtggacagcgacagaaagcagggcgagcccaccgagcagcccgagtgggtgggcaccagatag

SEQ ID NO: 279352 - DNA, 399 bp, Artificial Sequence
  derived and/or modified sequence
atgaccctgaccgagagactgagagagaagatcagcagagccttctacaaccacggcctgctgtgcgccagctaccccatccccatcatcctgttcaccggcttctgcatcctggcctgctgctaccccctgctgaagctgcccctgcccggcaccggccccgtggagttcaccacccccgtgaaggactacagccccccccccgtggacagcgacagaaagcagggcgagcccaccgagcagcccgagtggtacgtgggcgcccccgtggcctacgtgcagcagatcttcgtgaagagcagcgtgttcccctggcacaagaacctgctggccgtggacgtgttcagaagccccctgagcagagccttccagctggtggaggagatcagaaaccactag

SEQ ID NO: 279353 - DNA, 2316 bp, Artificial Sequence
  derived and/or modified sequence
atgaccctgaccgagcgactgagagagaaaattagccgggccttctacaatcacggcctgctctgtgcatcttacccaattcctattatactgttcacagggttctgtatcttggcatgctgttaccctctgctgaaactgcccttgcctgggacagggcccgtcgagttcaccacccctgttaaggactactcgcctcctccagtcgattcagatagaaaacagggggagccaactgagcagcccgagtggtatgttggcgctcccgtggcttatgtgcaacagatcttcgtgaaaagctccgtgtttccttggcacaagaatctcctggccgtggacgtcttccggtcaccacttagccgggcctttcagctagttgaggagatccgcaaccatgtcttgcgagattcatcaggtatccgcagcctggaggaactatgcctgcaggtcacagatctgctccctgggcttcgcaagctccgaaaccttctgcctgaacacgggtgtctgctgctgtctcccggtaatttttggcagaacgactgggaacgtttccacgccgatccagacatcattggaaccattcaccagcacgaacctaaaacgctgcagacctcagctaccctgaaggacctgctgttcggagttcccggaaaatatagtggcgtgagtctgtacacacggaaacgtatggtatcctataccatcaccttagttttccagcactaccacgcaaaattcttgggatccctgcgggcgcggctcatgctgctgcatcctagcccaaactgtagtctacgcgctgagtctctggtgcacgtgcatttcaaagaggagataggggtagcagagctcatacctcttgttacaacttatatcattttgttcgcttacatctacttcagcacaagaaagattgacatggttaagtccaagtggggactggccttggctgctgtggtgaccgtcctttctagtcttctgatgtccgttggtctttgcacattgtttgggctgacacccaccttaaacggcggagaaatttttccgtacctggtcgtggtgataggtctagaaaatgtgttggtgctcactaagtcagtggtctctaccccagtcgatctggaggttaagttgcggattgcacagggcctcagcagcgagtcgtggtccattatgaaaaatatggcaacagagcttggtattatcttgatcggctactttaccctagtcccagccatccaggagttctgtctgttcgcagtggtgggcctggtttcagacttctttctccaaatgctgttttttaccacagtgctctccatcgatataagaagaatggaacttgcagatttgaacaaacgattgcccccagaggcctgtctgccctctgctaagcctgtcggccagcctactcgttatgagcgctcttctggcaggctggaggtttgggatgccatcgaaggagtgttgtgctgctcatctgaggaagtgagttcaggtataactgcactggtgttcctggacaagaggatagttgccgcgcgtttgaacggctctctggacttcttcagtctcgagacacacaccgccctgtcccccttacagttccgcgggactcccggcaggggatcttccccagcttcgccagtgtatagcagctctgacaccgtggcttgccacctgacacacacggttccttgtgcacatcagaagcccataaccgctctgaaagctgccgccggccggctcgtgaccggtagtcaggatcacacattgcgtgtttttagactcgaagattcttgctgccttttcacattgcagggccacagcggtgccattaccaccgtgtatattgaccagactatggttctggctagcggggggcaggacggcgcgatctgtctctgggacgttttgaccgggtctagagtgtctcatgttttcgcgcatcgaggagatgtcacatctctgacttgtactacctcctgcgtgattagttcaggattggacgatctcatttctatttgggatagaagcaccggcattaagttctattctatccagcaggatctgggatgtggagccagcctgggcgtgataagcgataatttactggtcacggggggccaaggctgcgttagtttctgggacctgaattacggagacctcctgcaaaccgtgtacctggggaagaactcagaggcccagccagctaggcaaatcctggtcctggataacgcagcaatcgtctgtaactttggctccgagttaagcttagtatatgtgcccagcgtgctggagaaactggactag

SEQ ID NO: 279354 - DNA, 411 bp, Artificial Sequence
  derived and/or modified sequence
atgactctgacagaaaggttgcgggagaaaatcagccgcgcattttataaccacggactcttatgtgccagttatcccatccccatcattctcttcacaggtttttgtatcctggcttgttgttaccctcttcttaaactgcccctccctggcacaggaccagttgaattcacaaccccggtgaaagattacagccctccacccgtggatagtgaccgtaagcagggcgagccaaccgagcagccagaatggtatgtgggagcccccgtggcgtacgttcagcaaatcttcgttaaatccagcgttttcccatggcacaaaaatctattggccgtcgacgtatttagatcccccctctccagggctttccagcttgtcgaggagattagaaatcacgtcctgcgcgactag

SEQ ID NO: 279355 - DNA, 267 bp, Artificial Sequence
  derived and/or modified sequence
atgacgctcacagagagactgagggagaaaatctcaagggcgttctacaaccacgggctcctgtgtgcaagctaccctatccccatcatactctttacgggtttttgtatcctggcctgttgttatccactgctaaagttgccacttcccggtacaggtcctgtcgagttcacaacccccgtgaaagattattcccctcctcctgttgacagtgatagaaagcaaggagagcccactgagcaaccggagtgggtgggcactcgctag

SEQ ID NO: 279356 - DNA, 399 bp, Artificial Sequence
  derived and/or modified sequence
atgactctcactgagcgcctccgcgaaaaaatttccagagccttttataaccacggtctgctgtgcgcctcttaccccattcccatcatactgtttacaggcttttgtattcttgcctgttgttatcctcttctaaaactgcccctgccagggacaggccctgtggaattcaccaccccggtgaaggattactcccctcccccagtggattctgaccggaaacagggagagcccactgaacaaccagaatggtacgtgggcgccccggttgcctatgtccagcagatcttcgtcaagtcgtccgtgttcccatggcataaaaacttgttggctgtggatgtgttcagatcccctctgtcaagggcgttccagctggtggaggaaatcaggaatcattag

SEQ ID NO: 279357 - DNA, 2316 bp, Artificial Sequence
  derived and/or modified sequence
atgaccctgacagagcggctgcgggagaagatcagccgggccttctacaaccacggcctgctgtgtgccagctaccccatccccatcatcctcttcaccggcttctgcatcctggcctgctgctaccccctgctgaagctgcccctgcccggcaccggccctgtggagttcaccacccctgtgaaggactacagccccccacctgtggacagcgacaggaagcagggcgagcccacagagcagcctgagtggtacgtgggcgcccctgtggcctacgtgcagcagatctttgtgaagagctctgtgttcccctggcacaagaacctgctggccgtggatgtgttccgcagccccctgagccgggccttccagctggtggaggagatccggaaccacgtgctgcgggacagcagcggcatccgcagcctggaggagctgtgcctgcaggtgacagacctgctgcccggcctgaggaagctgaggaacctgctgcctgagcacggctgcctgctgctgagccctggcaacttctggcagaatgactgggagcgcttccacgccgaccctgacatcatcggcaccatccaccagcacgagcccaagaccctgcagaccagcgccaccctgaaggacctgctgtttggagtgcctgggaagtacagcggcgtgtccctgtacaccaggaagaggatggtgtcctacaccatcaccctggtgttccagcactaccacgccaagttcctgggcagcctgcgggcccggctgatgctgctgcaccccagccccaactgcagcctgcgggcagagagcctggtgcacgtgcacttcaaggaggagattggagtggccgagctgatccccctggtgaccacctacatcatcctgtttgcctacatctacttcagcaccaggaagattgacatggtgaagagcaagtggggcctggccctggccgctgtggtgacagtgctgagcagcctgctgatgtctgtgggcctgtgcaccctgtttggcctgacccccaccctgaatggaggagagatcttcccctacctggtggtggtgattggcctggagaatgtgctggtgctgaccaagtctgtggtgtccacccctgtggacctggaggtgaagctgagaattgcccagggcctgagcagcgagagctggagcatcatgaagaacatggccacagagctgggcatcatcctgattggctacttcaccctggtgcctgccatccaggagttctgcctgtttgctgtggtgggcctggtgtctgacttcttcctgcagatgctgttcttcaccaccgtgctgagcattgacatccggaggatggagctggccgacctgaacaagaggctgcccccagaggcctgcctgcccagcgccaagcctgtgggccagcccaccaggtatgaaagaagcagcggccgcctggaggtgtgggatgccattgaaggagtgctgtgctgcagcagcgaggaggtgagcagcggcatcacagccctggtgttcctggacaagagaattgtggccgcccggctgaatggcagcctggacttcttcagcctggagacccacacagccctgagccccctgcagttccggggcaccccaggccggggcagcagccctgccagccctgtgtacagcagcagtgacacagtggcctgccacctgacccacacagtgccctgtgcccaccagaagcccatcacagccctgaaggctgctgctggccgcctggtgacaggcagccaggaccacaccctgcgggtcttccggctggaggacagctgctgcctcttcaccctgcagggccacagcggggccatcaccaccgtgtacatcgaccagaccatggtgctggccagcggcggccaggatggagccatctgcctgtgggatgtgctgaccggcagccgggtgagccacgtgtttgcccacagaggagatgtgaccagcctgacctgcaccaccagctgtgtgatcagcagcggcctggatgacctgatcagcatctgggacaggagcacaggcatcaagttctacagcatccagcaggacctgggctgtggggccagcctgggcgtcatcagtgacaacctgctggtgactggaggccagggctgtgtgtccttctgggacctgaactatggagacctgctgcagacagtgtacctgggcaagaacagcgaggcccagcctgcccggcagatcctggtgctggacaatgctgccatcgtgtgcaactttggcagcgagctgagcctggtgtatgtgcccagcgtgctggagaagctggactag

SEQ ID NO: 279358 - DNA, 411 bp, Artificial Sequence
  derived and/or modified sequence
atgaccctgacagagcggctgcgggagaagatcagccgggccttctacaaccacggcctgctgtgtgccagctaccccatccccatcatcctcttcaccggcttctgcatcctggcctgctgctaccccctgctgaagctgcccctgcccggcaccggccctgtggagttcaccacccctgtgaaggactacagccccccacctgtggacagcgacaggaagcagggcgagcccacagagcagcctgagtggtacgtgggcgcccctgtggcctacgtgcagcagatctttgtgaagagctctgtgttcccctggcacaagaacctgctggccgtggatgtgttccgcagccccctgagccgggccttccagctggtggaggagatccggaaccacgtgctgcgggactag

SEQ ID NO: 279359 - DNA, 267 bp, Artificial Sequence
  derived and/or modified sequence
atgaccctgacagagcggctgcgggagaagatcagccgggccttctacaaccacggcctgctgtgtgccagctaccccatccccatcatcctcttcaccggcttctgcatcctggcctgctgctaccccctgctgaagctgcccctgcccggcaccggccctgtggagttcaccacccctgtgaaggactacagccccccacctgtggacagcgacaggaagcagggcgagcccacagagcagcctgagtgggtgggcaccaggtag

SEQ ID NO: 279360 - DNA, 399 bp, Artificial Sequence
  derived and/or modified sequence
atgaccctgacagagcggctgcgggagaagatcagccgggccttctacaaccacggcctgctgtgtgccagctaccccatccccatcatcctcttcaccggcttctgcatcctggcctgctgctaccccctgctgaagctgcccctgcccggcaccggccctgtggagttcaccacccctgtgaaggactacagccccccacctgtggacagcgacaggaagcagggcgagcccacagagcagcctgagtggtacgtgggcgcccctgtggcctacgtgcagcagatctttgtgaagagctctgtgttcccctggcacaagaacctgctggccgtggatgtgttccgcagccccctgagccgggccttccagctggtggaggagatccggaaccactag

SEQ ID NO: 279361 - DNA, 2316 bp, Artificial Sequence
  derived and/or modified sequence
atgaccctgaccgagcggctgcgggagaagatcagccgggccttctacaatcacggcctgctgtgcgcctcataccctatccccatcatactttttaccgggttttgcattttggcctgctgttaccccctcctgaaactgccactccccggcacaggccctgtcgaatttacgacccctgtcaaagattactctcccccccccgtggactctgaccgcaaacagggtgaacccactgagcaacctgagtggtacgtcggagcaccagtagcctacgtccaacaaattttcgtcaagtcctccgtgtttccctggcataagaacctgctggccgtagacgtgttccgctctcctctatccagggccttccaacttgttgaagagatccgaaaccacgttctgagggatagtagcggcatccgaagccttgaggagctttgtttgcaagtgactgaccttctacctggcttaaggaagcttaggaatctgctacctgagcacgggtgtctactgctatctcctggcaatttctggcagaatgactgggaaaggttccatgccgaccccgatataatcggtaccatccatcagcacgagcccaagacattacagacctcagccacactgaaagacctgctgtttggagttcccggcaagtactcaggggtctctctgtatactcgcaaaagaatggtgagttacaccatcaccctggtctttcagcactatcatgccaagtttctagggagcctgcgcgcaagactcatgctgcttcatccttcccctaattgctcccttcgcgccgagagcttggtgcatgtgcacttcaaagaagagataggcgttgccgagctgatcccactggtgacaacttacatcattctttttgcatacatctatttttctacacgcaagatcgatatggtgaagtcaaaatggggtcttgctctcgctgctgtggtgacggtgttgagtagtttgctgatgtcagtcgggctctgtaccctgtttggcctgactccaacactgaatgggggggagatctttccatatcttgtggtggtcatcggactcgaaaacgtgctggtactaacaaaatcagtcgtgtccactcctgtcgacctggaggtgaaattgagaattgctcaggggctgtcaagcgaatcatggtcaatcatgaagaacatggcaacagagctcgggatcattctgattgggtattttactctggtcccagctatacaggagttttgtctgttcgcagtggtaggcctggtatcagatttttttctgcaaatgctgtttttcacaacagtgctcagcatcgatatcaggcgaatggagctcgctgacctgaacaaacgactacctccagaagcttgtcttccatccgctaaaccagtcggccaacctactcgttatgagcgaagctcaggccgtttggaagtgtgggatgccatcgaaggcgtgctgtgctgctcttccgaggaagtgagctcgggaattactgcactagtttttctggataaacgcatcgtggccgcgcggctgaacggatctcttgacttcttctccctggagacccataccgccttgtctcccctgcagttcagggggactcccggccgaggcagctccccagctagtccagtctattccagttctgacactgttgcttgtcacctgacacataccgttccctgtgctcaccagaagcctataaccgcgctcaaagcagcggccggacggctggtgacagggagtcaggaccacactctgcgcgtattccgactcgaggactcgtgctgtctgtttaccttgcaagggcacagcggggccatcaccaccgtttacattgatcaaaccatggtccttgccagtggcggacaagacggcgccatctgtctgtgggatgtactgactgggtcgcgggtctcccacgtgtttgcccatcgcggcgacgtcacctctctgacatgtacaacgagctgtgtcatttcctcggggctggatgatctcatttctatttgggatagatcaactggcattaagttctactctatccaacaagatttgggatgcggggcttcgctgggcgtaatctctgataaccttctggttacgggtgggcagggctgcgtgagcttctgggatctgaattatggagacctactgcagacagtttatttaggcaaaaactctgaagctcagccagctcgacagatcctcgtgttagataacgctgcgatagtgtgtaacttcggctcagagctctcactggtttacgtacctagcgtactggagaagctggactag

SEQ ID NO: 279362 - DNA, 411 bp, Artificial Sequence
  derived and/or modified sequence
atgaccctgaccgagcggctgcgggagaagatcagccgggccttctataatcacgggcttctgtgtgccagctatcctatccctatcatcctgtttacagggttttgcattctcgcttgttgttatccactcctcaagttgcctcttccaggcacggggccggtggagttcactacgcccgtgaaagattactcaccaccaccggtagacagtgataggaaacagggggagcctacagaacaacccgaatggtacgtcggagcccccgtggcctatgtgcagcagatcttcgtcaaatcctcagtttttccttggcacaagaacctgctggcagtggatgtctttcgctctccccttagcagagcgtttcagcttgtggaagagatcaggaaccacgtccttagagattag

SEQ ID NO: 279363 - DNA, 267 bp, Artificial Sequence
  derived and/or modified sequence
atgaccctgaccgagcggctgcgggagaagatcagccgggccttctacaatcatgggctgctgtgcgcttcctaccctattccaattatcctgttcactggattctgtatactggcttgttgttatccgcttctaaagctccctttgcccggaacaggccctgtggagttcaccacccctgtcaaggattactcaccaccaccagttgactctgacaggaagcaaggtgaaccaacggaacaacccgaatgggtgggaactcgatag

SEQ ID NO: 279364 - DNA, 399 bp, Artificial Sequence
  derived and/or modified sequence
atgaccctgaccgagcggctgcgggagaagatcagccgggccttctataaccacggacttttgtgcgcttcataccctattcccatcatattgtttactggcttctgtatactggcctgttgttaccccttgctgaaactcccgctgccagggactggacccgtggagttcacaacccccgtgaaggattactccccccctccagttgactcagataggaaacagggtgaacccaccgaacagcctgaatggtacgtcggggcaccagtggcctatgtgcagcaaattttcgtgaagtcaagcgtgttcccatggcacaaaaatttgctagccgtggatgttttccgctctcctctttcacgcgcatttcagctcgtcgaagagatcagaaatcactag

SEQ ID NO: 279365 - DNA, 2316 bp, Artificial Sequence
  derived and/or modified sequence
atgacgttgaccgaaagactccgagagaaaatctccagagccttttacaatcacggactgctgtgcgcctcttaccccatcccaatcattctctttaccgggttctgtatcctggcttgctgctaccccttactgaaactcccattacccggaaccggcccagtggagtttaccacgccagttaaggactactctcccccaccagtggattcggacaggaagcagggagagccaactgagcaacccgagtggtatgtaggcgcacccgtggcttacgtgcagcagatatttgtgaaaagctctgtgtttccttggcacaagaacttgctagctgtagatgtcttccgcagtccactgtccagggctttccagttagtcgaggaaataaggaaccatgtgttgagagactcctcaggtatccgttccctggaagagctttgtcttcaggtgacagatttgctgcctggcttgagaaaactgcgaaaccttctgcccgaacatggctgcctcctgctgtcgcctggaaatttttggcagaatgattgggagcgctttcacgcagaccccgacatcattgggacgatccaccagcacgagcccaaaacgctacaaacttctgccacactcaaagacctgctattcggcgtccccggaaaatactccggagtcagtctctatacacgcaaaaggatggtgtcctatacgatcaccttggtgttccagcattatcatgcaaaatttctcggctctctgcgtgcacggctgatgctgttgcaccctagccccaattgttcattgcgtgcagagagtctggtgcacgtgcatttcaaagaggaaatcggggtggctgagttgatcccgctggtcacaacctatattatcctgttcgcatacatttatttctcaacccgcaaaattgacatggtgaaatcaaaatggggactggcactggccgctgttgttacggtgctgagctctttactgatgagtgtggggctatgtacgctctttggtctcaccccaacattgaatggcggagagatctttccctatttggttgtcgtgatcggcttggaaaacgtgcttgtgttaactaaaagcgtggtttctacacccgtagatctggaagttaagttgcgaatcgcccagggtctatccagtgagagctggtccatcatgaagaatatggctactgagctgggcattatattgatcggctacttcacgctggtccccgctatccaggagttctgtctcttcgccgtggttggtcttgtctccgacttctttcttcagatgctgttctttaccaccgtgttaagtattgatattcgacgtatggagctggctgacctgaacaaaaggctccctcctgaggcttgcttgccctcagccaagcctgtaggtcagccaactcggtacgaaagatcttccggcaggctcgaggtgtgggatgctatcgagggcgtgctgtgctgcagcagtgaggaggtgagtagcggaatcacagcccttgtttttctggacaagcggattgtggcagccagactgaatggaagtttggattttttctccctggagacacatactgccctgagtcctttgcagtttcgcggaacgcccggtcgcggttcatctcccgcttcccctgtgtactcatctagcgacacagttgcttgccatctcacgcacacagtaccatgcgcccaccaaaaacccatcaccgctttgaaagcggctgcaggtaggctagttacaggatcacaggatcatacgcttagggtcttcaggctggaggactcttgttgccttttcacattgcaggggcattctggggcaatcactacagtctacattgaccagacaatggttctggcgtccggcggacaggatggcgcaatttgcctctgggacgttctcacaggctctcgcgtctcccacgttttcgcccaccgtggggatgtgacatcattgacgtgcaccacttcctgtgtaatcagcagcggtttggatgacttgatcagtatatgggacaggtcaaccggcatcaagttttactcaattcagcaggacctgggctgtggggcatcccttggtgtgatcagcgataacctcttagtaaccggcggacaggggtgcgtgtcattctgggacctgaattatggagatctgttgcagaccgtttacctggggaagaacagcgaagcacagccagcccgacaaattctggtcctggataatgccgctattgtgtgcaacttcggctcggagctctcactagtttacgttccttctgtgctggagaagttggattag

SEQ ID NO: 279366 - DNA, 411 bp, Artificial Sequence
  derived and/or modified sequence
atgactctgactgaacggctgagagagaagataagccgagccttctacaaccacggtctactttgcgcatcttacccgatcccgatcatcctgttcaccggattctgtatcctggcatgctgctatccgcttttgaagctaccactgccgggaaccggacccgtggagttcactactcctgtcaaagactactctccccctcccgttgatagcgatcgtaagcaaggagaacccacagagcaaccagaatggtatgttggggctcctgtcgcctatgtgcagcagatcttcgtcaaatccagtgtgttcccttggcataagaatctccttgcggtggacgttttcagaagccctctcagccgcgctttccagctcgtagaagaaattcggaatcatgtcttgcgggactag

SEQ ID NO: 279367 - DNA, 267 bp, Artificial Sequence
  derived and/or modified sequence
atgaccctgactgaaagactgcgggagaagataagcagggccttctataaccatggccttctgtgcgcgtcttaccctattcccatcatacttttcactggtttttgcatccttgcatgttgttaccccctgttgaaactgccactcccgggtaccggtcctgtggaatttaccaccccagtcaaggactactccccgccaccagtagactctgatcggaaacagggagagccaaccgagcaacccgaatgggtgggcactcgctag

SEQ ID NO: 279368 - DNA, 399 bp, Artificial Sequence
  derived and/or modified sequence
atgaccctgactgagcgcctcagagaaaagatctctcgtgccttttacaaccatggcctgctttgtgctagttaccccatccccataatactgtttactggcttttgcatactggcttgctgctacccactgttgaaattaccattgcccggaacaggaccagtggagttcaccacccctgtcaaagactactcacctcccccagtggacagtgaccgaaaacagggtgagccgaccgagcagcccgagtggtacgtgggtgctcccgtagcttacgtccagcagattttcgttaaatcgagcgtgtttccatggcataaaaacctgctcgctgtcgacgtcttcagaagccctctgtcccgagcctttcaattggtagaggaaattcgcaatcactag

SEQ ID NO: 279369 - DNA, 2731 bp, Artificial Sequence
  derived and/or modified sequence
agaggtgaaggggcgggcacccggcggccaggagagagagggagggcgccacgcaccggactgcgggccgagagcgcgcacgccgcgctccgcccctgctgccgcccccgtcgccgccgccgccgccgccgcagcttgggaggtgctgccaccacaggtacctgcacatgttgttctttgtcagtgctgtcaagtgtgtgccagggtgatccatggtcactttccgggatggcagcaaggtgacttcggctgaggatgaccctgactgaaaggctgcgtgagaagatatctcgggccttctacaaccatgggctcctctgtgcatcctatcccatccccatcatcctcttcacagggttctgcatcttagcctgctgctacccactgctgaaactccccttgccaggaacaggacctgtggaattcaccacccctgtgaaggattactcgcccccacctgtggactctgaccgcaaacaaggagagcctactgagcagcctgagtggtatgtgggtgccccggtggcttatgtccagcagatatttgtgaagtcctcagtgtttccctggcacaagaacctcctggcagtagatgtatttcgttcacctttgtcccgggcattccaactggtggaggagatccggaaccacgtgctgagagacagctctgggatcaggagcttggaggagttgtgtctgcaagtgaccgacctgctgccaggccttaggaagctcaggaacctactccctgagcatggatgcctgctgctgtcccctgggaacttctggcagaatgactgggaacgcttccatgctgatcctgacatcattgggaccatccaccagcacgagcctaaaaccctgcagacttcagccacactcaaagacttgttatttggtgttcctgggaagtacagcggggtgagcctctacaccaggaagaggatggtctcctacaccatcaccctggtcttccagcactaccatgccaagttcctgggcagcctgcgtgcccgcctgatgcttctgcaccccagccccaactgcagccttcgggcggagagcctggtccacgtgcacttcaaggaggagattggtgtcgctgagctcatcccccttgtgaccacctacatcatcttgtttgcctacatctacttctccacgcggaagatcgacatggtcaagtccaagtgggggctggccctggctgccgtggtcacagtgctcagctcgctgctcatgtctgtgggactctgcacactcttcggcctgacgcccaccctcaatggcggcgagattttcccctaccttgtggtggttattgggttagagaatgtgttggtgctcaccaagtctgtggtctcaaccccggtagacctggaggtgaagctgcggatcgcccaaggcctaagcagcgagagctggtccatcatgaagaacatggccacggagctgggcatcatcctcatcggctacttcaccctagtgcccgccatccaggagttctgtctctttgctgtcgtggggctggtgtctgacttcttccttcagatgctgtttttcaccactgtcctgtccattgacattcgccggatggagctagcagacctgaacaagcgactgccccctgaggcctgcctgccctcagccaagccagtgggacagccaacgcgctacgagcggagcagcggccggctggaggtgtgggacgccattgaaggggtgctgtgctgcagcagcgaggaggtctcctcaggcattaccgctctggtgttcttggacaaaaggattgtggctgcacggctcaacggttcccttgatttcttctccttggagacccacactgccctcagccccctgcagtttagagggaccccagggcggggcagttcccctgcctctccagtgtacagcagcagcgacacagtggcctgtcacctgacccacacagtgccctgtgcacaccaaaaacccatcacagccctgaaagccgctgctgggcgcttggtgactgggagccaagaccacacactgagagtgttccgtctggaggactcgtgctgcctcttcacccttcagggccactcaggggccatcacgaccgtgtacattgaccagaccatggtgctggccagtggaggacaagatggggccatctgcctgtgggatgtactgactggcagccgggtcagccatgtgtttgctcaccgtggggatgtcacctcccttacctgtaccacctcctgtgtcatcagcagtggcctggatgacctcatcagcatctgggaccgcagcacaggcatcaagttctactccattcagcaggacctgggctgtggtgcaagcttgggtgtcatctcagacaacctgctggtgactggcggccagggctgtgtctccttttgggacctaaactacggggacctgttacagacagtctacctggggaagaacagtgaggcccagcctgcccgccagatcctggtgctggacaacgctgccattgtctgcaactttggcagtgagctcagcctggtgtatgtgccctctgtgctggagaagctggactgagcgcagggcctccttgcccaggcaggaggctggggtgctgtgtgggggccaatgcactgaacctggacttgggggaaagagccgagtatcttccagccgctgcctcctgactgtaataatattaaacttttttaaaaaaccatatcatcatctgtcaggc

SEQ ID NO: 279370 - DNA, 683 bp, Artificial Sequence
  derived and/or modified sequence
gtgtccctgcaccggccggcccctggagctccgcgtccccaccagacctccgcgggcccctggtgtgacggggggagatgcgcggcgtcgcatcccctggcctagttgctccgggaagctgttgtagaacctgctttggtgctgtttgggttttccggagtgcgggggagagcaggtacctgcacatgttgttctttgtcagtgctgtcaagtgtgtgccagggtgatccatggtcactttccgggatggcagcaaggtgacttcggctgaggatgaccctgactgaaaggctgcgtgagaagatatctcgggccttctacaaccatgggctcctctgtgcatcctatcccatccccatcatcctcttcacagggttctgcatcttagcctgctgctacccactgctgaaactccccttgccaggaacaggacctgtggaattcaccacccctgtgaaggattactcgcccccacctgtggactctgaccgcaaacaaggagagcctactgagcagcctgagtggtatgtgggtgccccggtggcttatgtccagcagatatttgtgaagtcctcagtgtttccctggcacaagaacctcctggcagtagatgtatttcgttcacctttgtcccgggcattccaactggtggaggagatccggaaccacgtgctgagagacag

SEQ ID NO: 279371 - DNA, 3634 bp, Artificial Sequence
  derived and/or modified sequence
cccgtcgccgccgccgccgccgccgcagcttgggaggtgctgccaccacaggtacctgcacatgttgttctttgtcagtgctgtcaagtgtgtgccagggtgatccatggtcactttccgggatggcagcaaggtgacttcggctgaggatgaccctgactgaaaggctgcgtgagaagatatctcgggccttctacaaccatgggctcctctgtgcatcctatcccatccccatcatcctcttcacagggttctgcatcttagcctgctgctacccactgctgaaactccccttgccaggaacaggacctgtggaattcaccacccctgtgaaggattactcgcccccacctgtggactctgaccgcaaacaaggagagcctactgagcagcctgagtgggttcctgggcagcctgcgtgcccgcctgatgcttctgcaccccagccccaactgcagccttcgggcggagagcctggtccacgtgcacttcaaggaggagattggtgtcgctgagctcatcccccttgtgaccacctacatcatcttgtttgcctacatctacttctccacgcggaagatcgacatggtcaagtccaagtgggggctggccctggctgccgtggtcacagtgctcagctcgctgctcatgtctgtgggactctgcacactcttcggcctgacgcccaccctcaatggcggcgagattttcccctaccttgtggtggttattgggttagagaatgtgttggtgctcaccaagtctgtggtctcaaccccggtagacctggaggtgaagctgcggatcgcccaaggcctaagcagcgagagctggtccatcatgaagaacatggccacggagctgggcatcatcctcatcggctacttcaccctagtgcccgccatccaggagttctgtctctttgctgtcgtggggctggtgtctgacttcttccttcagatgctgtttttcaccactgtcctgtccattgacattcgccggatggagctagcagacctgaacaagcgactgccccctgaggcctgcctgccctcagccaagccagtgggacagccaacgcgctacgagcggcagctggctgtgaggccgtccacaccccacaccatcacgttgcagccgtcttccttccgaaacctgcggctccccaagaggctgcgtgttgtctacttcctggcccgcacccgcctggcacagcgcctcatcatggctggcaccgttgtctggattggcatcctggtatacacagacccagcagggctgcgcaactacctcgctgcccaggtgacggaacagagcccattgggtgagggagccctggctcccatgcccgtgcctagtggcatgctgccccccagccacccggaccctgccttctccatcttcccacctgatgcccctaagctacctgagaaccagacgtcgccaggcgagtcacctgagcgtggaggtccagcagaggttgtccatgacagcccagtcccagaggtaacctgggggcctgaggatgaggaactttggaggaaattgtccttccgccactggccgacgctcttcagctattacaacatcacactggccaagaggtacatcagcctgctgcccgtcatcccagtcacgctccgcctgaacccgagggaggctctggagggccggcaccctcaggacggccgcagtgcctggcccccaccggggcccatacctgctgggcactgggaagcaggacccaagggcccaggtggggtgcaggcccatggagacgtcacgctgtacaaggtggcggcgctgggcctggccaccggcatcgtcttggtgctgctgctgctctgcctctaccgcgtgctatgcccgcgcaactacgggcagctgggtggtgggcccgggcggcggaggcgcggggagctgccctgcgacgactacggctatgcgccacccgagacggagatcgtgccgcttgtgctgcgcggccacctcatggacatcgagtgcctggccagcgacggcatgctgctggtgagctgctgcctggcaggccacgtctgcgtgtgggacgcgcagaccggggattgcctaacgcgcattccgcgcccagggcagcgccgggacagtggcgtgggcagcgggcttgaggctcaggagagctgggaacgactttcagatggtgggaaggctggtccagaggagcctggggacagccctcccctgagacaccgcccccggggccctccgccgccttccctcttcggggaccagcctgacctcacctgcttaattgacaccaacttttcagcgcagcctcggtcctcacagcccactcagcccgagccccggcaccgggcggtctgtggccgctctcgggactccccaggctatgacttcagctgcctggtgcagcgggtgtaccaggaggaggggctggcggccgtctgcacaccagccctgcgcccaccctcgcctgggccggtgctgtcccaggcccctgaggacgagggtggctcccccgagaaaggctccccttccctcgcctgggcccccagtgccgagggttccatctggagcttggagctgcagggcaacctcatcgtggtggggcggagcagcggccggctggaggtgtgggacgccattgaaggggtgctgtgctgcagcagcgaggaggtctcctcaggcattaccgctctggtgttcttggacaaaaggattgtggctgcacggctcaacggttcccttgatttcttctccttggagacccacactgccctcagccccctgcagtttagagggaccccagggcggggcagttcccctgcctctccagtgtacagcagcagcgacacagtggcctgtcacctgacccacacagtgccctgtgcacaccaaaaacccatcacagccctgaaagccgctgctgggcgcttggtgactgggagccaagaccacacactgagagtgttccgtctggaggactcgtgctgcctcttcacccttcagggccactcaggggccatcacgaccgtgtacattgaccagaccatggtgctggccagtggaggacaagatggggccatctgcctgtgggatgtactgactggcagccgggtcagccatgtgtttgctcaccgtggggatgtcacctcccttacctgtaccacctcctgtgtcatcagcagtggcctggatgacctcatcagcatctgggaccgcagcacaggcatcaagttctactccattcagcaggacctgggctgtggtgcaagcttgggtgtcatctcagacaacctgctggtgactggcggccagggctgtgtctccttttgggacctaaactacggggacctgttacagacagtctacctggggaagaacagtgaggcccagcctgcccgccagatcctggtgctggacaacgctgccattgtctgcaactttggcagtgagctcagcctggtgtatgtgccctctgtgctggagaagctggactgagcgcagggcctccttgcccaggcaggaggctggggtgctgtgtgggggccaatgcactgaacctggacttgggggaaagagccgagtatcttccagccgctgcctcctgactgtaataatattaaactttttt

SEQ ID NO: 279372 - DNA, 550 bp, Artificial Sequence
  derived and/or modified sequence
agagtccggtgggaactgggttttaggaggaggtatctgaagaatgtgtagtgggtcgggggctggtgcggtcagaagggccacctctaatttctgccttgcattggtgactagatctgcactttctggaactcccagagaagtttgctggtgcctttgagggcaggtacagggcctgccttatccaggtacctgcacatgttgttctttgtcagtgctgtcaagtgtgtgccagggtgatccatggtcactttccgggatggcagcaaggtgacttcggctgaggatgaccctgactgaaaggctgcgtgagaagatatctcgggccttctacaaccatgggctcctctgtgcatcctatcccatccccatcatcctcttcacagggttctgcatcttagcctgctgctacccactgctgaaactccccttgccaggaacaggacctgtggaattcaccacccctgtgaaggattactcgcccccacctgtggactctgaccgcaaacaaggagagcctactgagcagcctgagtgggtgggtactcgt

SEQ ID NO: 279373 - DNA, 706 bp, Artificial Sequence
  derived and/or modified sequence
agagagagagagagagagagagagagtgtgtgtgtgtgtgtgtgtgtgtgtgtgtgtgtgtgtgtgtgtattttgggattgaggtcactagaccttgcatataggcattctgaaaccattccccagccacataactatcgcctccctccagcagccctagtgtgcagagccaagtactctttgttaactggcttttctcccttcttaccaggtacctgcacatgttgttctttgtcagtgctgtcaagtgtgtgccagggtgatccatggtcactttccgggatggcagcaaggtgacttcggctgaggatgaccctgactgaaaggctgcgtgagaagatatctcgggccttctacaaccatgggctcctctgtgcatcctatcccatccccatcatcctcttcacagggttctgcatcttagcctgctgctacccactgctgaaactccccttgccaggaacaggacctgtggaattcaccacccctgtgaaggattactcgcccccacctgtggactctgaccgcaaacaaggagagcctactgagcagcctgagtggtatgtgggtgccccggtggcttatgtccagcagatatttgtgaagtcctcagtgtttccctggcacaagaacctcctggcagtagatgtatttcgttcacctttgtcccgggcattccaactggtggaggagatccggaaccacg

SEQ ID NO: 279374 - protein, 905 aa, Artificial Sequence
  derived and/or modified sequence
MTLTERLREKISRAFYNHGLLCASYPIPIILIGYFTLVPAIQEFCLFAVVGLVSDFFLQMLFFTTVLSIDIRRMELADLNKRLPPEACLPSAKPVGQPTRYERQLAVRPSTPHTITLQPSSFRNLRLPKRLRVVYFLARTRLAQRLIMAGTVVWIGILVYTDPAGLRNYLAAQVTEQSPLGEGALAPMPVPSGMLPPSHPDPAFSIFPPDAPKLPENQTSPGESPERGGPAEVVHDSPVPEVTWGPEDEELWRKLSFRHWPTLFSYYNITLAKRYISLLPVIPVTLRLNPREALEGRHPQDGRSAWPPPGPIPAGHWEAGPKGPGGVQAHGDVTLYKVAALGLATGIVLVLLLLCLYRVLCPRNYGQLGGGPGRRRRGELPCDDYGYAPPETEIVPLVLRGHLMDIECLASDGMLLVSCCLAGHVCVWDAQTGDCLTRIPRPGQRRDSGVGSGLEAQESWERLSDGGKAGPEEPGDSPPLRHRPRGPPPPSLFGDQPDLTCLIDTNFSAQPRSSQPTQPEPRHRAVCGRSRDSPGYDFSCLVQRVYQEEGLAAVCTPALRPPSPGPVLSQAPEDEGGSPEKGSPSLAWAPSAEGSIWSLELQGNLIVVGRSSGRLEVWDAIEGVLCCSSEEVSSGITALVFLDKRIVAARLNGSLDFFSLETHTALSPLQFRGTPGRGSSPASPVYSSSDTVACHLTHTVPCAHQKPITALKAAAGRLVTGSQDHTLRVFRLEDSCCLFTLQGHSGAITTVYIDQTMVLASGGQDGAICLWDVLTGSRVSHVFAHRGDVTSLTCTTSCVISSGLDDLISIWDRSTGIKFYSIQQDLGCGASLGVISDNLLVTGGQGCVSFWDLNYGDLLQTVYLGKNSEAQPARQILVLDNAAIVCNFGSELSLVYVPSVLEKLD

SEQ ID NO: 279375 - protein, 352 aa, Artificial Sequence
  derived and/or modified sequence
MVKSKWGLALAAVVTVLSSLLMSVGLCTLFGLTPTLNGGEIFPYLVVVIGLENVLVLTKSVVSTPVDLEVKLRIAQGLSSESWSIMKNMATELGIILIGYFTLVPAIQEFCLFAVVGLVSDFFLQMLFFTTVLSIDIRRMELADLNKRLPPEACLPSAKPVGQPTRYERQLAVRPSTPHTITLQPSSFRNLRLPKRLRVVYFLAPTGAHTCWALGSRTQGPRWGAGPWRRHAVQGGGAGPGHRHRLGAAAALPLPRAMPAQLRAAGWWARAAEARGAALRRLRLCATRDGDRAACAARPPHGHRVPGQRRHAAGELLPGRPRLRVGRADRGLPNAHSAPRQAAPGQWRGQRA

SEQ ID NO: 279376 - DNA, 1059 bp, Artificial Sequence
  derived and/or modified sequence
atggtgaagagcaagtggggcctggccctggccgccgtggtgaccgtgctgagcagcctgctgatgagcgtgggcctgtgcaccctgttcggcctgacccccaccctgaacggcggcgagatcttcccctacctggtggtggtgatcggcctggagaacgtgctggtgctgaccaagagcgtggtgagcacccccgtggacctggaggtgaagctgagaatcgcccagggcctgagcagcgagagctggagcatcatgaagaacatggccaccgagctgggcatcatcctgatcggctacttcaccctggtgcccgccatccaggagttctgcctgttcgccgtggtgggcctggtgagcgacttcttcctgcagatgctgttcttcaccaccgtgctgagcatcgacatcagaagaatggagctggccgacctgaacaagagactgccccccgaggcctgcctgcccagcgccaagcccgtgggccagcccaccagatacgagagacagctggccgtgagacccagcaccccccacaccatcaccctgcagcccagcagcttcagaaacctgagactgcccaagagactgagagtggtgtacttcctggcccccaccggcgcccacacctgctgggccctgggcagcagaacccagggccccagatggggcgccggcccctggagaagacacgccgtgcagggcggcggcgccggccccggccacagacacagactgggcgccgccgccgccctgcccctgcccagagccatgcccgcccagctgagagccgccggctggtgggccagagccgccgaggccagaggcgccgccctgagaagactgagactgtgcgccaccagagacggcgacagagccgcctgcgccgccagacccccccacggccacagagtgcccggccagagaagacacgccgccggcgagctgctgcccggcagacccagactgagagtgggcagagccgacagaggcctgcccaacgcccacagcgcccccagacaggccgcccccggccagtggagaggccagagagcctag

SEQ ID NO: 279377 - DNA, 3072 bp, Artificial Sequence
  derived and/or modified sequence
atgctgctgcaccccagccccaactgcagcctgagagccgagagcctggtgcacgtgcacttcaaggaggagatcggcgtggccgagctgatccccctggtgaccacctacatcatcctgttcgcctacatctacttcagcaccagaaagatcgacatggtgaagagcaagtggggcctggccctggccgccgtggtgaccgtgctgagcagcctgctgatgagcgtgggcctgtgcaccctgttcggcctgacccccaccctgaacggcggcgagatcttcccctacctggtggtggtgatcggcctggagaacgtgctggtgctgaccaagagcgtggtgagcacccccgtggacctggaggtgaagctgagaatcgcccagggcctgagcagcgagagctggagcatcatgaagaacatggccaccgagctgggcatcatcctgatcggctacttcaccctggtgcccgccatccaggagttctgcctgttcgccgtggtgggcctggtgagcgacttcttcctgcagatgctgttcttcaccaccgtgctgagcatcgacatcagaagaatggagctggccgacctgaacaagagactgccccccgaggcctgcctgcccagcgccaagcccgtgggccagcccaccagatacgagagacagctggccgtgagacccagcaccccccacaccatcaccctgcagcccagcagcttcagaaacctgagactgcccaagagactgagagtggtgtacttcctggccagaaccagactggcccagagactgatcatggccggcaccgtggtgtggatcggcatcctggtgtacaccgaccccgccggcctgagaaactacctggccgcccaggtgaccgagcagagccccctgggcgagggcgccctggcccccatgcccgtgcccagcggcatgctgccccccagccaccccgaccccgccttcagcatcttcccccccgacgcccccaagctgcccgagaaccagaccagccccggcgagagccccgagagaggcggccccgccgaggtggtgcacgacagccccgtgcccgaggtgacctggggccccgaggacgaggagctgtggagaaagctgagcttcagacactggcccaccctgttcagctactacaacatcaccctggccaagagatacatcagcctgctgcccgtgatccccgtgaccctgagactgaaccccagagaggccctggagggcagacacccccaggacggcagaagcgcctggcccccccccggccccatccccgccggccactgggaggccggccccaagggccccggcggcgtgcaggcccacggcgacgtgaccctgtacaaggtggccgccctgggcctggccaccggcatcgtgctggtgctgctgctgctgtgcctgtacagagtgctgtgccccagaaactacggccagctgggcggcggccccggcagaagaagaagaggcgagctgccctgcgacgactacggctacgccccccccgagaccgagatcgtgcccctggtgctgagaggccacctgatggacatcgagtgcctggccagcgacggcatgctgctggtgagctgctgcctggccggccacgtgtgcgtgtgggacgcccagaccggcgactgcctgaccagaatccccagacccggccagagaagagacagcggcgtgggcagcggcctggaggcccaggagagctgggagagactgagcgacggcggcaaggccggccccgaggagcccggcgacagcccccccctgagacacagacccagaggcccccccccccccagcctgttcggcgaccagcccgacctgacctgcctgatcgacaccaacttcagcgcccagcccagaagcagccagcccacccagcccgagcccagacacagagccgtgtgcggcagaagcagagacagccccggctacgacttcagctgcctggtgcagagagtgtaccaggaggagggcctggccgccgtgtgcacccccgccctgagaccccccagccccggccccgtgctgagccaggcccccgaggacgagggcggcagccccgagaagggcagccccagcctggcctgggcccccagcgccgagggcagcatctggagcctggagctgcagggcaacctgatcgtggtgggcagaagcagcggcagactggaggtgtgggacgccatcgagggcgtgctgtgctgcagcagcgaggaggtgagcagcggcatcaccgccctggtgttcctggacaagagaatcgtggccgccagactgaacggcagcctggacttcttcagcctggagacccacaccgccctgagccccctgcagttcagaggcacccccggcagaggcagcagccccgccagccccgtgtacagcagcagcgacaccgtggcctgccacctgacccacaccgtgccctgcgcccaccagaagcccatcaccgccctgaaggccgccgccggcagactggtgaccggcagccaggaccacaccctgagagtgttcagactggaggacagctgctgcctgttcaccctgcagggccacagcggcgccatcaccaccgtgtacatcgaccagaccatggtgctggccagcggcggccaggacggcgccatctgcctgtgggacgtgctgaccggcagcagagtgagccacgtgttcgcccacagaggcgacgtgaccagcctgacctgcaccaccagctgcgtgatcagcagcggcctggacgacctgatcagcatctgggacagaagcaccggcatcaagttctacagcatccagcaggacctgggctgcggcgccagcctgggcgtgatcagcgacaacctgctggtgaccggcggccagggctgcgtgagcttctgggacctgaactacggcgacctgctgcagaccgtgtacctgggcaagaacagcgaggcccagcccgccagacagatcctggtgctggacaacgccgccatcgtgtgcaacttcggcagcgagctgagcctggtgtacgtgcccagcgtgctggagaagctggactag

SEQ ID NO: 279378 - DNA, 1059 bp, Artificial Sequence
  derived and/or modified sequence
atggtgaaatcaaagtggggccttgcgctcgctgcagtcgtgaccgtgctgtcgagtctcctgatgagcgtcgggctctgcaccctcttcggccttacgccgaccttaaatggaggcgagatctttccctacctggtggtagtgattggcctcgaaaacgtcctcgtgcttacgaagagtgtcgtcagcacccccgtggatctcgaggtaaaactgcgaatcgcccagggactcagcagtgagagttggagcatcatgaaaaatatggcaacagagctaggcatcatcctaattggctacttcacactggttccggctattcaggaattttgcctgttcgcagtggtcgggctcgtgagcgattttttcttgcagatgttgttctttactaccgtgctaagcatcgacattagacggatggaactagcagacttgaacaagcggctgccccccgaagcatgtttgccctccgccaagcctgttggacagccgacacgctacgagagacagttggcggttcgtcctagtactccacacactattacattgcaacctagcagctttcgcaatctacggctccctaagaggcttcgagtcgtctattttctagccccaacaggcgcacacacctgttgggctctgggcagcaggacacaaggtccccggtggggagcgggaccttggcgtagacacgcggtgcagggcgggggtgccggccctggccatcgccacagactcggggccgcagcagctctaccactccccagggccatgccggcccagctgagagccgcgggctggtgggccagagcagcagaggcccgtggtgccgccctgcgcaggctacggctctgtgccacccgtgacggggatagggccgcttgtgccgccaggccaccgcatggtcaccgtgtgcctgggcagaggcggcacgccgccggcgagttactgccaggtaggccaaggctcagggtggggagggcagataggggactgccgaacgctcattccgcgcccagacaagctgcacctggacaatggaggggccagcgcgcatag

SEQ ID NO: 279379 - DNA, 3072 bp, Artificial Sequence
  derived and/or modified sequence
atgctgcttcatcccagccccaattgctcccttagggcagagtcgctcgtgcacgtgcattttaaggaagaaataggcgtggccgagcttatacccctggtgacaacctatataattctgtttgcctatatctacttctcaacccgtaagattgacatggtcaaatccaagtggggactggcccttgccgctgtagtaaccgtcctgtcctcccttttgatgagtgtcggcctgtgtacacttttcggactgactccaactttgaacggaggggaaatttttccctacttagtagttgtcatcggattagagaatgtgttggtgcttaccaagtccgtggtaagtaccccggttgatctggaggtgaagttaagaatcgctcaggggctgtcatcagaatcctggagcattatgaagaatatggcaacagaactcggcatcatcctaattggttattttaccctggttccagctatccaggagttttgtctgttcgcagtcgtcggccttgtcagcgactttttcctgcaaatgttgtttttcacaaccgtcctgtctatcgacattcgcaggatggagctggcggacttgaataagcggctgccaccagaagcttgcctgcccagtgccaagccggtgggtcagccaactcggtacgagaggcagctggctgttcgaccttcaacaccccatactattaccttgcagccctcaagtttccgaaatttaaggttgcctaaaaggctcagagtggtgtattttctggcccgaactcgcttggcccagagacttatcatggcagggaccgttgtgtggattggaattttggtctacacggatccagcgggtctccgcaattatctggcagcacaggtaactgaacagtccccacttggtgagggtgctctggcgcccatgcccgtgccatctggaatgctccccccaagccaccctgaccccgcattctcgatctttccgccagatgcacctaagctgccagagaaccaaacttcacctggggagagtcccgagagaggtggacccgcagaagtggttcacgattcccccgtcccagaggtgacatggggacccgaagatgaggaactttggcggaagttgtcttttcggcactggccaaccttgttctcttactacaatataacactggcaaagcgctacatctcactgctgccagtaattccagtcacactacgactcaacccccgtgaggccctggaaggccgacacccccaggatggacggtccgcgtggcccccaccaggtcccatcccagccgggcactgggaggcgggacccaaaggacccggtggggtccaagcgcatggtgacgtcaccctgtacaaagttgccgccctgggactcgccacaggtatcgtgctcgtgctgctgctgctgtgcttatatcgagtgctatgtccacggaactatggtcaactgggaggcgggcccggtcggaggagaagaggggagctgccatgcgatgattacggctacgcacctcctgaaaccgaaatagtgccactggtcctgcgtggccacctgatggacatcgagtgcttggcctcagacgggatgctgctcgtgagttgttgcctcgcgggccacgtgtgcgtttgggatgcacaaactggagattgcctgactaggatccctagaccaggtcaaagaagagattcaggcgttggctctggattagaagcccaggaatcatgggaacggctcagcgacggtgggaaagcaggaccggaggaacctggggacagcccccccttgcggcatcgcccccgcggacccccacctcctagcttgttcggcgatcagcctgacctgacctgcctgatcgacacaaacttttctgcccagcccagaagttcacagccaacccagcctgaaccacggcatcgagcggtgtgtggacgctcaagggactcccctggctacgacttctcatgcttggttcaacgagtctatcaggaggaaggactggctgcagtttgtacaccagcccttcggccaccgtcccctggcccggtgctgtcccaggctcctgaagacgagggcgggtcccccgaaaagggcagtccttccctggcctgggctccttcagctgagggatccatctggagcttagagctccagggaaatctgatcgtcgtcgggcgctcgagcgggagactggaggtgtgggatgccatcgaaggtgtgctgtgctgcagctcggaggaggtcagtagcgggatcaccgctttagtgttccttgacaagaggatcgttgccgccaggctgaacgggtccctggacttttttagccttgagacgcatactgccctgtctcctttgcagttcagggggacaccaggacgtggttcgtcaccagcgtcacctgtgtattcctctagtgacaccgtggcctgccacttgacccacactgtgccatgcgcccaccagaagcccatcaccgcgctcaaggctgccgcgggcaggctggtaacaggctcccaggaccacaccttgcgcgtgtttaggctcgaggatagttgttgtctctttacactacaagggcactccggggccatcacgacagtttacattgatcagacaatggtgctcgcctccggaggacaggatggagccatctgtctgtgggatgtgctaacaggaagtagagtttctcacgtttttgcacaccgcggtgacgtgacaagcctgacttgcacaacctcttgtgtgatttcctctggtctggacgacctaatttcaatctgggacaggagcaccggcataaagttttacagcatccagcaagatctggggtgcggggcaagtctcggggtgatctccgataacctactggtaactggcggtcaggggtgcgtatccttttgggatcttaactatggagatctcctgcagaccgtgtatctgggcaaaaatagcgaggcacagccagcaagacagattctcgtcctggacaacgctgctatcgtgtgtaattttgggtctgagctcagtctggtgtatgtgccctcggtgcttgagaaattggattag

SEQ ID NO: 279380 - DNA, 1059 bp, Artificial Sequence
  derived and/or modified sequence
atggtgaagagcaagtggggcctggccctggccgctgtggtgacagtgctgagcagcctgctgatgtctgtgggcctgtgcaccctgtttggcctgacccccaccctgaatggaggagagatcttcccctacctggtggtggtgattggcctggagaatgtgctggtgctgaccaagtctgtggtgtccacccctgtggacctggaggtgaagctgcgcatcgcccagggcctgagcagcgagagctggagcatcatgaagaacatggccacagagctgggcatcatcctgattggctacttcaccctggtgcctgccatccaggagttctgcctgtttgctgtggtgggcctggtgtctgacttcttcctgcagatgctgttcttcaccaccgtgctgagcattgacatccggaggatggagctggccgacctgaacaagaggctgcccccagaggcctgcctgcccagcgccaagcctgtgggccagcccaccaggtatgagcggcagctggccgtgcggcccagcaccccccacaccatcaccctgcagcccagcagcttcaggaacctgcggctgcccaagaggctgcgggtggtgtacttcctggcccccaccggggcccacacctgctgggccctgggcagcaggacccagggcccccgctggggcgccggcccctggaggagacatgctgtgcagggcggcggggccggccctggccaccgccaccggctgggcgctgctgctgccctgcccctgccccgggccatgcctgcccagctgcgggctgctggctggtgggcccgggctgctgaggcccggggagctgccctgcggcggctgcggctgtgtgccaccagagatggagacagagctgcctgtgccgcccggccccctcatggccaccgggtgcccggccagaggagacatgctgctggggagctgctgcccggccggccccggctgcgggtgggccgggctgaccggggcctgcccaatgcccacagcgccccccggcaggccgcccctggccagtggaggggccagagggcctag

SEQ ID NO: 279381 - DNA, 3072 bp, Artificial Sequence
  derived and/or modified sequence
atgctgctgcaccccagccccaactgcagcctgcgggcagagagcctggtgcacgtgcacttcaaggaggagattggagtggccgagctgatccccctggtgaccacctacatcatcctgtttgcctacatctacttcagcaccaggaagattgacatggtgaagagcaagtggggcctggccctggccgctgtggtgacagtgctgagcagcctgctgatgtctgtgggcctgtgcaccctgtttggcctgacccccaccctgaatggaggagagatcttcccctacctggtggtggtgattggcctggagaatgtgctggtgctgaccaagtctgtggtgtccacccctgtggacctggaggtgaagctgcgcatcgcccagggcctgagcagcgagagctggagcatcatgaagaacatggccacagagctgggcatcatcctgattggctacttcaccctggtgcctgccatccaggagttctgcctgtttgctgtggtgggcctggtgtctgacttcttcctgcagatgctgttcttcaccaccgtgctgagcattgacatccggaggatggagctggccgacctgaacaagaggctgcccccagaggcctgcctgcccagcgccaagcctgtgggccagcccaccaggtatgagcggcagctggccgtgcggcccagcaccccccacaccatcaccctgcagcccagcagcttcaggaacctgcggctgcccaagaggctgcgggtggtgtacttcctggcccggacccggctggcccagaggctcatcatggccggcaccgtggtgtggattggcatcctggtgtacacagatcctgctggcctgaggaactacctggccgcccaggtgacagagcagagccccctgggggagggcgccctggcccccatgcctgtgcccagcggcatgctgccccccagccacccagaccctgccttcagcatcttccccccagatgcccccaagctgcctgagaaccagaccagccctggagagagccctgagcggggcggccctgctgaggtggtgcatgacagccctgtgcctgaggtgacctggggcccagaagatgaggagctgtggaggaagctgtccttccgccactggcccaccctcttctcctactacaacatcaccctggccaagcgctacatcagcctgctgcccgtcatccctgtgaccctgcggctgaacccccgggaggccctggagggccgccacccccaggacggccgcagcgcctggcccccacctggccccatcccagctggccactgggaggccggccccaagggccctgggggcgtgcaggcccatggagatgtgaccctgtacaaggtggccgccctgggcctggccactggaattgtgctggtgctgctgctgctgtgcctgtacagagtgctgtgccccagaaattatggccagctgggcggcggccctggaagaagaagaagaggagagctgccctgtgatgattatggctacgcccctcctgagacagagatcgtgcccctggtgctgcggggccacctgatggacattgaatgtctggccagtgatggcatgctgctggtgtcctgctgcctggccggccacgtgtgtgtgtgggatgcccagacaggagactgcctgacccgcatcccccggcccggccagaggcgggacagcggcgtgggcagcggcctggaggcccaggagagctgggagcggctgagtgatggcggcaaggccggccctgaggagcccggggacagcccccccctgcggcaccggccccggggccccccaccacccagcctgtttggagaccagcctgacctgacctgcctgattgacaccaacttcagcgcccagcccaggagcagccagcccacccagcctgagcccaggcacagagctgtgtgtggccgcagccgggacagccctggctatgacttcagctgcctggtgcagagggtgtaccaggaggagggcctggccgctgtgtgcaccccagccctgcggccccccagccctggccctgtgctgagccaggccccagaagatgagggcggcagccctgagaagggcagccccagcctggcctgggcccccagcgctgagggcagcatctggagcctggagctgcagggcaacctgattgtggtgggccgcagcagcggccgcctggaggtgtgggatgccattgaaggagtgctgtgctgcagcagcgaggaggtgagcagcggcatcacagccctggtgttcctggacaagagaattgtggccgcccggctgaatggcagcctggacttcttcagcctggagacccacacagccctgagccccctgcagttccggggcaccccaggccggggcagcagccctgccagccctgtgtacagcagcagtgacacagtggcctgccacctgacccacacagtgccctgtgcccaccagaagcccatcacagccctgaaggctgctgctggccgcctggtgacaggcagccaggaccacaccctgcgggtcttccggctggaggacagctgctgcctcttcaccctgcagggccacagcggggccatcaccaccgtgtacatcgaccagaccatggtgctggccagcggcggccaggatggagccatctgcctgtgggatgtgctgaccggcagccgggtgagccacgtgtttgcccacagaggagatgtgaccagcctgacctgcaccaccagctgtgtgatcagcagcggcctggatgacctgatcagcatctgggacaggagcacaggcatcaagttctacagcatccagcaggacctgggctgtggggccagcctgggcgtcatcagtgacaacctgctggtgactggaggccagggctgtgtgtccttctgggacctgaactatggagacctgctgcagacagtgtacctgggcaagaacagcgaggcccagcctgcccggcagatcctggtgctggacaatgctgccatcgtgtgcaactttggcagcgagctgagcctggtgtatgtgcccagcgtgctggagaagctggactag

SEQ ID NO: 279382 - DNA, 1059 bp, Artificial Sequence
  derived and/or modified sequence
atggtgaagagcaagtggggcctggccctggccgccgtggtgaccgttttatcttccctcttaatgtcagtgggattgtgcactctgttcggactcaccccaactctgaacggcggggagatctttccctatctagtcgtagttattggactggaaaatgtgcttgtactcacgaagtccgttgtctctacccctgtggacctagaagtcaaactgagaattgcgcagggattgtctagtgagtcctggtcaatcatgaaaaatatggccaccgaactcggcattatcctcatcggctacttcaccctggtgccggccatccaggagttttgtctctttgctgtcgtggggttggtgtccgacttctttctgcagatgctttttttcactaccgtgctgtctatagatatccgtcggatggaactcgctgacctgaacaagcgactgccccccgaggcgtgtctgccttcagcgaagccagtcggtcaaccgacacgatatgagcggcagctagcagtcaggccctctaccccccacaccatcacgctgcagccaagcagctttcggaatttgcgcctacctaagagactacgcgtcgtgtactttcttgcccctactggcgctcacacctgctgggccttagggtccaggactcagggaccgcgatggggagctggaccttggcgacgtcatgcagtacagggcggtggagcaggtcctggacaccgacatcggctgggagccgccgccgcgctccccctcccacgcgccatgcctgctcagctcagagccgcaggctggtgggctcgcgctgcagaagcgaggggcgcagcactccggaggcttagactttgtgctacacgagatggagaccgcgcggcttgtgctgcgagaccaccccacggtcaccgggttccgggccagcggcgccacgccgccggtgagctcctgccgggaaggccaagacttagggtgggtcgggccgatcgggggctgccaaacgcacattccgcaccccgacaggcagcacccggacaatggcgggggcagagagcctag

SEQ ID NO: 279383 - DNA, 3072 bp, Artificial Sequence
  derived and/or modified sequence
atgctgctgcaccccagccccaactgcagcctgcgggccgagagcctagtgcatgtgcatttcaaggaggaaattggggtggccgaacttatccccctcgttactacctatattatcctgtttgcatatatatactttagcacccggaagatcgatatggtgaaaagcaagtgggggcttgctttagccgccgtggtgacagtactgagctcactactgatgtctgtggggctgtgcactttattcggactgactcctaccctgaatggaggtgagatttttccataccttgtcgtggtgatcggactggaaaacgtgctggtcctaaccaagagtgtggtctccactcccgtggacctcgaggtgaagttacgcatcgcccaggggctgagttctgaatcttggtctattatgaaaaatatggcaaccgagttgggtatcatccttattggctactttacactagtccctgcgatccaggagttctgcttatttgccgtggttggtctggtaagtgatttttttttgcagatgttgtttttcacaacggtgctctccattgatattcggcgcatggaactcgccgaccttaacaaacgcctgccacccgaagcgtgtctgcctagcgctaagcctgtagggcagcctactaggtacgagaggcaactggcggttcggcccagtactcctcataccatcaccctgcagccttcaagttttagaaatttacgcttgcccaagcgactaagagtggtgtactttttggctcgcacccgcctggcacagcgacttatcatggctggcaccgtggtctggatagggatactcgtgtatacagaccctgcaggactgcgcaactatctggcagcccaggtaacagaacagagccctctaggggagggagctttggcacccatgccagtgccaagtggaatgctacctccgagtcaccccgaccctgccttctcaatattcccccctgacgccccaaagctgcccgagaatcagacctcgccgggcgagtcccccgagcgtggcgggcccgcagaagtcgtgcatgacagccctgtgcccgaggtcacatggggccctgaggatgaggaactatggcgcaagctcagctttcggcactggcctaccctgttctcctactataatatcactctggccaaacgctatatcagcctgttgcctgtaattccagtcactctccggctcaaccccagggaggctctggaaggtcgccacccccaagacggtcgcagtgcctggcccccacccgggccaattcccgctgggcactgggaagcgggaccaaaggggccaggcggagttcaggcccacggggacgtgaccctctacaaagtggctgccttggggctcgccacaggaatcgtgcttgtgctgctcctgctgtgtctataccgagtgctgtgcccccgcaattacggtcagctcgggggcggacctggaagaagacgccggggagaactgccatgcgacgactatggatacgcccctccagaaactgagatcgtgcctctggtcctacgtgggcacttaatggatatcgaatgtctggcctccgatggaatgttgctggtcagctgttgtcttgctggtcatgtctgcgtttgggatgcccagacaggggattgcctgactcgaatcccacgtcccggacaacgtcgagattctggcgtgggctcgggcctcgaggcacaggaaagctgggagcggttgagcgatggcggtaaagccggacctgaagagcccggtgactccccccccctcaggcaccggcctaggggccccccccctcctagtctttttggggaccagcctgatctcacatgccttatcgatacgaacttctcagctcaacccagatcatcccaaccaacccagccggagccccgacatcgcgccgtatgcggacgaagccgcgattcccctggttacgacttctcatgtctcgtgcagcgagtctatcaggaagagggtctcgccgctgtgtgtacgcccgccctgaggcccccatcacctggacccgttctctcgcaagctcctgaggatgaagggggctcccccgagaaagggtctccatctctcgcatgggctccatcagccgaggggagcatctggagccttgaactgcagggtaacttgatcgttgtcggtcgttcttctggccggcttgaagtctgggacgccattgaaggagtgttatgctgttcttcagaagaagtgtctagtggaataactgccttggtcttcctggacaaacggattgtggccgcccgccttaacggatccctagacttctttagcctggaaacccataccgctctctccccgctgcaattccgggggacacccgggaggggatctagtcccgccagcccggtgtactcatccagcgatactgttgcatgccacctgacccatactgtgccatgcgcgcaccagaagcctatcactgctctcaaagcagctgctggccggctggtgaccgggtcacaggaccacaccttaagagtctttcgcctggaggactcgtgctgcctgtttactctccaggggcatagcggagctatcacgaccgtttatatcgatcaaaccatggtcctggcctctgggggtcaggatggggccatctgtctctgggatgtgctgactggctccagagtctcgcatgtgttcgcacataggggggatgtcacgtccttgacatgcacaaccagctgtgtgatcagtagcggtctggacgaccttattagcatttgggataggagtacgggcatcaaattttatagtatccagcaggatctaggttgtggcgcaagtcttggggttatttccgataatttactggtgaccgggggacagggatgtgtgtcattctgggacctgaactatggagacctgctgcagaccgtgtatctcggaaaaaattctgaagctcagcccgcaagacagatcctggtgctcgacaatgccgcaatcgtgtgcaatttcggatcggagctttctctcgtgtacgtacccagtgtgctggagaaactcgactag

SEQ ID NO: 279384 - DNA, 1059 bp, Artificial Sequence
  derived and/or modified sequence
atggtcaaatctaagtggggccttgctttggccgcagtcgtgaccgtgctttcgagcttgctgatgagtgtagggctctgcacattgtttggccttacccctaccctgaacgggggagagattttcccgtacctcgtggtggtgattggccttgagaatgttctggttttaacaaaaagcgtggtgagtacccctgtggatctggaggtgaaactgcggatcgctcagggcctgtcttccgagtcctggagtattatgaagaacatggcgactgagcttggaattattctgattggctattttaccctggttcccgctatacaggagttttgtcttttcgccgtggtcggactggtgagtgacttcttcctgcagatgctattcttcaccacggtcttgtctatcgacatccggagaatggagttagccgaccttaataagcggctgcctcccgaggcgtgcttgccctctgcaaaacctgtcgggcagcctacaagatatgaacgccagttggccgtgcggccatcgactccacacacgatcacattgcaacctagtagctttaggaaccttcgccttcccaagcggcttcgggtcgtgtattttctagcccctacaggagcgcacacctgttgggccttgggatccagaacgcaaggcccaagatggggagccggaccttggcggcgacatgccgtgcaggggggtggggctggacccggacacaggcaccggcttggggctgccgcagcactgccattaccaagagctatgcctgctcagcttagggccgcagggtggtgggccagggctgcggaagccaggggggctgcgttaaggcgtctgagattgtgcgctactcgcgacggtgaccgcgcagcctgtgccgctcgtccgcctcacggtcaccgagtcccgggacagagaaggcacgctgccggtgaactccttcctggtagacctagacttagagttggcagagctgacaggggtctgccaaatgcccactcagccccaaggcaagcggcaccagggcagtggaggggacaacgtgcatag

SEQ ID NO: 279385 - DNA, 3072 bp, Artificial Sequence
  derived and/or modified sequence
atgctgctgcacccctcccccaattgcagtctgagagccgagtcgctggtgcacgtccactttaaggaggaaattggcgtagccgagctcatccccttggttactacttacattattctgttcgcttatatctacttctctaccagaaaaatcgatatggtaaagtccaaatggggcctggcgttggcagccgtggtgacagtgttatctagccttctgatgtccgtaggtctgtgcaccctattcggactcacacccaccttgaatgggggtgaaatcttcccatacctagtagttgtcatcgggttggagaacgtgcttgtcctcacaaaaagcgtggttagcactccagtagatctggaggtcaaattacgcattgcccagggcttaagcagcgagtcgtggtcaatcatgaagaatatggccacagaattagggataatactgatcggttatttcactctggttccggctatccaggagttttgcctgtttgccgttgtcggtctggtctccgatttctttttgcaaatgcttttttttaccacggttctgtctattgacattaggagaatggaacttgccgacctcaacaagcggctgcctccagaagcatgccttccttccgcaaaaccagtggggcaacctactcgttacgaaagacaattagctgtgcgcccaagcacgccccatacaatcaccctgcaacccagcagcttccggaacctgcgtttaccaaagcgattacgagtggtgtatttcctggcacggacaagactggcccagcgcttgattatggccggtaccgtcgtgtggatcggtatcctcgtctacaccgatccagccggactgcggaattaccttgcagcccaggtcacggagcagagtccacttggcgagggcgcactggctcccatgccagtgcctagtggaatgctgcccccttcccatccagaccccgctttttcaattttccctcctgacgcacctaagctgcctgagaaccagactagccctggggagagtccagagcggggaggacccgcagaggtggttcacgacagcccagttcccgaggtgacgtgggggcctgaagacgaggaactttggagaaaacttagctttaggcactggccaacactgttctcctactataatatcaccctggccaagcgctacatctccctgttacccgtaataccagtcacgcttcgtttgaaccctcgcgaggcactggaggggaggcacccacaggatggtcgcagcgcctggcctcctcccggaccaatacctgccggtcactgggaagccggtcctaaaggaccagggggagtgcaggcgcacggtgatgttacactgtataaagtcgcagctctcggcctggctactgggattgtgctagttctgctcctcttgtgcctatatcgagtcctttgtcctcgtaactacgggcaattaggaggcggacctggcagacgccgacgaggggagttgccttgtgacgactacggttacgctccaccagaaactgaaattgtgccactcgtgttgcgtggccacttaatggatatcgaatgcttagcttccgacggaatgctgctcgtctcgtgctgtctagccggtcacgtctgcgtctgggatgcacaaactggggactgtctcaccagaattccacggccaggccagcgcagagacagcggggtgggatctgggctcgaggctcaggagagctgggaacggctctcagatggcggaaaggcaggtccagaagaacccggagacagtcctccactgcgacaccggccacggggacccccacctccctctctcttcggtgatcaacccgatctcacttgtctgattgatacaaatttcagtgcacagccccgatcctctcagccgacccaacctgaaccccgtcatagagctgtctgcggaagatcgcgtgactcccctggttatgatttttcttgcctcgtacaaagagtgtatcaggaagagggtttggctgccgtttgcacgcccgcactccgacctccctccccaggaccagtgctctcgcaggccccagaggatgaaggtggttcacccgaaaagggcagcccttcactcgcctgggctcccagtgctgagggaagtatttggtccctggaactgcagggaaatctgatagtggtgggtcgctctagcggccgtctggaagtgtgggacgcaattgagggagtactgtgctgtagcagcgaggaggtgtccagcgggattacagcactggtgtttttagataaacggatcgtagctgcaaggctgaacggatcgcttgatttcttcagcttggagacccacacagccctctctccgcttcaattcagaggcactcctggtcgcggttcttctcccgcatccccagtgtacagtagcagcgatacggttgcatgtcaccttactcacacagtgccatgtgcccatcagaaaccgattacagcccttaaggctgcagcagggaggctggttaccggttcccaggaccataccctgcgtgttttccgactagaagatagctgttgtctcttcaccctgcagggccactccggagccattactaccgtctacattgatcagaccatggttttggcctctggcggacaggatggagcaatatgtctatgggacgttcttacaggttcacgggtgtcacatgttttcgcccaccgtggggacgtgacttctcttacttgtactacgtcatgtgtaatatcaagtggtctagacgatttgattagtatttgggaccgaagcacaggaataaagttttattcaatccaacaggatctcggctgcggagctagccttggagtgatctccgataatctgctggtgacaggcggacaaggctgcgtcagcttctgggatttgaactatggggatctgctgcagacagtgtatttgggtaagaattccgaggcccagcctgccaggcagattttggtgctcgataatgcagctattgtttgcaactttggatcagaactctcgctcgtatacgtcccttcagttctcgagaagctcgactag

SEQ ID NO: 279386 - DNA, 3422 bp, Artificial Sequence
  derived and/or modified sequence
acccggcggccaggagagagagggagggcgccacgcaccggactgcgggccgagagcgcgcacgccgcgctccgcccctgctgccgcccccgtcgccgccgccgccgccgccgcagcttgggaggtgctgccaccacaggtacctgcacatgttgttctttgtcagtgctgtcaagtgtgtgccagggtgatccatggtcactttccgggatggcagcaaggtgacttcggctgaggatgaccctgactgaaaggctgcgtgagaagatatctcgggccttctacaaccatgggctcctctgtgcatcctatcccatccccatcatcctcttcacagggttctgcatcttagcctgctgctacccactgctgaaactccccttgccaggaacaggacctgtggaattcaccacccctgtgaaggattactcgcccccacctgtggactctgaccgcaaacaaggagagcctactgagcagcctgagtggcgagattttcccctaccttgtggtggttattgggttagagaatgtgttggtgctcaccaagtctgtggtctcaaccccggtagacctggaggtgaagctgcggatcgcccaaggcctaagcagcgagagctggtccatcatgaagaacatggccacggagctgggcatcatcctcatcggctacttcaccctagtgcccgccatccaggagttctgtctctttgctgtcgtggggctggtgtctgacttcttccttcagatgctgtttttcaccactgtcctgtccattgacattcgccggatggagctagcagacctgaacaagcgactgccccctgaggcctgcctgccctcagccaagccagtgggacagccaacgcgctacgagcggcagctggctgtgaggccgtccacaccccacaccatcacgttgcagccgtcttccttccgaaacctgcggctccccaagaggctgcgtgttgtctacttcctggcccgcacccgcctggcacagcgcctcatcatggctggcaccgttgtctggattggcatcctggtatacacagacccagcagggctgcgcaactacctcgctgcccaggtgacggaacagagcccattgggtgagggagccctggctcccatgcccgtgcctagtggcatgctgccccccagccacccggaccctgccttctccatcttcccacctgatgcccctaagctacctgagaaccagacgtcgccaggcgagtcacctgagcgtggaggtccagcagaggttgtccatgacagcccagtcccagaggtaacctgggggcctgaggatgaggaactttggaggaaattgtccttccgccactggccgacgctcttcagctattacaacatcacactggccaagaggtacatcagcctgctgcccgtcatcccagtcacgctccgcctgaacccgagggaggctctggagggccggcaccctcaggacggccgcagtgcctggcccccaccggggcccatacctgctgggcactgggaagcaggacccaagggcccaggtggggtgcaggcccatggagacgtcacgctgtacaaggtggcggcgctgggcctggccaccggcatcgtcttggtgctgctgctgctctgcctctaccgcgtgctatgcccgcgcaactacgggcagctgggtggtgggcccgggcggcggaggcgcggggagctgccctgcgacgactacggctatgcgccacccgagacggagatcgtgccgcttgtgctgcgcggccacctcatggacatcgagtgcctggccagcgacggcatgctgctggtgagctgctgcctggcaggccacgtctgcgtgtgggacgcgcagaccggggattgcctaacgcgcattccgcgcccagggcagcgccgggacagtggcgtgggcagcgggcttgaggctcaggagagctgggaacgactttcagatggtgggaaggctggtccagaggagcctggggacagccctcccctgagacaccgcccccggggccctccgccgccttccctcttcggggaccagcctgacctcacctgcttaattgacaccaacttttcagcgcagcctcggtcctcacagcccactcagcccgagccccggcaccgggcggtctgtggccgctctcgggactccccaggctatgacttcagctgcctggtgcagcgggtgtaccaggaggaggggctggcggccgtctgcacaccagccctgcgcccaccctcgcctgggccggtgctgtcccaggcccctgaggacgagggtggctcccccgagaaaggctccccttccctcgcctgggcccccagtgccgagggttccatctggagcttggagctgcagggcaacctcatcgtggtggggcggagcagcggccggctggaggtgtgggacgccattgaaggggtgctgtgctgcagcagcgaggaggtctcctcaggcattaccgctctggtgttcttggacaaaaggattgtggctgcacggctcaacggttcccttgatttcttctccttggagacccacactgccctcagccccctgcagtttagagggaccccagggcggggcagttcccctgcctctccagtgtacagcagcagcgacacagtggcctgtcacctgacccacacagtgccctgtgcacaccaaaaacccatcacagccctgaaagccgctgctgggcgcttggtgactgggagccaagaccacacactgagagtgttccgtctggaggactcgtgctgcctcttcacccttcagggccactcaggggccatcacgaccgtgtacattgaccagaccatggtgctggccagtggaggacaagatggggccatctgcctgtgggatgtactgactggcagccgggtcagccatgtgtttgctcaccgtggggatgtcacctcccttacctgtaccacctcctgtgtcatcagcagtggcctggatgacctcatcagcatctgggaccgcagcacaggcatcaagttctactccattcagcaggacctgggctgtggtgcaagcttgggtgtcatctcagacaacctgctggtgactggcggccagggctgtgtctccttttgggacctaaactacggggacctgttacagacagtctacctggggaagaacagtgaggcccagcctgcccgccagatcctggtgctggacaacgctgccattgtctgcaactttggcagtgagctcagcctggtgtatgtgccctctgtgctggagaagctggactgagcgcagggcctccttgcccaggcaggaggctggggtgctgtgtgggggccaatgcactgaacctggacttgggggaaagagccgagtatcttccagccgctgcctcctgactgtaataatattaaactttttt

SEQ ID NO: 279387 - DNA, 2718 bp, Artificial Sequence
  derived and/or modified sequence
atgaccctgaccgagagactgagagagaagatcagcagagccttctacaaccacggcctgctgtgcgccagctaccccatccccatcatcctgatcggctacttcaccctggtgcccgccatccaggagttctgcctgttcgccgtggtgggcctggtgagcgacttcttcctgcagatgctgttcttcaccaccgtgctgagcatcgacatcagaagaatggagctggccgacctgaacaagagactgccccccgaggcctgcctgcccagcgccaagcccgtgggccagcccaccagatacgagagacagctggccgtgagacccagcaccccccacaccatcaccctgcagcccagcagcttcagaaacctgagactgcccaagagactgagagtggtgtacttcctggccagaaccagactggcccagagactgatcatggccggcaccgtggtgtggatcggcatcctggtgtacaccgaccccgccggcctgagaaactacctggccgcccaggtgaccgagcagagccccctgggcgagggcgccctggcccccatgcccgtgcccagcggcatgctgccccccagccaccccgaccccgccttcagcatcttcccccccgacgcccccaagctgcccgagaaccagaccagccccggcgagagccccgagagaggcggccccgccgaggtggtgcacgacagccccgtgcccgaggtgacctggggccccgaggacgaggagctgtggagaaagctgagcttcagacactggcccaccctgttcagctactacaacatcaccctggccaagagatacatcagcctgctgcccgtgatccccgtgaccctgagactgaaccccagagaggccctggagggcagacacccccaggacggcagaagcgcctggcccccccccggccccatccccgccggccactgggaggccggccccaagggccccggcggcgtgcaggcccacggcgacgtgaccctgtacaaggtggccgccctgggcctggccaccggcatcgtgctggtgctgctgctgctgtgcctgtacagagtgctgtgccccagaaactacggccagctgggcggcggccccggcagaagaagaagaggcgagctgccctgcgacgactacggctacgccccccccgagaccgagatcgtgcccctggtgctgagaggccacctgatggacatcgagtgcctggccagcgacggcatgctgctggtgagctgctgcctggccggccacgtgtgcgtgtgggacgcccagaccggcgactgcctgaccagaatccccagacccggccagagaagagacagcggcgtgggcagcggcctggaggcccaggagagctgggagagactgagcgacggcggcaaggccggccccgaggagcccggcgacagcccccccctgagacacagacccagaggcccccccccccccagcctgttcggcgaccagcccgacctgacctgcctgatcgacaccaacttcagcgcccagcccagaagcagccagcccacccagcccgagcccagacacagagccgtgtgcggcagaagcagagacagccccggctacgacttcagctgcctggtgcagagagtgtaccaggaggagggcctggccgccgtgtgcacccccgccctgagaccccccagccccggccccgtgctgagccaggcccccgaggacgagggcggcagccccgagaagggcagccccagcctggcctgggcccccagcgccgagggcagcatctggagcctggagctgcagggcaacctgatcgtggtgggcagaagcagcggcagactggaggtgtgggacgccatcgagggcgtgctgtgctgcagcagcgaggaggtgagcagcggcatcaccgccctggtgttcctggacaagagaatcgtggccgccagactgaacggcagcctggacttcttcagcctggagacccacaccgccctgagccccctgcagttcagaggcacccccggcagaggcagcagccccgccagccccgtgtacagcagcagcgacaccgtggcctgccacctgacccacaccgtgccctgcgcccaccagaagcccatcaccgccctgaaggccgccgccggcagactggtgaccggcagccaggaccacaccctgagagtgttcagactggaggacagctgctgcctgttcaccctgcagggccacagcggcgccatcaccaccgtgtacatcgaccagaccatggtgctggccagcggcggccaggacggcgccatctgcctgtgggacgtgctgaccggcagcagagtgagccacgtgttcgcccacagaggcgacgtgaccagcctgacctgcaccaccagctgcgtgatcagcagcggcctggacgacctgatcagcatctgggacagaagcaccggcatcaagttctacagcatccagcaggacctgggctgcggcgccagcctgggcgtgatcagcgacaacctgctggtgaccggcggccagggctgcgtgagcttctgggacctgaactacggcgacctgctgcagaccgtgtacctgggcaagaacagcgaggcccagcccgccagacagatcctggtgctggacaacgccgccatcgtgtgcaacttcggcagcgagctgagcctggtgtacgtgcccagcgtgctggagaagctggactag

SEQ ID NO: 279388 - DNA, 2661 bp, Artificial Sequence
  derived and/or modified sequence
atgaagaacatggccaccgagctgggcatcatcctgatcggctacttcaccctggtgcccgccatccaggagttctgcctgttcgccgtggtgggcctggtgagcgacttcttcctgcagatgctgttcttcaccaccgtgctgagcatcgacatcagaagaatggagctggccgacctgaacaagagactgccccccgaggcctgcctgcccagcgccaagcccgtgggccagcccaccagatacgagagacagctggccgtgagacccagcaccccccacaccatcaccctgcagcccagcagcttcagaaacctgagactgcccaagagactgagagtggtgtacttcctggccagaaccagactggcccagagactgatcatggccggcaccgtggtgtggatcggcatcctggtgtacaccgaccccgccggcctgagaaactacctggccgcccaggtgaccgagcagagccccctgggcgagggcgccctggcccccatgcccgtgcccagcggcatgctgccccccagccaccccgaccccgccttcagcatcttcccccccgacgcccccaagctgcccgagaaccagaccagccccggcgagagccccgagagaggcggccccgccgaggtggtgcacgacagccccgtgcccgaggtgacctggggccccgaggacgaggagctgtggagaaagctgagcttcagacactggcccaccctgttcagctactacaacatcaccctggccaagagatacatcagcctgctgcccgtgatccccgtgaccctgagactgaaccccagagaggccctggagggcagacacccccaggacggcagaagcgcctggcccccccccggccccatccccgccggccactgggaggccggccccaagggccccggcggcgtgcaggcccacggcgacgtgaccctgtacaaggtggccgccctgggcctggccaccggcatcgtgctggtgctgctgctgctgtgcctgtacagagtgctgtgccccagaaactacggccagctgggcggcggccccggcagaagaagaagaggcgagctgccctgcgacgactacggctacgccccccccgagaccgagatcgtgcccctggtgctgagaggccacctgatggacatcgagtgcctggccagcgacggcatgctgctggtgagctgctgcctggccggccacgtgtgcgtgtgggacgcccagaccggcgactgcctgaccagaatccccagacccggccagagaagagacagcggcgtgggcagcggcctggaggcccaggagagctgggagagactgagcgacggcggcaaggccggccccgaggagcccggcgacagcccccccctgagacacagacccagaggcccccccccccccagcctgttcggcgaccagcccgacctgacctgcctgatcgacaccaacttcagcgcccagcccagaagcagccagcccacccagcccgagcccagacacagagccgtgtgcggcagaagcagagacagccccggctacgacttcagctgcctggtgcagagagtgtaccaggaggagggcctggccgccgtgtgcacccccgccctgagaccccccagccccggccccgtgctgagccaggcccccgaggacgagggcggcagccccgagaagggcagccccagcctggcctgggcccccagcgccgagggcagcatctggagcctggagctgcagggcaacctgatcgtggtgggcagaagcagcggcagactggaggtgtgggacgccatcgagggcgtgctgtgctgcagcagcgaggaggtgagcagcggcatcaccgccctggtgttcctggacaagagaatcgtggccgccagactgaacggcagcctggacttcttcagcctggagacccacaccgccctgagccccctgcagttcagaggcacccccggcagaggcagcagccccgccagccccgtgtacagcagcagcgacaccgtggcctgccacctgacccacaccgtgccctgcgcccaccagaagcccatcaccgccctgaaggccgccgccggcagactggtgaccggcagccaggaccacaccctgagagtgttcagactggaggacagctgctgcctgttcaccctgcagggccacagcggcgccatcaccaccgtgtacatcgaccagaccatggtgctggccagcggcggccaggacggcgccatctgcctgtgggacgtgctgaccggcagcagagtgagccacgtgttcgcccacagaggcgacgtgaccagcctgacctgcaccaccagctgcgtgatcagcagcggcctggacgacctgatcagcatctgggacagaagcaccggcatcaagttctacagcatccagcaggacctgggctgcggcgccagcctgggcgtgatcagcgacaacctgctggtgaccggcggccagggctgcgtgagcttctgggacctgaactacggcgacctgctgcagaccgtgtacctgggcaagaacagcgaggcccagcccgccagacagatcctggtgctggacaacgccgccatcgtgtgcaacttcggcagcgagctgagcctggtgtacgtgcccagcgtgctggagaagctggactag

SEQ ID NO: 279389 - DNA, 2718 bp, Artificial Sequence
  derived and/or modified sequence
atgacactcaccgaaaggctgcgggagaaaattagccgtgctttctataaccacgggctcctgtgcgcgtcttacccgataccaattattctaattggatacttcacacttgtcccggcaatacaggaattctgcctgtttgcagtggtgggactggtttcagacttcttccttcagatgctattttttactacggtgctgtccatcgatatacgaagaatggaactcgctgaccttaacaagcggctcccacctgaagcttgcctaccctcagcgaagccagttgggcaacccacacggtacgagcgtcagctggcggtgcgtccgtctacgccacatacaattaccctgcaaccctctagcttccggaacctgagactgcctaaacggctgcgggtggtatacttcctcgcccgaactcgcctggcccagcgactcatcatggctggcacggttgtgtggattggaattctggtgtatacagatccggccgggttaaggaattatctcgcggcacaggtcacggagcagtcccctttgggtgagggcgcccttgcacccatgcccgtgccatccggcatgctgcctccgagccacccagatccggcattttctatttttccgcccgatgcgccaaaacttcccgaaaaccagacttcccccggtgaaagtccggagagaggtgggcctgctgaggtggttcacgacagtcccgtgcccgaagtgacatggggaccggaagatgaagagctttggaggaagctgtcatttaggcattggccaactctgttctcatattataacatcaccctggctaaaagatacattagcctcctgcccgtcattcctgtcaccctacggctcaaccctagagaggctctggagggccgacacccccaggacgggaggtccgcatggcctcctccaggccccatccctgccggccattgggaagctggaccaaaaggcccaggaggggtgcaagcccacggcgacgttactctgtataaggtcgctgcccttggactcgccactgggattgtcctggtcttgcttctcctctgcctgtatcgagtcctctgtcctaggaactacggccagctgggtggggggcccggacgtcgtcgccgtggtgaactgccctgcgacgactatggttatgctccccccgaaacagagatcgtaccactcgtacttcgaggccatctgatggacatagagtgccttgcatcagacggaatgctgctggtgtcttgttgtttggcggggcacgtttgtgtatgggatgcccagacaggcgactgcctgacgagaatcccaagacccgggcagcgcagggacagcggggtcggaagtggactggaagcgcaggagagctgggaacgtctgagtgatggcggtaaagcggggcccgaggagcccggagattccccacctctgcgccaccggccccgcggccctccccctcccagcttgtttggagatcaacccgacttgacttgcctgattgatactaatttttccgcacaaccacgatcttctcaacccacccagcccgagcctcgacaccgcgccgtgtgcggacggtcacgggacagccctgggtacgatttcagctgccttgtacagagagtgtaccaggaagagggcctggcagctgtgtgtaccccagctctccgccccccatctcccggtcccgtgctttcccaagcccctgaggacgaaggcggctcccccgagaaagggtctccttcgttggcgtgggcccccagtgctgaaggatccatttggagcctggaattgcagggtaatttgattgtggtcgggagatcttcgggacgccttgaggtgtgggatgctatcgaaggcgtgctgtgctgcagctccgaggaggtcagttctgggatcacagccctggtgtttctagataagcggatcgtagccgcacggcttaatggtagtctcgacttcttcagcttggaaacacatacggcactatcacccctccagttccgcggaacacctgggcgcggtagtagccccgcttcccctgtgtacagctcctctgacacagttgcctgccacctgacccatacagttccttgcgcacatcagaaaccaatcaccgccctgaaggctgccgcgggcagactcgtgactggctctcaggaccacacgctgcgcgtcttcaggctagaagatagttgctgcctctttacattgcagggtcacagcggggcaatcaccaccgtgtatatcgatcagaccatggtgctagcaagcggcggtcaggatggggccatttgcctgtgggacgtactgaccgggagtagagtgtcacatgtgttcgcccacagaggggatgtcactagcctcacctgcacgacatcgtgcgtgatctcctctggcctggatgaccttatctcgatctgggatcgctccacaggaattaagttttattccatccagcaggatctgggttgtggcgcctctcttggcgtgatctccgacaaccttttggtcaccggcgggcaggggtgtgtatcattttgggacttgaactacggcgacctgctgcaaactgtgtatcttgggaaaaatagcgaagcccagcctgcacggcagatcctcgttctggacaatgctgccatagtgtgcaatttcggatctgagctgtcccttgtctatgttcccagtgtactggagaaattggattag

SEQ ID NO: 279390 - DNA, 2661 bp, Artificial Sequence
  derived and/or modified sequence
atgaagaacatggccaccgaactcggaatcatcctgatcggatacttcacccttgtgcctgccatccaagagttctgcctgttcgctgtagttgggcttgtgtctgacttttttctacagatgctgttctttacgactgttctgtccattgatatccgacgcatggagcttgcagatctcaataagagactcccccccgaagcttgcctcccttccgccaagcccgttggacaaccgactcgctacgagcgccagctggccgtgcgtccaagtaccccacacactattacactccagcctagtagttttaggaatctgcgtctccccaagcgcttaagggtggtatacttcctggcccgcacgcggctcgcacagagattgattatggccggtaccgtggtttggatcggaatcttagtgtatacagatcctgccggcttgcgtaactacctcgccgctcaagtaacggagcagagccctttaggagaaggcgcactggctccaatgccagtaccatcaggtatgctgcccccttcacatcccgatcctgcgtttagcattttcccaccagatgcccccaaactacctgagaatcagacgagccctggcgagtcccctgaaaggggcggaccagcggaggtcgttcacgatagtccagtgccggaggtcacatggggccccgaggatgaagagctgtggcggaagctgtctttccgccactggcccactttatttagctactacaacataacactggccaagcgatatatttcgctgcttccagtgatccccgtcacattgcgattgaatcccagagaagccctggagggacgacacccccaggatggcagaagtgcatggccacctcctggcccaattcctgccgggcactgggaggccgggcccaaaggccccggcggagtgcaggcacacggcgacgtcacattatataaggtggctgcacttggcctcgctactggtattgtgctggtgctactgctgctgtgcctgtaccgcgtgctgtgcccacgcaattacggccaactcggggggggccccggccgacggagacggggggagttaccgtgcgacgactatgggtatgccccgcctgaaacagagatagttcctctggtgttgcggggacatctcatggacattgagtgcctggccagtgacggcatgcttctggtgagctgttgcttagcagggcacgtgtgtgtgtgggacgcacagaccggggattgtctgaccaggatcccaagaccggggcagaggcgcgatagcggtgtgggaagcggcttggaagcgcaggaatcttgggaacgactgtctgacgggggcaaagcaggccccgaggaacctggtgattcaccacccctccggcatcgccctagggggccacctccgccttctttatttggagaccagcctgacctcacgtgcctgatagatacaaacttctctgcccagccacggagctctcagcctacccagcccgaacccagacatcgcgcggtatgcgggagaagtagagatagcccgggttacgacttctcttgcttggtgcaaagagtgtaccaggaggagggactcgctgccgtgtgcacccctgctctgagaccaccttcacccgggcccgttctgagtcaggctcctgaggacgagggaggctctccagaaaagggctcacccagcctggcatgggctccatccgcagaaggatcgatttggtctctcgaactccaagggaatctaattgttgtggggagaagctcaggtcgccttgaggtgtgggacgctattgaaggagtcttatgctgttcctcagaggaggtgagctcaggaatcactgccctagtctttctagacaagaggatcgtcgcagctcggttgaacgggtcactcgacttcttctcgcttgagacccacactgcgctgagtcctctacagtttcgggggacgcccgggaggggtagctcacccgccagtccagtctattcctcaagcgacaccgtggcatgtcatctcacccacaccgttccatgtgcccaccagaagcccatcacggcgctgaaggccgccgcaggccggctggtaacaggatcacaggaccataccctgagagtgttccgactggaggatagttgttgtctcttcacactgcagggtcatagtggcgctatcacaactgtttacattgatcaaaccatggtactcgcctctggagggcaggacggcgccatctgtctctgggatgtcctcaccggctctagagtgagccacgtgttcgctcataggggagacgtgacctctctcacgtgcaccaccagctgcgttatttccagcggattggatgacctgatctccatctgggaccgatcaacaggcatcaagttttattctattcagcaagacctgggctgcggcgccagcctgggcgttatttctgacaacttgctggtgaccggcggccaaggatgcgtctcgttttgggatctgaattatggtgacttgttacagacagtgtatctgggcaaaaatagcgaagcccagccagctcggcaaattctggtcctcgataatgccgctatagtctgtaactttggatcggaactgtctctggtgtacgtgccttccgtgctcgaaaagcttgattag

SEQ ID NO: 279391 - DNA, 2718 bp, Artificial Sequence
  derived and/or modified sequence
atgaccctgacagagcggctgcgggagaagatcagccgggccttctacaaccacggcctgctgtgtgccagctaccccatccccatcatcctgattggctacttcaccctggtgcctgccatccaggagttctgcctgtttgctgtggtgggcctggtgtctgacttcttcctgcagatgctgttcttcaccaccgtgctgagcattgacatccggaggatggagctggccgacctgaacaagaggctgcccccagaggcctgcctgcccagcgccaagcctgtgggccagcccaccaggtatgagcggcagctggccgtgcggcccagcaccccccacaccatcaccctgcagcccagcagcttcaggaacctgcggctgcccaagaggctgcgggtggtgtacttcctggcccggacccggctggcccagaggctcatcatggccggcaccgtggtgtggattggcatcctggtgtacacagatcctgctggcctgaggaactacctggccgcccaggtgacagagcagagccccctgggggagggcgccctggcccccatgcctgtgcccagcggcatgctgccccccagccacccagaccctgccttcagcatcttccccccagatgcccccaagctgcctgagaaccagaccagccctggagagagccctgagcggggcggccctgctgaggtggtgcatgacagccctgtgcctgaggtgacctggggcccagaagatgaggagctgtggaggaagctgtccttccgccactggcccaccctcttctcctactacaacatcaccctggccaagcgctacatcagcctgctgcccgtcatccctgtgaccctgcggctgaacccccgggaggccctggagggccgccacccccaggacggccgcagcgcctggcccccacctggccccatcccagctggccactgggaggccggccccaagggccctgggggcgtgcaggcccatggagatgtgaccctgtacaaggtggccgccctgggcctggccactggaattgtgctggtgctgctgctgctgtgcctgtacagagtgctgtgccccagaaattatggccagctgggcggcggccctggaagaagaagaagaggagagctgccctgtgatgattatggctacgcccctcctgagacagagatcgtgcccctggtgctgcggggccacctgatggacattgaatgtctggccagtgatggcatgctgctggtgtcctgctgcctggccggccacgtgtgtgtgtgggatgcccagacaggagactgcctgacccgcatcccccggcccggccagaggcgggacagcggcgtgggcagcggcctggaggcccaggagagctgggagcggctgagtgatggcggcaaggccggccctgaggagcccggggacagcccccccctgcggcaccggccccggggccccccaccacccagcctgtttggagaccagcctgacctgacctgcctgattgacaccaacttcagcgcccagcccaggagcagccagcccacccagcctgagcccaggcacagagctgtgtgtggccgcagccgggacagccctggctatgacttcagctgcctggtgcagagggtgtaccaggaggagggcctggccgctgtgtgcaccccagccctgcggccccccagccctggccctgtgctgagccaggccccagaagatgagggcggcagccctgagaagggcagccccagcctggcctgggcccccagcgctgagggcagcatctggagcctggagctgcagggcaacctgattgtggtgggccgcagcagcggccgcctggaggtgtgggatgccattgaaggagtgctgtgctgcagcagcgaggaggtgagcagcggcatcacagccctggtgttcctggacaagagaattgtggccgcccggctgaatggcagcctggacttcttcagcctggagacccacacagccctgagccccctgcagttccggggcaccccaggccggggcagcagccctgccagccctgtgtacagcagcagtgacacagtggcctgccacctgacccacacagtgccctgtgcccaccagaagcccatcacagccctgaaggctgctgctggccgcctggtgacaggcagccaggaccacaccctgcgggtcttccggctggaggacagctgctgcctcttcaccctgcagggccacagcggggccatcaccaccgtgtacatcgaccagaccatggtgctggccagcggcggccaggatggagccatctgcctgtgggatgtgctgaccggcagccgggtgagccacgtgtttgcccacagaggagatgtgaccagcctgacctgcaccaccagctgtgtgatcagcagcggcctggatgacctgatcagcatctgggacaggagcacaggcatcaagttctacagcatccagcaggacctgggctgtggggccagcctgggcgtcatcagtgacaacctgctggtgactggaggccagggctgtgtgtccttctgggacctgaactatggagacctgctgcagacagtgtacctgggcaagaacagcgaggcccagcctgcccggcagatcctggtgctggacaatgctgccatcgtgtgcaactttggcagcgagctgagcctggtgtatgtgcccagcgtgctggagaagctggactag

SEQ ID NO: 279392 - DNA, 2661 bp, Artificial Sequence
  derived and/or modified sequence
atgaagaacatggccacagagctgggcatcatcctgattggctacttcaccctggtgcctgccatccaggagttctgcctgtttgctgtggtgggcctggtgtctgacttcttcctgcagatgctgttcttcaccaccgtgctgagcattgacatccggaggatggagctggccgacctgaacaagaggctgcccccagaggcctgcctgcccagcgccaagcctgtgggccagcccaccaggtatgaaaggcagctggccgtgcggcccagcaccccccacaccatcaccctgcagcccagcagcttcaggaacctgcggctgcccaagaggctgcgggtggtgtacttcctggcccggacccggctggcccagaggctcatcatggccggcaccgtggtgtggattggcatcctggtgtacacagatcctgctggcctgaggaactacctggccgcccaggtgacagagcagagccccctgggggagggcgccctggcccccatgcctgtgcccagcggcatgctgccccccagccacccagaccctgccttcagcatcttccccccagatgcccccaagctgcctgagaaccagaccagccctggagagagccctgagcggggcggccctgctgaggtggtgcatgacagccctgtgcctgaggtgacctggggcccagaagatgaggagctgtggaggaagctgtccttccgccactggcccaccctcttctcctactacaacatcaccctggccaagcgctacatcagcctgctgcctgtgattcctgtgaccctgcggctgaacccccgggaggccctggagggccgccacccccaggacggccgcagcgcctggcccccacctggccccatcccagctggccactgggaggccggccccaagggccctggaggagtgcaggcccatggagatgtgaccctgtacaaggtggccgccctgggcctggccaccggcatcgtgctggtgctgctgctgctgtgcctgtacagagtgctgtgccccaggaactacggccagctgggcggcggccctggaagaagaagaagaggagagctgccctgtgatgattatggctacgcccctcctgagacagaaattgtgcccctggtgctgcggggccacctgatggacatcgagtgcctggccagtgatggcatgctgctggtgtcctgctgcctggccggccacgtgtgtgtgtgggatgcccagacaggagactgcctgacccgcatccccaggcctggccagaggcgggacagcggcgtgggcagcggcctggaggcccaggagagctgggagcggctgagtgatggcggcaaggccggccctgaggagcccggggacagcccccccctgcggcaccggccccggggccccccaccacccagcctgtttggagaccagcctgacctgacctgcctgattgacaccaacttcagcgcccagcccaggagcagccagcccacccagcctgagcccaggcacagagctgtgtgtggccgcagccgggacagccctggctatgacttcagctgcctggtgcagagggtgtaccaggaggagggcctggccgctgtgtgcaccccagccctgcggccccccagccctggccctgtgctgagccaggccccagaagatgaaggaggcagccctgagaagggcagccccagcctggcctgggcccccagcgctgagggcagcatctggagcctggagctgcagggcaacctgattgtggtgggccgcagcagcggccgcctggaggtgtgggatgccatcgagggcgtgctgtgctgcagcagcgaggaggtgagcagcggcatcacagccctggtgttcctggacaagagaattgtggccgcccggctgaatggcagcctggacttcttcagcctggagacccacacagccctgagccccctgcagttccggggcaccccaggccggggcagcagccctgccagccctgtgtacagcagcagtgacacagtggcctgccacctgacccacacagtgccctgtgcccaccagaagcccatcacagccctgaaggctgctgctggccgcctggtgacaggcagccaggaccacaccctgcgggtcttccggctggaggacagctgctgcctcttcaccctgcagggccacagcggggccatcaccaccgtgtacatcgaccagaccatggtgctggccagcggcggccaggatggagccatctgcctgtgggatgtgctgaccggcagccgggtgagccacgtgtttgcccacagaggagatgtgaccagcctgacctgcaccaccagctgtgtgatcagcagcggcctggatgacctgatcagcatctgggacaggagcacaggcatcaagttctacagcatccagcaggacctgggctgtggggccagcctgggcgtcatcagtgacaacctgctggtgactggaggccagggctgtgtgtccttctgggacctgaactacggggacctgctgcagacagtgtacctgggcaagaacagcgaggcccagcctgcccggcagatcctggtgctggacaatgctgccatcgtgtgcaactttggaagtgagctgagcctggtgtatgtgcccagcgtgctggagaagctggactag

SEQ ID NO: 279393 - DNA, 2718 bp, Artificial Sequence
  derived and/or modified sequence
atgaccctgaccgagcggctgcgggagaagatcagccgggccttctataaccatgggctgttatgtgcctcttacccaatcccaattattctaattggctatttcaccctggttccagctattcaggaattctgcttgttcgctgtggttgggcttgtctctgacttttttctccaaatgctgttcttcacgactgttctgtcaatcgacatcagacggatggaacttgccgacctcaacaagcggcttccaccggaggcctgtttgccttctgcaaaacctgtcgggcagcctacacgttacgagcgccagcttgctgtccgtccctcaacgcctcacacgattacactgcagccttctagttttcgcaatctccgcttacctaaacggctgcgagtcgtttattttcttgctcgcaccagactagctcaacgactgatcatggctggcactgttgtctggattggtattctggtgtacacggatcctgcaggactccgaaattacttagcagctcaggttaccgaacaatcccctttgggagagggggctctggcaccaatgcccgtgcccagcgggatgctcccaccaagtcaccctgaccccgctttcagtattttccccccagacgcccctaagctgccagaaaatcaaacaagccctggcgaaagccccgaaagaggcggccccgctgaagtagtacacgactctcccgtcccagaggtgacgtggggaccagaggacgaagagctctggagaaagctcagtttcagacactggcctaccttgttttcctattacaatatcaccttggccaaacggtacataagcttgctccctgtgattcccgtaaccctacgtttaaacccccgggaggcactggagggcaggcatccccaggatggcagaagtgcttggccacctcctggtccgatccccgctggccactgggaggccggtcctaaaggtcccggaggagtgcaggcccacggcgacgttaccctgtataaggtagcagctctcgggctggctacaggaattgtgctggtgctgttacttctgtgtttatacagagtactgtgccctcgcaactatgggcagctgggcggaggacccgggagacgcagaagaggcgaactgccgtgcgacgactatggttacgctcctccggaaaccgagattgtcccactggtgttgagaggtcatctcatggacattgaatgtctcgccagcgatggtatgctgctagtgtcttgctgcctagccggacacgtctgcgtgtgggatgcgcagactggcgactgtctgactcgcataccaaggcctgggcagaggcgggacagcggcgttggcagtggcctggaggcccaggaaagttgggaacggttgtcagacggaggcaaggcggggccagaggagccaggggacagtccacctctgcgccaccgaccacgcgggcctcctcctccatccctcttcggtgatcaaccagacctaacatgcctgattgataccaatttttccgcccagccaaggagttcacagcctacacagcccgagccacgccacagagccgtgtgcggccgctccagagattccccaggctacgacttctcttgcctggtacagcgagtgtatcaggaagaggggctggctgctgtgtgtacacccgctctccgccctcccagccctgggccagtccttagccaagcccccgaggatgaaggtggaagccccgagaaaggtagcccctccctcgcgtgggccccctctgcagagggcagcatctggtcactggagctccaaggaaacctaatagtggttggcaggagctccggtaggctcgaagtgtgggacgctattgagggagtcctatgctgttccagtgaagaggtctctagtgggattacagccttagtcttcctcgataagcggatcgtcgccgcaaggctcaacggctccttagactttttttccttggagactcatactgccctgagcccattgcagttcagagggactccaggaagaggaagcagtcccgcaagccctgtgtactccagctctgacaccgtagcgtgccatctgactcacactgttccatgcgcgcaccaaaaacccatcacagctctgaaagctgccgctggccgactggtcaccggatctcaagaccacacattacgagttttcagattggaagacagttgttgcctttttacgttacagggccactctggcgccattaccactgtctatattgatcagaccatggtgctagcctctggaggtcaggacggcgcaatttgcctgtgggatgtcctgaccggctcgcgcgtgtcacacgtgttcgcgcacagaggcgacgtaaccagtttaacatgcaccacgtcttgcgtaatctcctccggactggacgacctgatatctatctgggacaggtcgactggcatcaagttctacagcatccagcaggacctcggctgcggagctagtctgggcgtcatttctgacaacctgctggttacaggcggtcaggggtgtgtgtcattttgggatctgaactacggggatctgctgcaaactgtctatctcggaaaaaactccgaagcccagcccgcaaggcagatcctagtcttagacaacgccgcaatcgtttgtaatttcggctctgagctgagtctggtatatgtgcctagcgttctggagaagcttgattag

SEQ ID NO: 279394 - DNA, 2661 bp, Artificial Sequence
  derived and/or modified sequence
atgaagaacatggccaccgagctgggcatcatcctgatcggctacttcacgctagtgcccgctatccaggagttctgcctgtttgctgtggttggcctggtcagcgacttttttcttcagatgctgttctttactacagtattatcgatcgacatcagacggatggaattagctgacctgaacaagcgcctgccacccgaagcctgtctaccatccgcaaaaccagttggccagcccaccaggtatgagcggcagctcgctgtgagaccgtccacaccccataccatcacactccagcctagtagcttcagaaatctgcgcctgccaaaacgactcagagttgtgtacttcctcgcccgtactagacttgctcagaggctaattatggctggcactgtggtgtggatagggatcctggtctacaccgaccctgcaggcctccgcaactacttggccgcacaagtgaccgaacaatccccacttggtgaaggggccctcgcccccatgccggtgccaagtggtatgttacccccatcccacccggacccggccttttctatttttccccccgacgcacctaagctacccgagaatcagacctcacccggcgagtccccagaaaggggaggcccggctgaagttgtgcacgattcccctgtgcctgaggtgacatgggggccagaggacgaggagctgtggaggaagctgagtttccggcattggcccaccttgttcagttactataacattacgctggctaagaggtacattagtctattgcccgtcatcccggtcacactaagactaaatcctcgtgaggccctggaaggtagacaccctcaagacggccggtccgcctggccccccccaggtccaatccccgcgggtcattgggaggcaggtccaaagggaccaggcggggtacaggctcacggggacgtcaccctctataaagtcgctgcactgggactggccacaggcatcgttctggtcctcctcctactgtgcttatatcgcgtcctgtgccctaggaattacggccagcttggtgggggccccggccggcgccgcagaggcgagttgccttgtgatgactatgggtacgcaccccctgaaacagagatcgtgcctctcgtgctgagaggtcatttgatggacatcgagtgtttagccagcgatggcatgctgctcgtgagttgttgcctggcggggcacgtgtgcgtctgggacgctcagaccggagattgcctgactaggattccccggccaggacaaaggagggatagcggcgttggcagcggactggaggcgcaggaatcttgggagaggctaagcgacggaggtaaagcaggaccggaagagccgggggacagcccgcctctgaggcacagaccaaggggacccccacctccctcgctatttggagaccaacccgacttgacctgtcttatcgacacgaatttttctgcacagccacgttcctcccagccgacacagcccgaaccccgacaccgagccgtttgtgggcgctcacgtgattccccaggttatgacttcagttgcttagtacaaagagtgtatcaggaggaggggctggcagccgtgtgcacgccagctctccgaccccccagcccagggcctgtgttatcacaggcgcccgaagacgaggggggctcgcctgagaagggcagtccgagtctcgcatgggccccctcagccgagggttccatctggtctctggagctccagggcaatctgatagtcgtgggtcgaagttctggccgcctagaggtatgggatgccatcgagggagtgctgtgttgtagcagtgaagaagtcagtagtggaatcacggccctggtgttcctggacaaaagaattgtggctgcaaggcttaatggatcattggacttcttcagtctggagactcatactgcactgagccctctccagttccgtggtacacccgggagaggtagttctcctgcttcccctgtctactcctcgtctgacactgtggcgtgccacttaacccacaccgttccctgcgcccaccagaagccgattaccgccctcaaagccgcagcaggaagactggtcacagggagccaggaccatacgctgcgcgtcttccggctggaggattcttgctgcttgttcactcttcaggggcactccggggccatcacaactgtctacatcgatcaaaccatggtacttgcgtcaggagggcaggatggagcaatttgcctgtgggatgtcctaaccggttcccgtgtgtcacacgtattcgctcaccgcggcgatgtcaccagtctgacgtgtaccaccagctgcgttattagtagtggcctcgatgacctgatttccatttgggacagatcaacaggcatcaaattttactcaatccagcaggacctaggctgcggagccagcttaggggttatctccgataaccttctagtgacaggggggcaagggtgtgtgtctttctgggatctaaactatggcgacctgttgcagaccgtttatctggggaagaatagtgaagcgcagcctgcgagacagattctggtgctcgataacgccgccatcgtgtgtaacttcggaagtgagctctccctagtgtacgtgccctccgtgctcgaaaaactggactag

SEQ ID NO: 279395 - DNA, 2718 bp, Artificial Sequence
  derived and/or modified sequence
atgacactcaccgagagattgagggagaagatatccagagcattttacaaccatggtctcttgtgtgcctcttaccccattcctataattttgatcggttacttcactttggttcccgctatccaggagttctgcctatttgctgtggtgggcctggtaagtgatttttttttgcagatgctcttttttaccaccgttctgtcgatagacattagacggatggagttggccgacctcaacaagagattacccccagaggcgtgtctcccttctgcaaaacctgtgggccagcccacgagatacgagcgccagctcgccgtgaggccctctacaccgcacacaatcaccctgcagcccagctcgtttcgtaatctgcgcctgcctaagcgtttacgcgtcgtgtacttccttgctagaacccggctggcgcaacgactgattatggccggaaccgtggtgtggataggaattctggtctataccgacccggcaggtcttcgcaactacttggctgcccaggtgactgaacagtctcctctcggcgaaggagctctcgcacccatgccggtcccaagtgggatgttaccaccatcacatccagaccctgcattcagcattttcccacctgatgcacctaagctcccagagaaccagaccagtccaggtgaaagtccagaaaggggagggccagcagaagtggtccatgactcccccgtgccggaagtgacctgggggccagaggacgaagagctgtggcggaaattatcctttaggcattggcccacacttttttcatactacaatatcaccttggcaaagcgttacatttctctgctcccagtcatacctgtaacgttgcgtttgaatcctcgagaagccctggaaggacgccacccccaggatggtcgatctgcatggccccctccaggacccatcccagctgggcattgggaagcgggacccaagggacctgggggtgtgcaggcgcatggtgatgtgactctgtacaaagtcgccgcactggggttggccaccggtatagtgttggtcctcttgttgctgtgtctctacagggtgctgtgtccacgcaattacggtcaacttggaggtggcccaggcagacgccgtcgaggtgaactgccgtgcgacgactacggctatgcgcctcctgagacggagatcgtgcctttggtgctgaggggccatctcatggatattgagtgtctggcgagcgacggcatgttgctggtgagctgctgtctggccggacatgtttgtgtctgggatgcgcaaaccggggactgcctaaccaggattcccagacccggacagcgcagagattccggcgtcgggagtggtcttgaggcgcaggagtcttgggaaagactctccgatggcggaaaggctggcccagaggagccaggcgactcgccacctctgagacatagacctaggggcccacctcctccaagcctgttcggagaccaacccgacctcacgtgtctgattgacactaatttttcggcacagccaagatcatcacagcctacccagcctgaacctcgtcaccgcgctgtttgcggacggagccgcgactcaccaggatatgacttttcctgcctggtccagcgagtgtatcaggaagaaggcctggcagcggtgtgtacacccgcattgcggccacctagtcctggtccagttctttcacaggcgccagaagatgagggagggagcccggaaaagggcagtcctagccttgcttgggcccctagcgcagaaggaagtatctggtccctggagcttcagggcaatttgatcgtggtgggtagatcatctgggaggctcgaagtgtgggacgctattgaaggcgtcctatgttgtagttcagaagaggtcagctcagggatcactgcgttggtattcctggacaaaagaatcgtcgccgctcgcttgaatgggtccctggatttttttagcctagagacccacacggcactttccccactccagttcaggggcaccccgggtcgtggaagttccccagcctcgcccgtttactccagcagcgataccgtggcctgccatctgacccatacagttccatgcgcccaccagaagcctatcactgcgcttaaagcagctgccggacgcctcgtgaccgggtcccaggaccacacgctgcgcgtatttaggctggaggacagctgctgcttgttcaccctgcagggtcacagtggcgctatcacaacggtctacatcgaccaaacaatggttttagcatcaggaggacaggatggagcgatttgtctgtgggatgtgttgacagggtcccgcgtctctcatgtctttgcgcaccgcggagatgtgactagtctcacctgcacaacctcatgcgttatcagcagcgggctggacgacttgatctctatttgggatcggagcactgggataaaattttactccattcaacaagacctgggctgtggggcttcactgggagtcattagtgataatctgctagttaccgggggacaaggttgcgtatctttctgggatctgaattatggggacctgctacaaacagtgtacctgggtaagaattccgaagcccagccggctagacagatccttgtattggacaacgcggcaatcgtgtgtaattttggttcagaactgtctctcgtttatgtgccctctgtgttagagaaattagactag

SEQ ID NO: 279396 - DNA, 2661 bp, Artificial Sequence
  derived and/or modified sequence
atgaagaacatggccactgagctgggtatcatcctaatcggatacttcactctcgtccccgctatacaggaattttgcttgtttgcagtggtgggacttgtaagtgatttttttctccagatgctattttttactacagtgctgtccattgacatccggaggatggaattggcggatttaaacaagcgtcttccgcctgaggcgtgcctgccgtctgccaagcctgtagggcagcccacccgatatgagaggcagctggcagtccgcccaagcactccccacactataacactacaaccttcctcttttagaaatctcaggctgccgaagagactccgtgtggtctacttcctggccaggaccaggctggcacagaggctgataatggcaggcacagtggtctggattggtattttagtctataccgaccctgctgggttaagaaattatctggccgctcaggtgacggagcagagtcctctgggcgaaggtgccctagcccctatgcccgttccctctgggatgctgccgccatcccatcctgatccagcattctccatctttccaccagatgcacctaaactgccagaaaaccaaacaagtcccggagaatcacctgagaggggaggccctgctgaggtggtgcacgatagccccgtgcctgaggtcacgtggggacccgaagacgaagagctgtggcgaaagctcagtttcagacactggcccaccctctttagctactacaacatcactttagcgaaacgatacatatctctgctgcctgttatcccagtgaccttgcggctcaatccaagggaggccttggaaggcaggcacccccaggacggtagatccgcttggcctccaccaggcccaattcctgctggccattgggaagccggacctaaaggccctgggggtgttcaggcccacggagatgtaacactgtacaaggttgccgcactcggactcgccacaggaattgtgctggtgctcctgctgttatgcttgtaccgcgtgctgtgccctcgcaactacggccagctcgggggaggccctggtcgacgtcggcgtggagagcttccatgcgatgactacggatacgcccctcccgagactgagattgtgccattggtgctccgaggccatttgatggatattgagtgccttgccagcgacggtatgctcctcgtcagctgctgtcttgctgggcacgtatgcgtgtgggatgcgcaaactggggactgtctgactcgaatcccaagacccggacaaaggagggacagcggcgtggggtctggacttgaggcgcaggaaagttgggaacgactcagtgacggcggtaaggcaggccctgaggagcccggagacagccctcccctgcggcataggcccaggggtcctccacccccatcattgttcggggaccaaccagacttgacctgcctgattgatactaacttcagtgctcagcccagatctagccagcctactcaacctgagccccgacatcgcgcagtgtgtggtcggagtcgcgacagccctggctacgatttttcatgcctggttcagcgtgtctaccaggaggaaggcctggccgctgtatgcactcccgcactaagacctcccagccccggtcccgtgctgtctcaggcgcctgaggacgagggcggtagccccgaaaaaggatcccccagcctggcgtgggccccttcagccgaagggtctatctggtcgttagagctgcagggcaatctaattgtggtaggaaggtcaagcgggaggttggaagtgtgggacgccattgagggtgtgctgtgctgttcatcggaggaggtatcctccggcattactgccctggtgttccttgacaaacgcattgtggctgcaagactgaatgggtcccttgacttcttctcactggagacacatacggccttaagtcctctgcagtttaggggcactccaggtagaggctcctctccggcaagtccagtttacagcagttctgatactgtcgcctgtcacctgacacacaccgtgccctgcgcccatcagaaacctatcaccgcccttaaagcagccgcagggaggttggtgaccggctctcaggatcataccctcagggtgttccggctggaggacagttgctgtctgttcacactgcaaggccactccggcgctattaccactgtctatatagatcaaactatggttctcgcaagcggtgggcaagacggcgcaatttgtctgtgggacgtgctgacaggctcccgggtgagtcacgtattcgcacatcggggagatgtcacaagcttaacctgcacaacttcatgcgtgatctcgtcaggactggacgacctcattagtatttgggataggagtactggtatcaaattctactccatccagcaagatttggggtgtggggcttcgcttggcgtgatcagcgataacctgctcgtgacgggaggacagggttgcgtgagtttctgggatctgaattacggggatctccttcaaacagtgtatctcggtaaaaactctgaagcccagccagcccgacagattctggtgctggataacgcggcaatcgtttgtaactttggaagcgaactgagcttggtctatgtgccctcggtcctggaaaaactggactag

SEQ ID NO: 279397 - DNA, 2878 bp, Artificial Sequence
  derived and/or modified sequence
atgaccctgactgaaaggctgcgtgagaagatatctcgggccttctacaaccatgggctcctctgtgcatcctatcccatccccatcatcctcatcggctacttcaccctagtgcccgccatccaggagttctgtctctttgctgtcgtggggctggtgtctgacttcttccttcagatgctgtttttcaccactgtcctgtccattgacattcgccggatggagctagcagacctgaacaagcgactgccccctgaggcctgcctgccctcagccaagccagtgggacagccaacgcgctacgagcggcagctggctgtgaggccgtccacaccccacaccatcacgttgcagccgtcttccttccgaaacctgcggctccccaagaggctgcgtgttgtctacttcctggcccgcacccgcctggcacagcgcctcatcatggctggcaccgttgtctggattggcatcctggtatacacagacccagcagggctgcgcaactacctcgctgcccaggtgacggaacagagcccattgggtgagggagccctggctcccatgcccgtgcctagtggcatgctgccccccagccacccggaccctgccttctccatcttcccacctgatgcccctaagctacctgagaaccagacgtcgccaggcgagtcacctgagcgtggaggtccagcagaggttgtccatgacagcccagtcccagaggtaacctgggggcctgaggatgaggaactttggaggaaattgtccttccgccactggccgacgctcttcagctattacaacatcacactggccaagaggtacatcagcctgctgcccgtcatcccagtcacgctccgcctgaacccgagggaggctctggagggccggcaccctcaggacggccgcagtgcctggcccccaccggggcccatacctgctgggcactgggaagcaggacccaagggcccaggtggggtgcaggcccatggagacgtcacgctgtacaaggtggcggcgctgggcctggccaccggcatcgtcttggtgctgctgctgctctgcctctaccgcgtgctatgcccgcgcaactacgggcagctgggtggtgggcccgggcggcggaggcgcggggagctgccctgcgacgactacggctatgcgccacccgagacggagatcgtgccgcttgtgctgcgcggccacctcatggacatcgagtgcctggccagcgacggcatgctgctggtgagctgctgcctggcaggccacgtctgcgtgtgggacgcgcagaccggggattgcctaacgcgcattccgcgcccagggcagcgccgggacagtggcgtgggcagcgggcttgaggctcaggagagctgggaacgactttcagatggtgggaaggctggtccagaggagcctggggacagccctcccctgagacaccgcccccggggccctccgccgccttccctcttcggggaccagcctgacctcacctgcttaattgacaccaacttttcagcgcagcctcggtcctcacagcccactcagcccgagccccggcaccgggcggtctgtggccgctctcgggactccccaggctatgacttcagctgcctggtgcagcgggtgtaccaggaggaggggctggcggccgtctgcacaccagccctgcgcccaccctcgcctgggccggtgctgtcccaggcccctgaggacgagggtggctcccccgagaaaggctccccttccctcgcctgggcccccagtgccgagggttccatctggagcttggagctgcagggcaacctcatcgtggtggggcggagcagcggccggctggaggtgtgggacgccattgaaggggtgctgtgctgcagcagcgaggaggtctcctcaggcattaccgctctggtgttcttggacaaaaggattgtggctgcacggctcaacggttcccttgatttcttctccttggagacccacactgccctcagccccctgcagtttagagggaccccagggcggggcagttcccctgcctctccagtgtacagcagcagcgacacagtggcctgtcacctgacccacacagtgccctgtgcacaccaaaaacccatcacagccctgaaagccgctgctgggcgcttggtgactgggagccaagaccacacactgagagtgttccgtctggaggactcgtgctgcctcttcacccttcagggccactcaggggccatcacgaccgtgtacattgaccagaccatggtgctggccagtggaggacaagatggggccatctgcctgtgggatgtactgactggcagccgggtcagccatgtgtttgctcaccgtggggatgtcacctcccttacctgtaccacctcctgtgtcatcagcagtggcctggatgacctcatcagcatctgggaccgcagcacaggcatcaagttctactccattcagcaggacctgggctgtggtgcaagcttgggtgtcatctcagacaacctgctggtgactggcggccagggctgtgtctccttttgggacctaaactacggggacctgttacagacagtctacctggggaagaacagtgaggcccagcctgcccgccagatcctggtgctggacaacgctgccattgtctgcaactttggcagtgagctcagcctggtgtatgtgccctctgtgctggagaagctggactgagcgcagggcctccttgcccaggcaggaggctggggtgctgtgtgggggccaatgcactgaacctggacttgggggaaagagccgagtatcttccagccgctgcctcctgactgtaataatattaaacttttttaaaaaaccatatcatcatctgtcaggc

SEQ ID NO: 279398 - DNA, 366 bp, Artificial Sequence
  derived and/or modified sequence
atgatgagaagcatcttcctgccccacagaaagctgatctgcagcagaagaggccacctggaccccagaggctgggaggaggacgagaagatcctggtgcccgacgccatccccaccctgcccccctacgtgttcatcagaaccgaccaggcctgcgtgaaggtgtaccccggcttcgtgctgatcagaaacggcaagacccacagacacagaggcgactgccacgaggaggaggtgtgcgcccacagaaccctggagaccggcggcatggcctgccacgtgggcccccacggcgagggccccagcctgtggggcttctggggcagctggaagcaggtgctgttcttcctgcccgtggaccactag

SEQ ID NO: 279399 - DNA, 366 bp, Artificial Sequence
  derived and/or modified sequence
atgatgaggtccatttttctcccccataggaagctgatatgttcacggcgtgggcatttagatccaaggggttgggaggaggatgaaaagattcttgtccccgacgccatccccactcttcccccctacgtgttcatccggaccgatcaggcctgcgtgaaggtctaccctggctttgtcctcatccggaacgggaaaactcaccgacatcggggcgattgtcacgaagaggaagtgtgcgcacatagaactttagagacaggtgggatggcctgtcacgtggggccgcacggggaaggccccagcctctgggggttctggggtagctggaaacaggttctattttttctcccagtagaccactag

SEQ ID NO: 279400 - DNA, 189 bp, Artificial Sequence
  derived and/or modified sequence
atgctgcaggtggtgcaggagggcaaccccgcccccttcatcatcaacactgtgaagcgtggaagacgcgatcgagaaaggcaacgcactccatgggcaccccatccacttggatttcaggagcggcgctacatatacgaatccccaaatcaccgggggaaagacagtagcttcctggcacagaagtag

SEQ ID NO: 279401 - DNA, 366 bp, Artificial Sequence
  derived and/or modified sequence
atgatgcgctctatcttcctcccccatcgcaagctgatctgttcgaggcgcggacatctggaccctcggggttgggaagaggacgaaaagatcctcgtgcctgacgccattccaacgctgcctccttatgtttttatccgaacagatcaggcttgtgtcaaggtgtaccccggtttcgtgttaattcggaacggaaaaactcataggcacaggggggattgccacgaagaagaggtgtgtgcccacagaacattagagacaggagggatggcatgccacgtgggtcctcatggcgagggcccaagtctgtggggcttttggggtagctggaagcaggttctgttttttttacctgtggaccattag

SEQ ID NO: 279402 - DNA, 132 bp, Artificial Sequence
  derived and/or modified sequence
tgaagcagaaacgatgatatatgcatctacggtggtttgggtctaggaggtctgctcctgttagctgtcgtccttctgagcgcctgcttgtgctggttacacagacgagaagctgcttccgcacagcaatag

SEQ ID NO: 279403 - protein, 135 aa, Artificial Sequence
  derived and/or modified sequence
  misc_feature (1)..(1): Xaa can be any naturally occurring amino acid
XLAVEGPSKVDIQTEDLEDGTCKVSYFPTVPGVYIVSTKFADEHVPEINSSDMSAHVTSPSGRVTEAEIVPMGKNSHCVRFVPQEMGVHTVSVKYRGQHVTGSPFQFTVGPLGEGGAHKVRAGGPGLERGEAGVP

SEQ ID NO: 279404 - protein, 2150 aa, Artificial Sequence
  derived and/or modified sequence
MPVTEKDLAEDAPWKKIQQNTFTRWCNEHLKCVNKRIGNLQTDLSDGLRLIALLEVLSQKRMYRKYHQRPTFRQMQLENVSVALEFLDRESIKLVSIDSKAIVDGNLKLILGLVWTLILHYSISMPVWEDEGDDDAKKQTPKQRLLGWIQNKIPYLPITNFNQNWQDGKALGALVDSCAPGLCPDWESWDPQKPVDNAREAMQQADDWLGVPQVITPEEIIHPDVDEHSVMTYLSQFPKAKLKPGAPLKPKLNPKKARAYGRGIEPTGNMVKQPAKFTVDTISAGQGDVMVFVEDPEGNKEEAQVTPDSDKNKTYSVEYLPKVTGLHKVTVLFAGQHISKSPFEVSVDKAQGDASKVTAKGPGLEAVGNIANKPTYFDIYTAGAGVGDIGVEVEDPQGKNTVELLVEDKGNQVYRCVYKPMQPGPHVVKIFFAGDTIPKSPFVVQVGEACNPNACRASGRGLQPKGVRIRETTDFKVDTKAAGSGELGVTMKGPKGLEELVKQKDFLDGVYAFEYYPSTPGRYSIAITWGGHHIPKSPFEVQVGPEAGMQKVRAWGPGLHGGIVGRSADFVVESIGSEVGSLGFAIEGPSQAKIEYNDQNDGSCDVKYWPKEPGEYAVHIMCDDEDIKDSPYMAFIHPATGGYNPDLVRAYGPGLEKSGCIVNNLAEFTVDPKDAGKAPLKIFAQDGEGQRIDIQMKNRMDGTYACSYTPVKAIKHTIAVVWGGVNIPHSPYRVNIGQGSHPQKVKVFGPGVERSGLKANEPTHFTVDCTEAGEGDVSVGIKCDARVLSEDEEDVDFDIIHNANDTFTVKYVPPAAGRYTIKVLFASQEIPASPFRVKVDPSHDASKVKAEGPGLSKAGVENGKPTHFTVYTKGAGKAPLNVQFNSPLPGDAVKDLDIIDNYDYSHTVKYTPTQQGNMQVLVTYGGDPIPKSPFTVGVAAPLDLSKIKLNGLENRVEVGKDQEFTVDTRGAGGQGKLDVTILSPSRKVVPCLVTPVTGRENSTAKFIPREEGLYAVDVTYDGHPVPGSPYTVEASLPPDPSKVKAHGPGLEGGLVGKPAEFTIDTKGAGTGGLGLTVEGPCEAKIECSDNGDGTCSVSYLPTKPGEYFVNILFEEVHIPGSPFKADIEMPFDPSKVVASGPGLEHGKVGEAGLLSVDCSEAGPGALGLEAVSDSGTKAEVSIQNNKDGTYAVTYVPLTAGMYTLTMKYGGELVPHFPARVKVEPAVDTSRIKVFGPGIEGKDVFREATTDFTVDSRPLTQVGGDHIKAHIANPSGASTECFVTDNADGTYQVEYTPFEKGLHVVEVTYDDVPIPNSPFKVAVTEGCQPSRVQAQGPGLKEAFTNKPNVFTVVTRGAGIGGLGITVEGPSESKINCRDNKDGSCSAEYIPFAPGDYDVNITYGGAHIPGSPFRVPVKDVVDPSKVKIAGPGLGSGVRARVLQSFTVDSSKAGLAPLEVRVLGPRGLVEPVNVVDNGDGTHTVTYTPSQEGPYMVSVKYADEEIPRSPFKVKVLPTYDASKVTASGPGLSSYGVPASLPVDFAIDARDAGEGLLAVQITDQEGKPKRAIVHDNKDGTYAVTYIPDKTGRYMIGVTYGGDDIPLSPYRIRATQTGDASKCLATGPGIASTVKTGEEVGFVVDAKTAGKGKVTCTVLTPDGTEAEADVIENEDGTYDIFYTAAKPGTYVIYVRFGGVDIPNSPFTVMATDGEVTAVEEAPVNACPPGFRPWVTEEAYVPVSDMNGLGFKPFDLVIPFAVRKGEITGEVHMPSGKTATPEIVDNKDGTVTVRYAPTEVGLHEMHIKYMGSHIPESPLQFYVNYPNSGSVSAYGPGLVYGVANKTATFTIVTEDAGEGGLDLAIEGPSKAEISCIDNKDGTCTVTYLPTLPGDYSILVKYNDKHIPGSPFTAKITDDSRRCSQVKLGSAADFLLDISETDLSSLTASIKAPSGRDEPCLLKRLPNNHIGISFIPREVGEHLVSIKKNGNHVANSPVSIMVVQSEIGDARRAKVYGRGLSEGRTFEMSDFIVDTRDAGYGGISLAVEGPSKVDIQTEDLEDGTCKVSYFPTVPGVYIVSTKFADEHVPGSPFTVKISGEGRVKESITRTSRAPSVATVGSICDLNLKIPGVRVMNCSAQILWGWRVQFHTGSRNQQQ

SEQ ID NO: 279405 - DNA, 9537 bp, Artificial Sequence
  derived and/or modified sequence
gcggccaggggcgggcggccgcagagcagcaccggccgtggctccggtagcagcaagttcgaaccccgctcccgctccgcttcggttctcgctccttcggcccttgggcctccaaacaccagtccccggcagctcgttgcgcattgcgctctccccgccaccaggatgccggtaaccgagaaggatctagctgaggacgcgccttggaagaagatccagcagaacacgttcacacgctggtgcaacgagcacctcaagtgcgtgaacaaacgcatcggcaacctgcagaccgacctgagcgacgggctgcggctcatcgcgctgctcgaggtgctcagccagaagcgcatgtaccgcaagtaccatcagcggcccacctttcgccagatgcagctcgagaatgtgtccgtggcgctcgagttcctggaccgtgagagcatcaagctcgtgtccatcgatagcaaagccattgtggatgggaacctgaagctcatcttgggtctggtgtggacgctgatcctccactactccatctccatgcccgtgtgggaggatgaaggggatgatgatgccaagaagcagacgccaaagcagaggctgctggggtggattcagaacaagatcccctacttgcccatcaccaactttaaccagaactggcaagacggcaaagccctgggagccctggtagacagctgtgctccaggtctgtgcccagactgggaatcctgggacccgcagaagcctgtggataatgcacgagaagccatgcagcaggcagatgactggctgggtgtcccacaggtcatcactcctgaagaaatcattcacccggatgtggacgagcactcagttatgacttacctgtcccagttccccaaagccaagctcaagccgggggctcctctcaaacccaaactcaacccgaagaaagccagggcctatggcagaggaatcgagcccactggaaacatggtgaagcagccagccaagttcactgtggacaccatcagcgccgggcaaggagacgtgatggtgtttgttgaggacccagaagggaacaaagaggaggcacaagtgacccctgacagtgacaagaacaagacatactctgtggagtatctgcccaaggtcaccgggctacacaaagtcacagtcctctttgcaggacagcacatctccaagagcccatttgaagtgagtgttgacaaggcccagggagatgccagtaaagtcactgcaaaaggtccagggttggaagctgtagggaacatcgccaataagcccacctactttgacatctatacggcaggagctggtgtgggtgacattggtgtggaggtggaagatccccaggggaagaacaccgtggagttgctcgtggaagacaaaggaaaccaggtgtatcgatgtgtgtacaaacccatgcagcctggccctcacgtggtcaagatcttctttgctggggacactattcctaagagtcccttcgttgtgcaggttggggaagcctgcaatccaaatgcctgccgggccagtggccgaggcctacaacccaaaggcgtccgtatccgggagaccacagatttcaaggttgacaccaaagctgcaggaagtggggagctcggtgtaaccatgaagggtcctaagggtctggaggagctggtgaagcagaaagactttctggatggggtctacgcattcgagtattaccccagcaccccggggagatacagcattgccatcacatgggggggacaccacattccaaagagcccctttgaagttcaagttggccctgaagcgggtatgcagaaagtccgtgcttggggccctgggctccatggtgggattgtcgggcggtcagcggacttcgtggtagaatccattggctctgaagtggggtctctggggtttgccattgaaggcccctctcaggcaaagattgagtacaacgaccagaatgatggatcgtgtgatgtcaaatactggcccaaggagcctggcgaatatgctgttcacatcatgtgtgacgacgaagacatcaaggacagcccgtacatggccttcatccacccagccacgggaggctacaaccctgatctggttcgagcatacgggccaggtttggagaaatctggatgcattgtcaacaacctggccgagttcactgtggatcctaaggatgctggaaaagctcccttaaagatatttgctcaggatggggaaggccaacgcattgacatccagatgaagaaccggatggacggcacatatgcatgctcatacaccccggtgaaggccatcaagcacaccattgctgtggtctggggaggcgtgaacatcccgcacagcccctacagggtcaacatcgggcaaggtagccatcctcagaaggtcaaagtgtttgggccaggtgtggagagaagtggtctgaaggcaaatgaacctacacacttcacggtggactgtactgaggctggggaaggtgatgtcagtgttggcattaagtgtgatgcccgggtgttaagtgaagatgaggaagacgtggattttgacattattcacaatgccaatgatacgttcacagtcaaatatgtgcctcctgctgctgggcgatacactatcaaagttctctttgcatctcaggaaatccccgccagccctttcagagtcaaagttgacccttcccacgatgccagcaaagtgaaggcagaaggcccagggctcagcaaagcaggtgtggaaaatgggaaaccgacccacttcactgtctacaccaagggggctgggaaagccccgctcaacgtgcagttcaacagccctcttcctggcgatgcagtgaaggatttggatatcatcgataattatgactactctcacacggttaaatatacacccacccaacagggcaacatgcaggttctggtgacttacggtggcgatcccatccctaaaagccctttcactgtgggtgttgctgcaccgctggatctgagcaagataaaactcaatgggctggaaaacagggtggaagttgggaaggatcaggagttcaccgttgataccaggggggcaggaggccaggggaagctggacgtgacaatcctcagcccctctcggaaggtcgtgccatgcctagtgacacctgtgacaggccgggagaacagcacggccaagttcatccctcgggaggaggggctgtatgctgtagacgtgacctacgatggacaccctgtgcccgggagcccctacacagtggaggcctcgctgccaccagatcccagcaaggtgaaggcccacggtcccggcctcgaaggtggtctcgtgggcaagcctgccgagttcaccatcgataccaaaggagctggtactggaggtctgggcttaacggtggaaggtccgtgcgaggccaaaatcgagtgctccgacaatggtgatgggacctgctccgtctcttaccttcccacaaaacccggggagtacttcgtcaacatcctctttgaagaagtccacatacctgggtctcccttcaaagctgacattgaaatgccctttgacccctctaaagtcgtggcatcggggccaggtctcgagcacgggaaggtgggtgaagctggcctccttagcgtcgactgctcggaagcgggaccgggggccctgggcctggaagctgtctcggactcgggaacaaaagccgaagtcagtattcagaacaacaaagatggcacctacgcggtgacctacgtgcccctgacggccggcatgtacacgttgaccatgaagtatggtggcgaactcgtgccacacttccccgcccgggtcaaggtggagcccgccgtggacaccagcaggatcaaagtctttggaccaggaatagaagggaaagatgtgttccgggaagctaccaccgactttacagttgactctcggccgctgacccaggttgggggtgaccacatcaaggcccacattgccaacccctcaggggcctccaccgagtgctttgtcacagacaatgcggatgggacctaccaggtggaatacacaccctttgagaaaggtctccatgtagtggaggtgacatatgatgacgtgcctatcccaaacagtcccttcaaggtggctgtcactgaaggctgccagccatctagggtgcaagcccaaggacctggattgaaagaggcctttaccaacaagcccaatgtcttcaccgtggttaccagaggcgcaggaattggtgggcttggcataactgttgagggaccatcagagtcgaagataaattgcagagacaacaaggatggcagctgcagtgctgagtacattcctttcgcaccgggggattacgatgttaatatcacatatggaggagcccacatccccggcagccccttcagggttcctgtgaaggatgttgtggaccccagcaaggtcaagattgccggccccgggctgggctcaggcgtccgagcccgtgtcctgcagtccttcacggtggacagcagcaaggctggcctggctccgctggaagtgagggttctgggcccacgaggcttggtggagccagtgaacgtggtggacaatggagatggcacacacacagtaacctacaccccatctcaggagggaccttacatggtctcagttaaatatgctgatgaagagattcctcgcagtcccttcaaggtcaaggtccttcccacatatgatgccagcaaagtgactgccagtggccccggccttagttcctatggtgtgcctgccagtctacctgtggactttgcaattgatgcccgagatgccggggaaggcctgcttgctgttcaaataacggaccaagaaggaaaacccaaaagagccattgtccatgacaataaagatggcacgtatgctgtcacctacatccccgacaagactgggcgctatatgattggagtcacctacgggggtgacgacatcccactttctccttatcgcatccgagccacacagacgggtgatgccagcaagtgcctggccacgggtcctggaatcgcctccactgtgaaaactggcgaagaagtaggctttgtggttgatgccaagactgccgggaagggtaaagtgacctgcacggttctgaccccagatggcactgaggccgaggccgatgtcattgagaatgaagatggaacctatgacatcttctacacagctgccaagccgggcacatatgtgatctatgtgcgcttcggtggtgttgatattcctaacagccccttcactgtcatggccacagatggggaagtcacagccgtggaggaggcaccggtaaatgcatgtccccctggattcaggccctgggtgaccgaagaggcctatgtcccagtgagtgacatgaacggcctgggatttaagccttttgacctggtcattccgtttgctgtcaggaaaggagaaatcactggagaggtccacatgccttctgggaagacagccacacctgagattgtggacaacaaggacggcacggtcactgttagatatgcccccactgaggtcgggctccatgagatgcacatcaaatacatgggcagccacatccctgagagcccactccagttctacgtgaactaccccaacagtggaagtgtttctgcatacggtccaggcctcgtgtatggagtggccaacaaaactgccaccttcaccatcgtcacagaggatgcaggagaaggtggtctggacttggctattgagggcccctcaaaagcagaaatcagctgcattgacaataaagatgggacatgcacagtgacctacctgccgactctgccaggcgactacagcattctggtcaagtacaatgacaagcacatccctggcagccccttcacagccaagatcacagatgacagcaggcggtgctcccaggtgaagttgggctcagccgctgacttcctgctcgacatcagtgagactgacctcagcagcctgacggccagcattaaggccccatctggccgagacgagccctgtctcctgaagaggctgcccaacaaccacattggcatctccttcatcccccgggaagtgggcgaacatctggtcagcatcaagaaaaatggcaaccatgtggccaacagccccgtgtctatcatggtggtccagtcggagattggtgacgcccgccgagccaaagtctatggccgcggcctgtcagaaggccggactttcgagatgtctgacttcatcgtggacacaagggatgcaggttatggtggcatatccttggcggtggaaggccccagcaaagtggacatccagacggaggacctggaagatggcacctgcaaagtctcctacttccctaccgtgcctggggtttatatcgtctccaccaaattcgctgacgagcacgtgcctgggagcccatttaccgtgaagatcagtggggagggaagagtcaaagagagcatcacccgcaccagtcgggccccgtccgtggccactgtcgggagcatttgtgacctgaacctgaaaatcccaggggtcagagtcatgaactgctctgcccagatcctgtggggctggagggtgcagtttcatactggctctagaaatcaacagcagtgatatgtcggcccacgtcaccagcccctctggccgtgtgactgaggcagagattgtgcccatggggaagaactcacactgcgtccggtttgtgccccaggagatgggcgtgcacacggtcagcgtcaagtaccgtgggcagcacgtcaccggcagccccttccagttcaccgtggggccacttggtgaaggaggcgcccacaaggtgcgggcaggaggccctggcctggagagaggagaagcgggagtcccagctgagttcagcatttggacccgggaagcaggcgctggaggcctctccatcgctgttgagggccccagtaaggccgagattacattcgatgaccataaaaatgggtcgtgcggtgtatcttatattgcccaagagcctggtaactacgaggtgtccatcaagttcaatgatgagcacatcccggaaagcccctacctggtgccggtcatcgcaccctccgacgacgcccgccgcctcactgttatgagccttcaggaatcgggattaaaagttaaccagccagcatcctttgctataaggttgaatggcgcaaaaggcaagattgatgcaaaggtgcacagcccctctggagccgtggaggagtgccacgtgtctgagctggagccagataagtatgctgttcgcttcatccctcatgagaatggtgtccacaccatcgatgtcaagttcaatgggagccacgtggttggaagccccttcaaagtgcgcgttggggagcctggacaagcggggaaccctgccctggtgtccgcctatggcacgggactcgaagggggcaccacaggtatccagtcggaattctttattaacaccacccgagcaggtccagggacattatccgtcaccatcgaaggcccatccaaggttaaaatggattgccaggaaacacctgaagggtacaaagtcatgtacacccccatggctcctggtaactacctgatcagcgtcaaatacggtgggcccaaccacatcgtgggcagtcccttcaaggccaaggtgacaggccagcgtctagttagccctggctcagccaacgagacctcatccatcctggtggagtcagtgaccaggtcgtctacagagacctgctatagcgccattcccaaggcatcctcggacgccagcaaggtgacctctaagggggcagggctctcaaaggcctttgtgggccagaagagttccttcctggtggactgcagcaaagctggctccaacatgctgctgatcggggtccatgggcccaccaccccctgcgaggaggtctccatgaagcatgtaggcaaccagcaatacaacgtcacatacgtcgtcaaggagaggggcgattatgtgctggctgtgaagtggggggaggaacacatccctggcagcccttttcatgtcacagtgccttaaaacagttttctcaaatcctggagagagttcttgtggttgcttttgttgcttgtttgtaattcattttatacaaagccctccagcctgtttgtggggctgaaaccccatccctaaaatattgctgttgtaaaatgccttcagaaataagtcctagactggactcttgagggacatattggagaatcttaagaaatgcaagcttgttcagggggctgagaagatcctgagtacactaggtgcaaaccagaactcttggtggaacagaccagccactgcagcagacagaccaggaacacaatgagactgacatttcaaaaaaacaaaactggctagcctgagctgctggttcactcttcagcatttatgaaacaaggctaggggaagatgggcagagaaaaaggggacacctagtttggttgtcatttggcaaaggagatgacttaaaatccgcttaatctcttccagtgtccgtgttaatgtatttggctattagatcactagcactgctttaccgctcctcatcgccaacacccccatgctctgtggccttcttacacttctcagagggcagagtggcagccgggcaccctacagaaactcagagggcagagtggcagccaggcccacatgtctctcaagtacctgtcccctcgctctggtgattatttcttgcagaatcaccacacgagaccatcccggcagtcatggttttgctttagttttccaagtccgtttcagtcccttccttggtctgaagaaattctgcagtggcgagcagtttcccacttgccaaagatcccttttaaccaacactagcccttgtttttaacacacgctccagcccttcatcagcctgggcagtcttaccaaaatgtttaaagtgatctcagaggggcccatggattaacgccctcatcccaaggtccgtcccatgacataacactccacacccgccccagccaacttcatgggtcactttttctggaaaataatgatctgtacagacaggacagaatgaaactcctgcgggtctttggcctgaaagttgggaatggttgggggagagaagggcagcagcttattggtggtcttttcaccattggcagaaacagtgagagctgtgtggtgcagaaatccagaaatgaggtgtagggaattttgcctgccttcctgcagacctgagctggctttggaatgaggttaaagtgtcagggacgttgcctgagcccaaatgtgtagtgtggtctgggcaggcagacctttaggttttgctgcttagtcctgaggaagtggccactcttgtggcaggtgtagtatctggggcgagtgttgggggtaaaagcccaccctacagaaagtggaacagcccggagcctgatgtgaaaggaccacgggtgttgtaagctgggacacggaagccaaactggaatcaaacgccgactgtaaattgtatcttataacttattaaataaaacatttgctccgtaaagttg

SEQ ID NO: 279406 - DNA, 6453 bp, Artificial Sequence
  derived and/or modified sequence
atgccagttaccgagaaggatttagccgaagatgccccatggaaaaagatccagcaaaacacatttactcgctggtgtaacgagcacctcaaatgtgtaaacaaaagaattggaaacttgcagactgacctgtctgacggactccggttaatcgccctgctggaggttctctcccagaagagaatgtataggaaataccaccaacgcccaactttcagacagatgcagctggaaaatgtgagcgtggcactggagtttctggatcgcgagtctatcaaacttgtgagcatcgattcaaaggccatcgtcgacggcaatctgaaactcatactgggactcgtgtggacactcattttgcactactcaatcagcatgcccgtttgggaggatgaaggggatgatgacgctaaaaagcagacaccaaagcagaggctgctagggtggattcaaaataagatcccatacttgcccattactaattttaaccaaaattggcaggacggtaaagcactcggtgccctcgtggattcatgcgcccccggcctgtgccctgattgggaaagctgggatccgcagaagcccgttgacaacgcccgcgaagccatgcagcaagcggacgattggctcggtgttccacaggtgattacacccgaagaaatcatccacccggacgtcgatgagcattctgtcatgacatacctgtcccagttccccaaagctaaattgaaaccaggagcgcccctgaaacctaaactgaatcctaagaaagcccgagcatacgggaggggaatagagccgacgggtaacatggtgaagcaacctgctaagtttactgtggatacaattagcgccggtcagggagatgtcatggtgttcgtggaagatcccgaggggaacaaagaagaagcacaggtgacacccgattctgataagaacaaaacctacagcgtggagtacctgcctaaggtcactggcctgcacaaagtcacggtgctgttcgccggacaacacattagcaaatcgcctttcgaggtgtctgtggacaaggcacagggagacgcatcaaaagtcaccgccaagggaccgggactcgaggccgtggggaacattgccaacaagcctacttatttcgatatttatactgctggcgcaggagtgggagacatcggagtggaggttgaagaccctcagggcaagaacactgtggagctcctggtggaggacaaagggaaccaggtgtataggtgtgtgtacaagccaatgcagcccggaccccatgtggtgaagatctttttcgcaggggatacaatacctaagtctccgttcgtcgtgcaggtgggggaggcttgcaacccgaacgcttgcagagcttctgggcggggccttcaaccaaagggcgtgagaatcagggaaaccacggattttaaagttgatactaaagccgccgggtctggggagctaggggtgaccatgaagggcccaaagggtctcgaagagttggtcaagcagaaggacttcctggatggcgtatacgcgtttgagtattatccttccacacctgggcggtattctattgcgattacatggggcgggcatcacatccctaagtcccctttcgaagttcaggtgggcccagaggcaggaatgcagaaagtccgagcctggggcccaggactgcacggcgggatcgtgggaagatctgccgacttcgtagtcgagagcattggatccgaggtaggatctctggggttcgccatcgagggtccctcacaagccaagatcgaatataatgaccagaacgacggcagctgcgacgtgaagtattggcccaaagaacctggtgagtacgctgttcatatcatgtgtgatgatgaagatatcaaagacagtccctacatggctttcattcaccccgccaccgggggctataatcctgatctggtgagagcctacggccccggcctcgagaagtctggatgcattgtgaataatcttgcggaatttaccgttgacccaaaagatgccggaaaggcccccctcaaaatctttgcgcaggacggggaaggacagaggatcgatatccaaatgaaaaatagaatggatggtacatacgcctgctcctacacaccagtcaaagccatcaagcacacaattgcggtcgtctggggaggagtgaatattccgcacagcccttacagggttaacataggtcaaggaagccacccacaaaaggtaaaggttttcggacccggcgtagaacgatctggattgaaagcaaatgaacccactcactttaccgtcgactgtactgaggccggcgagggagacgtctccgtgggcatcaaatgcgacgctagggtcctctccgaagacgaagaagacgtagattttgacatcatccacaacgcaaacgacactttcacggtcaaatacgtgccacctgcagccggtagatatacaataaaagttctgttcgcctcccaggagattcctgctagcccattcagagtgaaggtcgacccttctcatgatgcttctaaggtgaaagcagaaggccctgggctaagtaaagcgggcgtggaaaatggcaaacctactcacttcacggtatacacgaagggggccggcaaagctcctctgaacgtgcagtttaactcgcccctgcctggtgatgccgtgaaagatttagacatcatagacaactacgattacagccacacggttaagtacacccctacccagcaaggtaacatgcaggtgctcgttacatatggaggggaccctatcccaaagtctcctttcactgttggtgttgctgcacccctggatcttagtaaaatcaaacttaatggcttagagaacagggtagaggtggggaaagatcaggaattcaccgtcgatacaaggggggccgggggccaagggaagcttgatgtgaccattctgtctccttcaagaaaggtcgtcccatgtctggtcaccccggtgactgggagggagaactctacagccaagttcattccccgcgaggaagggctctatgctgtggacgtcacctatgacggacaccccgtgcccgggtccccatacacggttgaagcctccctgccaccagacccctcgaaggtgaaggctcacgggccagggttggagggggggctcgtgggtaagccagcggaattcacaatcgacacaaagggtgcaggcaccggaggtctcggcctcactgtagagggtccttgcgaggctaagatcgaatgctctgacaatggggacggtacttgcagcgtgagctatctgcctacgaagcccggggagtactttgtaaacatattattcgaagaagtgcatatacccggttcgcccttcaaggctgatatagaaatgccttttgacccatccaaggtcgtggcctccggtccagggctggaacacgggaaagtcggtgaagcgggacttctgagtgtcgattgttctgaggccggacctggcgctcttggactagaagccgtatctgacagtggtacaaaggcggaagtttccatacagaacaacaaggatggcacctatgcagttacatatgtgcctcttactgccggcatgtacacattgaccatgaagtacggtggagagcttgtccctcactttcccgctcgggtaaaggtcgaacctgcagtcgatacgtcccggatcaaggtttttggtcctgggatcgaaggcaaggacgtctttcgcgaggctacgactgacttcaccgtggattctcgacctcttacacaggttgggggagaccacatcaaagcacatattgcaaaccccagcggcgcatccactgaatgttttgtgacagacaatgccgacggcacatatcaggttgaatacaccccctttgagaagggcctgcatgtagtcgaagtgacttacgacgacgtgccaatccctaactcaccattcaaggtcgcagtgaccgaggggtgccagcccagtcgagtgcaggcgcagggacctggattgaaggaagccttcaccaataagccgaacgtgttcacagtggtgacacgaggcgccggaatagggggcctgggcataacagtagaagggccttctgagtccaaaatcaactgccgggacaacaaagatggcagctgctcagctgaatatattcccttcgcccctggggattacgatgtgaatatcacatacggtggtgcacacattcccggaagcccatttagagtacctgtcaaggacgtcgtcgatccttccaaagtgaaaatcgcaggccctggtttaggttcgggcgtcagggccagggtcctccagtcttttactgtggactcttcaaaggccggattagcaccactcgaggtgagagtcctgggcccacggggactggtcgagccagtcaatgtggtggataacggggacggcacacataccgtgacatacacaccttcccaggagggcccctacatggtgtctgtgaagtacgcggatgaggagattccccgctccccctttaaagtgaaggttctgccaacttacgatgcctctaaggtgactgcttccggtccggggctgtcttcatatggcgtgcccgctagtctgcccgtggatttcgccattgatgcaagggatgctggcgaaggcctgctggcagtacagataacagaccaggagggcaaacccaaacgagcaatcgtccatgacaataaggatggtacctatgccgtcacctatatacccgacaagacaggcagatacatgatcggagtaacctacggaggagacgacatacccttgtcaccctatcgcatcagagccacccagacaggagacgcatccaaatgccttgctacaggtccgggcattgcttcaacagtgaagaccggtgaagaggtaggttttgtggtagacgctaaaacggccggcaagggcaaagtgacttgtactgtcctcacacccgatggtaccgaagcagaagctgatgtgattgaaaacgaggatggcacctacgatatcttctataccgccgccaagcccggaacctatgtaatttacgttcggttcggaggagtggacattccgaactccccattcacagtcatggctaccgacggagaagtgacggctgtagaggaagcaccagtgaatgcctgtcctccaggctttcgcccatgggtgacggaagaagcgtatgtgccggtttcagatatgaatggactgggctttaaaccgttcgatttggtcatccccttcgctgtgaggaaaggggagatcacaggtgaggtgcatatgccgtccggaaagaccgccaccccagaaatcgttgacaataaagacggcaccgtgacggtgcggtacgcacctaccgaagtgggccttcacgaaatgcatattaagtatatgggctctcacatccccgagtctccactgcaattttatgtgaactatcccaattccggatccgtatcagcatacggaccgggacttgtctatggcgtggcaaacaagaccgccacattcacgatcgtcaccgaagacgccggagagggtggtctcgaccttgccatcgagggacccagcaaggcggaaatttcatgcatagataataaagatggaacttgtacagtgacctaccttccaacgctgcctggagactatagtatattagtaaagtataatgacaaacatatccccggaagccccttcactgcgaagataacagacgattctcgcagatgttcccaggtgaagctaggttccgccgccgacttccttttggatatcagcgagaccgatttgtcctccctaactgccagcatcaaggctcctagcgggagagacgaaccctgcctgctgaagagactgcccaataaccacataggtatctcattcattccgcgcgaggttggcgaacacctcgtgagcataaagaaaaacgggaatcacgtggcgaattctcccgtgtccatcatggtagtgcagtccgagattggagacgcacggcgggcaaaagtttatggacgcggattatctgagggacggacttttgaaatgtcagattttatagtggataccagagacgccggctatggcgggatctccttagccgttgagggtccctctaaggtcgacatacaaaccgaggatctggaggatggcacttgcaaggtcagttacttccccactgtgcccggcgtgtatatagtctccaccaagtttgcagatgagcatgtgccgggctctccattcactgtcaaaatctccggcgagggaagggtgaaggaatccatcactaggacatccagggcccctagcgtagccacagttggaagcatctgtgatttgaacctcaaaatcccaggcgtgcgggtcatgaactgctcagcccagatcctctggggatggcgagtgcagttccacactggctccagaaaccagcaacagtag

SEQ ID NO: 279407 - DNA, 6453 bp, Artificial Sequence
  derived and/or modified sequence
atgcctgtgacagagaaggacctggccgaggatgccccctggaagaagatccagcagaacaccttcacccgctggtgcaatgagcacctgaagtgtgtgaacaagagaattggcaacctgcagacagacctgagtgatggcctgcggctgattgccctgctggaggtgctgagccagaagaggatgtacaggaagtaccaccagaggcccaccttccggcagatgcagctggagaatgtgtctgtggccctggagttcctggaccgggagagcatcaagctggtgtccattgacagcaaggccatcgtggatggcaacctgaagctgatcctgggcctggtgtggaccctcatcctgcactacagcatctccatgcctgtgtgggaggatgaaggagatgatgatgccaagaagcagacccccaagcagaggctgctgggctggatccagaacaagatcccctacctgcccatcaccaacttcaaccagaactggcaggacggcaaggccctgggcgccctggtggacagctgtgcccctggcctgtgcccagactgggagagctgggacccccagaagcctgtggacaatgcccgggaggccatgcagcaggctgatgactggctgggcgtgccccaggtgatcaccccagaggagatcatccacccagatgtggatgagcacagcgtgatgacctacctgagccagttccccaaggccaagctgaagccaggggcccccctgaagcccaagctgaaccccaagaaggcccgggcctacggccggggcatcgagcccactggaaacatggtgaagcagcctgccaagttcaccgtggacaccatctctgctggccagggagatgtgatggtgtttgtggaggaccctgagggcaacaaggaggaggcccaggtgaccccagacagcgacaagaacaagacctacagcgtggagtacctgcccaaggtgacaggcctgcacaaggtgacagtgctgtttgctggccagcacatcagcaagagcccctttgaggtgtctgtggacaaggcccagggagatgccagcaaggtgacagccaagggccctggcctggaggccgtgggcaacatcgccaacaagcccacctactttgacatctacacagctggggccggcgtgggggacattggagtggaggtggaggacccccagggcaagaacacagtggagctgctggtggaggacaagggcaaccaggtgtaccgctgtgtgtacaagcccatgcagcccggcccccacgtggtgaagatcttctttgctggggacaccatccccaagagcccctttgtggtgcaggtgggggaggcctgcaaccccaatgcctgccgggccagcggccggggcctgcagcccaagggcgtgcgcatccgggagaccacagacttcaaggtggacaccaaggccgccggcagcggggagctgggcgtgaccatgaagggccccaagggcctggaggagctggtgaagcagaaggacttcctggatggagtgtatgcctttgagtactaccccagcaccccaggccgctacagcatcgccatcacctggggcggccaccacatccccaagagcccctttgaggtgcaggtgggccctgaggccggcatgcagaaggtgcgggcctggggccctggcctgcacggcggcatcgtgggccgctctgctgactttgtggtggagagcatcggcagcgaggtgggcagcctgggctttgccatcgagggccccagccaggccaagattgagtacaatgaccagaatgatggcagctgtgatgtgaagtactggcccaaggagcctggagaatatgctgtgcacatcatgtgtgatgatgaggacatcaaggacagcccctacatggccttcatccacccagccaccggcggctacaacccagacctggtgcgggcctacggccctggcctggagaagagcggctgcatcgtgaacaacctggccgagttcaccgtggaccccaaggatgctgggaaggcccccctgaagatctttgcccaggatggagagggccagagaattgacatccagatgaagaacaggatggatggcacctacgcctgcagctacacccctgtgaaggccatcaagcacaccatcgctgtggtgtggggcggcgtgaacatcccccacagcccctacagagtgaacatcggccagggcagccacccccagaaggtgaaggtgtttggacctggggtggagaggagcggcctgaaggccaatgagcccacccacttcaccgtggactgcacagaggccggggagggagatgtgtctgtgggcatcaagtgtgatgcccgggtgctgtctgaagatgaagaagatgtggactttgacatcatccacaatgccaatgacaccttcaccgtgaagtatgtgcccccagctgctggccgctacaccatcaaggtgctgtttgccagccaggagatcccagccagccccttccgggtgaaggtggaccccagccatgatgccagcaaggtgaaggccgagggccctggcctgagcaaggccggcgtggagaatggcaagcccacccacttcaccgtgtacaccaagggagctgggaaggcccccctgaatgtgcagttcaacagccccctgcctggagatgctgtgaaggacctggacatcatcgacaactatgactacagccacacagtgaagtacacccccacccagcagggcaacatgcaggtgctggtgacctacggcggggaccccatccccaagagccccttcaccgtgggcgtggccgcccccctggacctgagcaagatcaagctgaatggcctggagaacagagtggaggtgggcaaggaccaggagttcaccgtggacaccagaggagctgggggccagggcaagctggatgtgaccatcctgagccccagcaggaaggtggtgccctgcctggtgacccctgtgacaggccgggagaacagcacagccaagttcatcccccgggaggagggcctgtatgctgtggatgtgacctatgatggccaccctgtgcccggcagcccctacacagtggaggccagcctgcccccagaccccagcaaggtgaaggcccacggccctggcctggagggcggcctggtgggcaagccagctgagttcaccatcgacaccaagggggccggcaccggcggcctgggcctgactgtggagggcccctgtgaggccaagattgagtgcagcgacaatggagatggcacctgcagcgtgtcctacctgcccaccaagccaggagagtactttgtgaacatcctgtttgaggaggtgcacatccctggcagccccttcaaggctgacatcgagatgccctttgaccccagcaaggtggtggccagcggccctggcctggagcacggcaaggtgggggaggccggcctgctgtctgtggactgcagcgaggccggccctggggccctgggcctggaggccgtgtctgacagcggcaccaaggccgaggtgtccatccagaacaacaaggatggcacctatgctgtgacctacgtgcccctgacagctggcatgtacaccctgaccatgaagtatggaggagagctggtgccccacttccctgcccgggtgaaggtggagcctgctgtggacaccagccgcatcaaggtgtttggacctggcatcgagggcaaggatgtgttccgggaggccaccacagacttcaccgtggacagccggcccctgacccaggtgggcggggaccacatcaaggcccacatcgccaaccccagcggggccagcacagaatgttttgtgacagacaatgctgatggcacctaccaggtggagtacaccccatttgagaagggcctgcacgtggtggaggtgacctatgatgatgtgcccatccccaacagccccttcaaggtggccgtgacagagggctgccagcccagccgggtgcaggcccagggccctggcctgaaggaggccttcaccaacaagcccaacgtgttcaccgtggtgaccaggggggccggcatcggcggcctgggcatcaccgtggagggccccagcgagagcaagatcaactgccgggacaacaaggatggcagctgcagcgctgagtacatcccctttgcccctggggactatgatgtgaacatcacctatggaggagcccacatccctggcagccccttccgggtgcctgtgaaggatgtggtggaccccagcaaggtgaagattgctggccctggcctgggcagcggcgtgcgggcccgggtgctgcagagcttcaccgtggacagcagcaaggccggcctggcccccctggaggtgcgggtgctgggcccccggggcctggtggagcctgtgaatgtggtggacaatggagatggcacccacacagtgacctacacccccagccaggagggcccctacatggtgtctgtgaagtatgcagatgaggagatccccaggagccccttcaaggtgaaggtgctgcccacctatgatgccagcaaggtgacagccagcggccctggcctgagcagctatggagtgcctgccagcctgcctgtggactttgccattgatgccagagatgctggggagggcctgctggccgtgcagatcacagaccaggagggcaagcccaagagggccatcgtgcatgacaacaaggatggcacctatgctgtgacctacatcccagacaagacaggccgctacatgattggagtgacctatggaggagatgacatccccctgagcccctaccgcatccgggccacccagacaggagatgccagcaagtgcctggccaccggccctggcatcgccagcacagtgaagacaggagaggaggtgggctttgtggtggatgccaagacagctgggaagggcaaggtgacctgcaccgtgctgaccccagatggaacagaggccgaggctgatgtgattgaaaatgaagatggcacctatgacatcttctacacagctgccaagccaggcacctacgtgatctacgtgcgctttggaggagtggacatccccaacagccccttcaccgtgatggccacagatggagaggtgacagctgtggaggaggcccctgtgaatgcctgccccccaggcttccggccctgggtgacagaggaggcctacgtgcctgtgtctgacatgaatggcctgggcttcaagccctttgacctggtgatcccctttgctgtgaggaaaggagagatcactggagaggtgcacatgcccagcggcaagacagccaccccagagatcgtggacaacaaggatggcaccgtgacagtgcgctatgcccccacagaggtgggcctgcacgagatgcacatcaagtacatgggcagccacatccctgagagccccctgcagttctacgtgaactaccccaacagcggctctgtgtctgcctacggccctggcctggtgtatggagtggccaacaagacagccaccttcaccatcgtgacagaagatgctggggagggcggcctggacctggccatcgagggccccagcaaggccgagatcagctgcatcgacaacaaggatggcacctgcaccgtgacctacctgcccaccctgcccggggactacagcatcctggtgaagtacaatgacaagcacatccctggcagccccttcaccgccaagatcacagatgacagccgccgctgcagccaggtgaagctgggcagcgctgctgacttcctgctggacatcagcgagacagacctgagcagcctgacagccagcatcaaggcccccagcggcagagatgagccctgcctgctgaagaggctgcccaacaaccacatcggcatctccttcatcccccgggaggtgggggagcacctggtgtccatcaagaagaatggaaaccacgtggccaacagccctgtgtccatcatggtggtgcagagcgagattggagatgcccggcgggccaaggtgtatggccggggcctgtctgagggccgcacctttgagatgtctgacttcatcgtggacaccagagatgctggctacggcggcatcagcctggccgtggagggccccagcaaggtggacatccagacagaggacctggaggatggcacctgcaaggtgtcctacttccccaccgtgcctggggtgtacatcgtgtccaccaagtttgctgatgaacatgtgcccggcagccccttcaccgtgaagatcagcggggagggccgggtgaaggagagcatcaccaggaccagccgggcccccagcgtggccaccgtgggcagcatctgtgacctgaacctgaagatccctggggtgcgggtgatgaactgcagcgcccagatcctgtggggctggagggtgcagttccacacaggcagcaggaaccagcagcagtag

SEQ ID NO: 279408 - DNA, 6453 bp, Artificial Sequence
  derived and/or modified sequence
atgcccgtgaccgagaaggacctggccgaggacgccccctggaagaaaatacaacagaacaccttcacacggtggtgcaacgaacaccttaagtgtgttaacaaacggatcgggaacttgcagaccgatctctctgatggcttgcggctcattgcgctgctagaggtgttgagccaaaagcgcatgtaccgcaagtaccaccagagaccgacctttaggcaaatgcaactggagaatgtctcagttgccctggagtttctagatcgagagtcaatcaagctggtgagcatcgattctaaggccatcgtggacgggaatctcaagcttattctagggctggtctggaccctcatcttgcactactctatttcaatgcccgtttgggaagacgagggcgacgacgatgctaaaaagcagacacctaagcaaaggctcctgggctggatccagaacaagattccttatctgcccatcaccaacttcaatcagaattggcaggacggtaaagcactgggggccctggtggatagttgtgctccaggattgtgtcccgactgggaaagctgggaccctcaaaagccggtggacaatgctagggaggcgatgcagcaggctgatgattggcttggtgtgccacaggtgattactcccgaagagatcattcacccagacgtcgacgagcactctgtgatgacttatctgagccaattccccaaggcaaaattgaagccaggggccccattaaaaccaaaactaaatcctaaaaaggcgcgggcctacggaagagggattgaaccgaccggaaacatggtgaaacagccggcaaagttcaccgtggacaccatttccgctggccagggagacgtgatggtgttcgtggaagatccagaaggcaataaagaagaagcccaggtgacccccgattccgacaaaaataagacctatagcgtggagtacctccccaaagttacaggacttcacaaggttaccgtcctctttgcaggccaacatatttccaaatcccctttcgaggtcagcgttgataaggctcagggcgacgcctccaaagtgacagccaagggcccaggactggaggccgtgggcaatatcgcgaacaaacccacctacttcgacatttacactgctggagctggggtgggtgacattggcgtcgaagtggaggacccccaggggaagaacacggtggagttacttgtcgaagataaaggcaaccaggtgtacagatgcgtatataaacctatgcaaccaggtccccacgtggtcaaaatttttttcgctggggacaccattcctaaaagcccattcgtcgtgcaagtaggagaagcctgcaatcctaacgcttgtagggcctctggtcggggtctgcagccaaaaggcgtgagaataagagaaaccacggacttcaaagtggacacaaaggccgccggaagcggggaactgggcgtcacaatgaagggccctaagggactagaagagttagttaagcaaaaggatttcctcgatggggtgtacgcctttgagtactatcctagcacaccaggcagatattccatagccattacctggggtggccatcacatccccaagagtccatttgaagtccaggtcgggcccgaagccggaatgcaaaaggttagagcctgggggcctggcctccacgggggaatcgtgggccggagcgccgactttgtagtggagtctatcggatcagaggtgggaagtttaggttttgctatcgagggaccttcccaggcaaagattgagtataacgaccaaaatgacggttcctgcgacgtaaagtactggccaaaggaacccggtgaatacgccgtccacattatgtgtgacgatgaggatatcaaagactctccttacatggccttcatccaccccgcaacaggaggatacaatccagatttggtccgggcatacgggccaggactagaaaagagcggatgcatcgttaacaacctggccgagttcacagtggatcccaaagatgctggcaaggccccactcaagatctttgcacaagacggggaaggtcagagaattgacattcagatgaagaaccgtatggatggcacctacgcttgcagctacacgcccgtgaaggccatcaagcacaccattgcggtggtgtggggcggcgtgaacattccccatagcccgtatcgcgtgaacatcgggcaggggtcgcatccccagaaggttaaggtgtttggaccaggagtggaacggagcggactgaaggccaatgagcctacccattttactgtggattgcactgaagcgggagagggtgacgtgtccgtcggaatcaaatgcgacgctcgggttttatctgaggatgaagaggacgtggacttcgacatcattcacaacgctaacgatacttttaccgtgaagtatgttccaccggcagcaggccgctacacaattaaggtgctcttcgccagccaggaaatccctgcgtctccatttagagtgaaagttgacccttctcatgatgctagtaaagtaaaggccgagggccccggcctgagcaaggcaggcgtagagaatggtaagcccacacacttcactgtgtatactaagggggccgggaaagccccactgaacgtacagtttaattcccctctgccaggtgacgcagtgaaggatctcgacatcatagacaactatgactacagccatacggtgaagtatactccaacacagcagggaaacatgcaagtcttggttacttacggcggagacccaatcccaaaatcgccatttactgtcggagtcgcggcccctttggatctgagcaagatcaagctaaatggcttagaaaaccgggtcgaggtgggtaaggaccaggagtttactgttgatacacgaggagcgggcggccaggggaagttggacgtcacaatcctgtcccccagcagaaaggtggtcccatgtctggttacacccgtgaccgggagggagaattcgactgcgaagttcatccccagggaagagggtctctacgcagtagatgttacatatgacggacacccagtacccggttctccttacaccgtagaagcgtccctgccccccgaccctagtaaggtgaaggctcatggccctggactcgagggcggcctggttggaaagcctgctgagtttacgatcgacacaaagggcgcaggtacaggggggctcggactgaccgtagaggggccctgtgaggctaaaattgaatgttcagataacggagatggtacttgcagtgttagctatttacccacaaaacccggggagtacttcgtgaatatcctgttcgaggaggtgcatattcctggctccccgtttaaggccgacatcgaaatgccctttgaccccagcaaagtcgtggccagtgggcccggattggagcatggaaaggtcggtgaggccgggctgctgtctgtcgattgtagtgaggccggtcccggagctctcggcttggaggcagtgtcagattccggtaccaaagccgaggtttcaatccaaaacaacaaagacggcacttatgctgtgacatatgtgcctctcaccgccgggatgtatacactgactatgaagtacggcggcgaactggtgccacacttccccgcgagggtcaaggtggagcctgccgtcgacacctcacgaattaaggttttcggtcctggcatcgaaggtaaggatgttttccgcgaggcaaccacggacttcactgtggactcccgacctctaacccaggtgggtggtgatcacattaaggcacacatcgctaatccatcaggggcgtccactgagtgctttgtgaccgacaacgcagacggaacctatcaggttgagtacacgccatttgagaaaggcctacacgtggtggaagtgacttatgatgatgtccccatccctaactctccatttaaagtcgccgttaccgagggctgccagcccagcagagtccaggcccagggccctggactgaaagaagccttcacaaacaagcctaatgttttcactgtagtgaccagaggggccggcattggcggtctgggcatcaccgtggaaggtccttccgagtctaagatcaactgtagagacaacaaggacggcagttgctcagccgagtacatcccgttcgcccccggagattacgacgtgaatataacctatggcggcgcccacatccccggctcccccttcagagtacccgtgaaggatgttgtggatccgtctaaggtgaagattgccggccccggattgggctctggagtgcgcgccagggtcctgcagtcgtttactgtcgacagtagcaaagcaggtctagcgcccctagaggttagagtgctcgggcctcgcggcctagttgagccggtcaatgtagttgacaacggagacggcacgcacacagtgacttatactcctagccaggagggtccatacatggtaagcgtgaaatatgccgatgaggagatacctaggtcaccctttaaggtaaaggttctgcctacatatgacgcgtccaaagtgacagcaagcggccccggcctgagcagctacggagtccccgcatctctgcctgtagacttcgctatcgatgcaagagacgcaggagagggcttgctcgccgtccaaatcacagatcaggagggtaagccaaaacgcgccattgtgcatgacaataaagatggaacttatgctgtgacatatattccagataagacaggcaggtatatgataggcgttacctatggcggcgatgacataccattatccccgtacaggattagggcgactcaaacgggcgatgcatcaaagtgccttgcgaccgggcctggcatcgcctctaccgtgaagaccggcgaggaagttggttttgtggtcgacgccaagacagcaggcaagggaaaggtcacttgcactgtgttgacccctgatggcacagaagccgaggctgatgttattgaaaatgaagatggcacgtatgatatcttctacaccgcggcgaagccggggacgtatgtgatctatgttagattcgggggcgtcgacattccgaacagtccgtttacagttatggcaaccgacggcgaagttaccgcagttgaggaggctcccgtgaacgcatgtccccctggattcagaccttgggtaaccgaggaggcatatgtccccgtgtccgatatgaacggtctgggcttcaagccttttgatctggtgataccctttgccgtgcgaaagggcgagatcacaggcgaggtgcatatgccaagcgggaagaccgcaacacccgagattgtggacaacaaagacggcacggttactgtacgctacgctccaacagaggttggattacacgaaatgcacattaaatacatgggcagtcatattccagagtcccctctgcagttctatgtgaattatccgaattccggcagtgtgagcgcatacggtcccggcctggtgtatggcgtagcaaacaagacagcaacgtttacgattgtaacagaggacgccggggaaggcgggctcgatcttgctattgagggaccctcaaaagcagagatttcttgcattgataataaggacgggacctgcacagtgacctacctgcccactctgccgggggactattccattctggtgaagtacaatgacaagcacatccctgggtctcccttcaccgccaaaattactgatgatagcaggcgctgctctcaggtgaagcttggatctgccgcagattttctgctcgacattagcgagacagacctctcctctctgaccgccagcatcaaggcccctagtgggagagacgaaccgtgccttctgaaaaggttaccgaacaaccacatcggtatcagctttattccgagagaggtcggagaacacctggttagtattaaaaaaaatgggaatcacgtggccaacagcccggtttccatcatggttgttcaatcagagattggcgatgcacgaagagcgaaggtgtatgggagggggctgtccgagggccgcacattcgaaatgtctgacttcatcgtggatacaagggatgccggctacggtgggatcagcctggctgtcgaaggcccgtccaaggtggacattcagacggaggacttagaagatgggacatgcaaagttagctacttcccgaccgtccccggggtctacatcgtgtctacgaagtttgctgacgagcacgtgccaggatccccattcacagtcaaaatctcaggcgaggggagagtaaaagaaagtattacaagaacatcacgggcacctagcgtcgcgacagtgggatcaatctgtgacctgaatttaaaaataccaggggtgcgagtgatgaactgctcagcccagatattgtggggctggagagtgcagtttcatacaggatcccgtaaccaacagcagtag

SEQ ID NO: 279409 - DNA, 6452 bp, Artificial Sequence
  derived and/or modified sequence
atgcccgttacggagaaggacctggccgaggatgccccatggaagaagattcagcagaacacatttaccaggtggtgcaatgaacacttaaagtgtgtgaataagcgaattggcaatctacagactgacctgtccgatgggctgcgcttaatagccctgttagaggttctgtcccagaagcggatgtatcgcaagtaccaccagcggcctactttcagacaaatgcagctcgagaacgtgtctgtcgccctagaatttctggatcgtgagtccataaaactggtgtccatcgacagcaaagcgatagtagacggaaatttgaaactgattttgggcttggtatggacgttgatcttacactactccatcagcatgcctgtgtgggaagacgaaggcgacgatgatgcgaagaaacagactccgaagcaacgtctcctggggtggattcagaacaagatcccgtacctccctatcacaaattttaatcaaaactggcaagatgggaaagcgctcggggcactagtcgattcctgcgctcccggtttatgtcctgactgggaaagctgggatccccaaaagcctgttgacaacgccagggaagctatgcaacaggctgatgattggctcggcgtgccacaagtcataacaccggaggagattatccaccctgatgtggacgagcattcagtgatgacctacctttctcagttccccaaggccaagctcaagcccggagctcccctgaagccaaagctaaatccgaaaaaggcaagggcttacgggcgaggtattgagcccaccggcaatatggtcaagcagccggcaaaattcacagttgacactatcagtgcagggcagggagacgtcatggtgtttgtcgaagaccctgagggtaacaaagaggaggcccaggtgacacctgacagcgacaaaaacaaaacctactccgtagagtacctgccgaaggtgacgggattgcataaagtgactgtgctattcgcgggacagcatatcagcaagtctcccttcgaagtgtccgtggacaaagcccaaggcgacgccagtaaggttacagcgaaggggcctgggctcgaggccgtgggtaatattgcaaataagcccacatactttgatatctacactgccggagctggcgtgggggacatcggcgtggaagttgaagatccccagggtaagaacaccgtcgaactgctcgtcgaggacaagggaaaccaggtgtaccgctgtgtctataaaccgatgcagcccggacctcacgtagtgaaaatatttttcgccggagacacgattcccaaaagcccattcgtggtgcaggtgggcgaagcatgcaaccctaatgcctgtcgagccagcgggcgaggtctgcagccaaaaggtgttcggatacgtgaaaccaccgactttaaagtggataccaaggccgctgggagcggagagctaggagttaccatgaagggaccaaagggattggaagaactggtcaagcagaaagatttcttggacggggtctacgccttcgagtattacccttccacacccggacgatattccatcgccataacatggggtggacatcatatccccaaaagtccgttcgaagtgcaggtgggacccgaagcaggcatgcagaaggtgagagcttggggtccagggcttcatggaggtatcgtgggacgatcagccgacttcgttgtggagtccatcgggtccgaagtagggtctctgggattcgctattgagggaccctcacaggcgaaaatcgagtacaacgatcagaacgatgggtcctgcgacgtgaagtattggcccaaggaaccaggagagtacgccgtccacattatgtgtgatgacgaagacatcaaggacagcccttatatggcgtttatccaccccgctacagggggttataaccctgacctggtccgagcatatggtcctggcctcgagaaatcagggtgcatcgtgaataatttggccgaattcactgtagatcccaaagatgccggaaaggccccacttaaaatatttgcgcaggatggtgaagggcagaggatcgatatacagatgaagaacaggatggatggcacctacgcttgcagctatacccccgtgaaggctatcaaacatactatcgccgtggtttggggtggcgtgaacattccccactctccttaccgcgtcaatattggtcagggctcacatcctcagaaggtgaaagtttttggcccaggcgtggagcgtagtggcctgaaggccaatgaacccacgcacttcacggtggactgcacggaggccggagagggggatgtgagtgttggcattaagtgcgatgcacgggtgttgagcgaagacgaggaggacgtggattttgatattatccacaatgcaaatgacacttttacagtgaagtatgtgccccctgctgcaggccgatatactataaaagtcctgttcgccagccaggaaatccccgcaagcccgtttagagtgaaagtggacccctcgcatgacgcctccaaagtgaaggctgaaggcccagggctcagcaaagccggagtggaaaatgggaaaccaactcatttcaccgtgtatacaaagggagcgggaaaggcaccgctgaacgtgcagttcaatagcccccttccgggtgatgccgtgaaagatcttgacattatcgataattacgattattcccacacggtgaagtatacccctacacaacaggggaacatgcaggttttggtgacatatggcggagatcccatcccaaagtcccccttcacagtgggagtggccgctcctctagacctttccaaaataaaacttaacgggcttgagaatcgggtagaggtgggaaaagatcaggagttcactgtggatactcgtggcgcaggcggacagggaaagctcgacgtgacaattctctctccatcaagaaaagttgtgccatgtctcgtaacacctgtgaccgggcgtgaaaattccactgcaaagtttatccctcgagaggaggggctttacgccgtcgatgtgacttatgacggccatcccgttcccggttcaccgtatacagttgaagccagtctgccccctgaccctagcaaagttaaagcccacggcccaggtctggagggcggactggtcggtaaacctgctgaattcacaattgacacaaagggtgctggtacagggggactggggttaacagtcgaagggccttgtgaggctaaaatagaatgctccgataacggcgatggtacttgcagcgtgtcatacctgcccaccaaaccaggcgaatacttcgtcaacattctctttgaggaggtgcacatccccggaagtcctttcaaagcagacatagaaatgccattcgatccttctaaggtcgtcgcctcgggacctgggctggaacacggcaaggtgggcgaagccggattactgagcgtcgactgctctgaggctggccctggtgccctgggcctcgaggccgtatccgattcaggcacaaaggctgaagtatcaatccagaataacaaggatggaacatacgcagtgacttacgttccattaaccgctggtatgtatactctgaccatgaagtatggtggggagctggttcctcattttcctgctcgagtaaaagtggagccagctgttgatacctcacgcattaaggtgttcggacccggaattgagggcaaggacgtctttagggaagccaccacggatttcactgttgatagcagacctctgacccaggtgggaggagaccacatcaaagcgcacatcgcgaacccatccggcgcttccaccgagtgcttcgtcactgacaatgctgacggaacctaccaggttgagtacacgccctttgagaagggactacacgtcgtggaggtgacatacgacgacgtgcccatccctaactctcctttcaaagttgctgtgactgaaggctgtcagccctcaagggtgcaggctcagggaccgggtttgaaggaagctttcacaaacaagccgaatgtttttactgtggtcaccaggggtgctggcatcgggggtcttggtattaccgtagagggaccttcagagagcaagattaactgcagagataacaaggacgggagttgctccgccgagtacatcccttttgcccctggggattacgacgtgaacattacttacggaggagctcatataccgggttcccctttccgtgtgccagtaaaagatgttgtagatccgagtaaggttaaaatagctggaccaggcttagggtccggcgtccgagccagagtactgcagagcttcacggtggactcgtccaaggcaggcctggcccctctcgaagtgagggttcttgggcctcggggtctcgtcgagcctgttaacgtcgtggataatggggacggaacgcatacggtaacctacactccttctcaggaagggccatacatggtgtcagtgaagtacgcagatgaagaaatcccgaggtctcccttcaaagtcaaagtgttgcccacctatgatgcatcaaaggtgaccgcctcggggccaggcctgagctcttacggagtgcctgcctcactccccgtggacttcgcaatcgacgcaagagacgcgggtgaagggctccttgcggtgcagatcactgaccaagagggcaagcctaaacgcgcaatcgtgcacgataataaagacggaacatacgccgtaacctacattcctgacaaaaccggacgctatatgattggcgtgacctacggtggggatgacatcccactgagtccgtataggataagagcgacacagaccggggacgcctctaagtgcctggccactggtcctggcattgcatccacagtcaagacaggggaagaagtgggcttcgtcgtggatgcaaaaacagcgggaaaaggtaaggtaacatgcactgtgctgacaccggatgggacagaagcagaggctgatgtgatcgaaaatgaggacggtacctacgatatcttctacacagccgctaaacccggtacctacgtgatttacgtccgattcggaggcgttgatatcccaaacagtccctttactgtaatggctaccgatggcgaggtcacagctgttgaagaagcgccagtgaatgcgtgcccacccggttttagaccctgggttaccgaggaagcctacgtgcccgtgtccgatatgaatggcttaggctttaaaccattcgaccttgtgatcccgtttgccgtccgcaaaggtgaaattacaggcgaggtgcatatgccgtccgggaagacggctactccggagattgtagataacaaggatggaacggtcactgtgcggtacgcccctactgaggtcgggttacacgagatgcatattaagtatatgggctcccacatccccgaaagccctcttcagttttacgtgaactatccaaattcaggctctgtctctgcttacgggccaggcctggtatatggggtagccaataaaaccgccacctttacaattgttacagaggacgcgggtgaaggcggactggacctggcaatcgaaggcccatctaaagccgaaattagctgcattgacaataaagatggcacctgtactgtcacttatctccctactctgccaggagattacagcattctggtgaaatacaacgataaacatattcctgggtccccatttacagctaaaataacagatgacagccgaagatgctcgcaggtaaagttaggatccgccgcagattttctactggatatcagcgagaccgatctaagctctctaacagccagcatcaaagccccttccggcagggacgagccctgccttctcaaaaggctgccaaacaaccacatagggatatcttttattcctcgggaggtgggggaacatctcgtcagcattaaaaagaacgggaatcacgtggccaattcccctgtaagtataatggtggttcagtccgaaatcggcgatgcccgtagagctaaagtctacgggaggggactgtcagagggcagaaccttcgagatgagcgatttcattgtagatacccgcgatgcgggatacggaggcatcagtctagcggtagaggggccatcaaaagtggacatacagacggaggacttagaggacggtacatgcaaagtcagctacttccctaccgtacccggtgtctatatagtgtccaccaagtttgcagacgagcacgtccccggttccccttttaccgtgaagatcagtggcgagggcagagttaaggaaagtataacaaggacatcaagagcccctagcgtcgcaacagtagggtcgatttgcgacctgaatctgaagattcctggtgtgagagtgatgaactgtagcgcgcagatcctgtggggatggcgtgtgcagtttcatactggctctagaaaccaacagcaata

SEQ ID NO: 279410 - DNA, 6453 bp, Artificial Sequence
  derived and/or modified sequence
atgcccgtgaccgagaaggacctggccgaggacgccccctggaagaagatccagcagaacaccttcaccagatggtgcaacgagcacctgaagtgcgtgaacaagagaatcggcaacctgcagaccgacctgagcgacggcctgagactgatcgccctgctggaggtgctgagccagaagagaatgtacagaaagtaccaccagagacccaccttcagacagatgcagctggagaacgtgagcgtggccctggagttcctggacagagagagcatcaagctggtgagcatcgacagcaaggccatcgtggacggcaacctgaagctgatcctgggcctggtgtggaccctgatcctgcactacagcatcagcatgcccgtgtgggaggacgagggcgacgacgacgccaagaagcagacccccaagcagagactgctgggctggatccagaacaagatcccctacctgcccatcaccaacttcaaccagaactggcaggacggcaaggccctgggcgccctggtggacagctgcgcccccggcctgtgccccgactgggagagctgggacccccagaagcccgtggacaacgccagagaggccatgcagcaggccgacgactggctgggcgtgccccaggtgatcacccccgaggagatcatccaccccgacgtggacgagcacagcgtgatgacctacctgagccagttccccaaggccaagctgaagcccggcgcccccctgaagcccaagctgaaccccaagaaggccagagcctacggcagaggcatcgagcccaccggcaacatggtgaagcagcccgccaagttcaccgtggacaccatcagcgccggccagggcgacgtgatggtgttcgtggaggaccccgagggcaacaaggaggaggcccaggtgacccccgacagcgacaagaacaagacctacagcgtggagtacctgcccaaggtgaccggcctgcacaaggtgaccgtgctgttcgccggccagcacatcagcaagagccccttcgaggtgagcgtggacaaggcccagggcgacgccagcaaggtgaccgccaagggccccggcctggaggccgtgggcaacatcgccaacaagcccacctacttcgacatctacaccgccggcgccggcgtgggcgacatcggcgtggaggtggaggacccccagggcaagaacaccgtggagctgctggtggaggacaagggcaaccaggtgtacagatgcgtgtacaagcccatgcagcccggcccccacgtggtgaagatcttcttcgccggcgacaccatccccaagagccccttcgtggtgcaggtgggcgaggcctgcaaccccaacgcctgcagagccagcggcagaggcctgcagcccaagggcgtgagaatcagagagaccaccgacttcaaggtggacaccaaggccgccggcagcggcgagctgggcgtgaccatgaagggccccaagggcctggaggagctggtgaagcagaaggacttcctggacggcgtgtacgccttcgagtactaccccagcacccccggcagatacagcatcgccatcacctggggcggccaccacatccccaagagccccttcgaggtgcaggtgggccccgaggccggcatgcagaaggtgagagcctggggccccggcctgcacggcggcatcgtgggcagaagcgccgacttcgtggtggagagcatcggcagcgaggtgggcagcctgggcttcgccatcgagggccccagccaggccaagatcgagtacaacgaccagaacgacggcagctgcgacgtgaagtactggcccaaggagcccggcgagtacgccgtgcacatcatgtgcgacgacgaggacatcaaggacagcccctacatggccttcatccaccccgccaccggcggctacaaccccgacctggtgagagcctacggccccggcctggagaagagcggctgcatcgtgaacaacctggccgagttcaccgtggaccccaaggacgccggcaaggcccccctgaagatcttcgcccaggacggcgagggccagagaatcgacatccagatgaagaacagaatggacggcacctacgcctgcagctacacccccgtgaaggccatcaagcacaccatcgccgtggtgtggggcggcgtgaacatcccccacagcccctacagagtgaacatcggccagggcagccacccccagaaggtgaaggtgttcggccccggcgtggagagaagcggcctgaaggccaacgagcccacccacttcaccgtggactgcaccgaggccggcgagggcgacgtgagcgtgggcatcaagtgcgacgccagagtgctgagcgaggacgaggaggacgtggacttcgacatcatccacaacgccaacgacaccttcaccgtgaagtacgtgccccccgccgccggcagatacaccatcaaggtgctgttcgccagccaggagatccccgccagccccttcagagtgaaggtggaccccagccacgacgccagcaaggtgaaggccgagggccccggcctgagcaaggccggcgtggagaacggcaagcccacccacttcaccgtgtacaccaagggcgccggcaaggcccccctgaacgtgcagttcaacagccccctgcccggcgacgccgtgaaggacctggacatcatcgacaactacgactacagccacaccgtgaagtacacccccacccagcagggcaacatgcaggtgctggtgacctacggcggcgaccccatccccaagagccccttcaccgtgggcgtggccgcccccctggacctgagcaagatcaagctgaacggcctggagaacagagtggaggtgggcaaggaccaggagttcaccgtggacaccagaggcgccggcggccagggcaagctggacgtgaccatcctgagccccagcagaaaggtggtgccctgcctggtgacccccgtgaccggcagagagaacagcaccgccaagttcatccccagagaggagggcctgtacgccgtggacgtgacctacgacggccaccccgtgcccggcagcccctacaccgtggaggccagcctgccccccgaccccagcaaggtgaaggcccacggccccggcctggagggcggcctggtgggcaagcccgccgagttcaccatcgacaccaagggcgccggcaccggcggcctgggcctgaccgtggagggcccctgcgaggccaagatcgagtgcagcgacaacggcgacggcacctgcagcgtgagctacctgcccaccaagcccggcgagtacttcgtgaacatcctgttcgaggaggtgcacatccccggcagccccttcaaggccgacatcgagatgcccttcgaccccagcaaggtggtggccagcggccccggcctggagcacggcaaggtgggcgaggccggcctgctgagcgtggactgcagcgaggccggccccggcgccctgggcctggaggccgtgagcgacagcggcaccaaggccgaggtgagcatccagaacaacaaggacggcacctacgccgtgacctacgtgcccctgaccgccggcatgtacaccctgaccatgaagtacggcggcgagctggtgccccacttccccgccagagtgaaggtggagcccgccgtggacaccagcagaatcaaggtgttcggccccggcatcgagggcaaggacgtgttcagagaggccaccaccgacttcaccgtggacagcagacccctgacccaggtgggcggcgaccacatcaaggcccacatcgccaaccccagcggcgccagcaccgagtgcttcgtgaccgacaacgccgacggcacctaccaggtggagtacacccccttcgagaagggcctgcacgtggtggaggtgacctacgacgacgtgcccatccccaacagccccttcaaggtggccgtgaccgagggctgccagcccagcagagtgcaggcccagggccccggcctgaaggaggccttcaccaacaagcccaacgtgttcaccgtggtgaccagaggcgccggcatcggcggcctgggcatcaccgtggagggccccagcgagagcaagatcaactgcagagacaacaaggacggcagctgcagcgccgagtacatccccttcgcccccggcgactacgacgtgaacatcacctacggcggcgcccacatccccggcagccccttcagagtgcccgtgaaggacgtggtggaccccagcaaggtgaagatcgccggccccggcctgggcagcggcgtgagagccagagtgctgcagagcttcaccgtggacagcagcaaggccggcctggcccccctggaggtgagagtgctgggccccagaggcctggtggagcccgtgaacgtggtggacaacggcgacggcacccacaccgtgacctacacccccagccaggagggcccctacatggtgagcgtgaagtacgccgacgaggagatccccagaagccccttcaaggtgaaggtgctgcccacctacgacgccagcaaggtgaccgccagcggccccggcctgagcagctacggcgtgcccgccagcctgcccgtggacttcgccatcgacgccagagacgccggcgagggcctgctggccgtgcagatcaccgaccaggagggcaagcccaagagagccatcgtgcacgacaacaaggacggcacctacgccgtgacctacatccccgacaagaccggcagatacatgatcggcgtgacctacggcggcgacgacatccccctgagcccctacagaatcagagccacccagaccggcgacgccagcaagtgcctggccaccggccccggcatcgccagcaccgtgaagaccggcgaggaggtgggcttcgtggtggacgccaagaccgccggcaagggcaaggtgacctgcaccgtgctgacccccgacggcaccgaggccgaggccgacgtgatcgagaacgaggacggcacctacgacatcttctacaccgccgccaagcccggcacctacgtgatctacgtgagattcggcggcgtggacatccccaacagccccttcaccgtgatggccaccgacggcgaggtgaccgccgtggaggaggcccccgtgaacgcctgcccccccggcttcagaccctgggtgaccgaggaggcctacgtgcccgtgagcgacatgaacggcctgggcttcaagcccttcgacctggtgatccccttcgccgtgagaaagggcgagatcaccggcgaggtgcacatgcccagcggcaagaccgccacccccgagatcgtggacaacaaggacggcaccgtgaccgtgagatacgcccccaccgaggtgggcctgcacgagatgcacatcaagtacatgggcagccacatccccgagagccccctgcagttctacgtgaactaccccaacagcggcagcgtgagcgcctacggccccggcctggtgtacggcgtggccaacaagaccgccaccttcaccatcgtgaccgaggacgccggcgagggcggcctggacctggccatcgagggccccagcaaggccgagatcagctgcatcgacaacaaggacggcacctgcaccgtgacctacctgcccaccctgcccggcgactacagcatcctggtgaagtacaacgacaagcacatccccggcagccccttcaccgccaagatcaccgacgacagcagaagatgcagccaggtgaagctgggcagcgccgccgacttcctgctggacatcagcgagaccgacctgagcagcctgaccgccagcatcaaggcccccagcggcagagacgagccctgcctgctgaagagactgcccaacaaccacatcggcatcagcttcatccccagagaggtgggcgagcacctggtgagcatcaagaagaacggcaaccacgtggccaacagccccgtgagcatcatggtggtgcagagcgagatcggcgacgccagaagagccaaggtgtacggcagaggcctgagcgagggcagaaccttcgagatgagcgacttcatcgtggacaccagagacgccggctacggcggcatcagcctggccgtggagggccccagcaaggtggacatccagaccgaggacctggaggacggcacctgcaaggtgagctacttccccaccgtgcccggcgtgtacatcgtgagcaccaagttcgccgacgagcacgtgcccggcagccccttcaccgtgaagatcagcggcgagggcagagtgaaggagagcatcaccagaaccagcagagcccccagcgtggccaccgtgggcagcatctgcgacctgaacctgaagatccccggcgtgagagtgatgaactgcagcgcccagatcctgtggggctggagagtgcagttccacaccggcagcagaaaccagcagcagtag

SEQ ID NO: 279411 - protein, 615 aa, Artificial Sequence
  derived and/or modified sequence
MEPALGPGVQKDLGYLQQWLKAFVGAFKKSISLSSLEPRRPEEAGAEVPLLPLDELHVLAEQLHQADLEQALLLLKLFIILCRNLENIEAGRGQVLVPRVLALLTKLVAELKGCPPPQGRGTQLENVALHALLLCEGLFDPYQTWRRQRSGEVISSKEKSKYKFPPAALPQEFSAFFQESLQNADHLPPILLLRLIHLFCAVLAGGKENGQMAVSDGSVKGLLSVVRGWSRGPAPDPCLVPLALEALVGAVHVLHASRAPPRGPELRALLESYFHVLNADWPAGLSSGPEEALVTLRVSMLDAIPMMLACEDRPVLQATFLSNNCFEHLTRLIQNSKVLDQDTDAIAVHVVRVLTCIMSDSPSAKEVFKERIGYPHLQEVLQSHGPPTHRLLQELLNMAVEGDHSMCPPPPIRNEQPVLVLAQWLPSLPTAELRLFLAQRLRWLCDSCPASRATCVQAGLVGCLLETLSTGLALEARCQEQLLALLQALGRVSIRPMELRHLLRPRPGLDSEPGGAEAGKARHAGAVIRTLSGMARHQGPARALRYFDLTPSMAGIMVPPVQRWPGPGFTFHAWLCLHPMDTAPTPAPPTLPSSGIGGRCYPLRDWRAEVPPLAG

SEQ ID NO: 279412 - DNA, 1848 bp, Artificial Sequence
  derived and/or modified sequence
atggaaccagctttaggaccaggcgttcagaaagacctcggatacctgcagcaatggctgaaagcgtttgttggagcatttaagaagtcaatttcgctttctagtctcgagccaagaaggccggaagaggctggggcggaggtacccttgttgccactggacgagttacacgtactggctgagcagctgcaccaagctgatctggaacaggctctgcttctgttgaaattattcattatattatgtaggaatcttgagaacatcgaggccgggcgaggtcaggtattagttcctcgcgtcctggccttgctaactaagttggttgcggaactgaaggggtgccctccaccccagggcaggggtacccagctagaaaatgtggcacttcacgctcttttactgtgcgaagggctgttcgacccataccagacatggagacgacagcggagcggagaggtgatctcctcaaaagagaaatctaaatacaagtttcccccagcagccctcccacaggagttctcagccttcttccaggagtctttgcaaaacgctgaccacttgccaccgatattacttctgcgactcattcacctgttctgcgccgtcctcgccgggggcaaggaaaacggccagatggccgtgtccgacgggtcagtgaaagggctactgtccgtggtacggggctggtcccgcggcccagccccggatccttgcctcgttcctctggccctcgaggctcttgttggggctgtgcacgtgctgcacgcctcccgggcccctcccagaggccctgaactgcgggctctgctggaatcttactttcacgtgcttaacgcagattggccagcaggactgtcttccggcccagaggaagcgttggtgacactgcgcgtgtcgatgctcgatgccattccaatgatgctggcctgtgaagacaggccagtgctacaagcaaccttcctaagtaacaactgttttgaacacctgacccggctcatccagaactccaaagttctggatcaggacactgacgctattgccgttcatgtcgtcagagtactgacctgtatcatgtcagacagcccgtccgctaaagaggtgttcaaagagcgcattggttatccccatttgcaggaggttctgcagtcgcacggcccccccacccatcgacttcttcaagaactactcaacatggcagtggaaggagatcactcaatgtgtcctcctcccccaataagaaacgaacagccggtgctggtcctggcccagtggttaccatctttacccacagccgaactgcgtctattcctcgctcagcgcttgcgctggttatgtgacagttgtcctgcatcacgcgcgacgtgtgtccaggcaggcctagtaggctgcctgttagaaaccctgtcgaccggactcgcgctagaggccagatgtcaggagcagcttctggcactactccaagccctgggaagagttagcatccgcccgatggaactgaggcatctgctacgacctaggcccggcctcgacagcgagcccggtggagctgaggcaggcaaagctagacatgcaggtgccgttatccgtaccttgtctggaatggcacgacaccagggccctgcgcgggctttacgctattttgaccttacacccagcatggccggcattatggtgcccccggtccagaggtggccaggtccgggatttacttttcacgcttggttatgcctccatcctatggatacagcacccacgccagcccctcccactctgccatcttccgggataggcggtcggtgctaccctctacgggactggcgagcagaagtgccacctctagcaggctag

SEQ ID NO: 279413 - DNA, 1848 bp, Artificial Sequence
  derived and/or modified sequence
atggagcccgccctgggccctggggtgcagaaggacctgggctacctgcagcagtggctgaaggcctttgtgggcgccttcaagaagagcatcagcctgagcagcctggagcccaggaggcctgaggaggccggggctgaggtgcccctgctgcccctggatgagctgcacgtgctggccgagcagctgcaccaggccgacctggagcaggccctgctgctgctgaagctgttcatcatcctgtgcaggaacctggagaacatcgaggccggccggggccaggtgctggtgccccgggtgctggccctgctgaccaagctggtggccgagctgaagggctgccccccaccccagggccggggcacccagctggagaatgtggccctgcacgccctgctgctgtgtgagggcctgtttgacccctaccagacctggaggcggcagaggtctggagaggtgatcagcagcaaggagaagagcaagtacaagtttcctcctgctgccctgccccaggagttcagcgccttcttccaggagagcctgcagaatgctgaccacctgccccccatcctgctgctgcggctcatccacctgttctgtgctgtgctggccggcggcaaggaaaatggccagatggctgtgtctgatggctctgtgaagggcctgctgtctgtggtgcggggctggagccggggccctgccccagacccctgcctggtgcccctggccctggaggccctggtgggcgctgtgcacgtgctgcacgccagccgggccccaccccggggccctgagctgcgggccctgctggagagctacttccacgtgctgaatgctgactggccagctggcctgagcagcggccctgaggaggccctggtgaccctgcgggtgtccatgctggatgccatccccatgatgctggcctgtgaagatagacctgtgctgcaggccaccttcctgagcaacaactgctttgagcacctgaccaggctcatccagaacagcaaggtgctggaccaggacacagatgccatcgctgtgcacgtggtgcgggtgctgacctgcatcatgtctgacagccccagcgccaaggaggtgttcaaggagcgcatcggctacccccacctgcaggaggtgctgcagagccacggcccccccacccaccggctgctgcaggagctgctgaacatggctgtggagggggaccacagcatgtgccccccaccacccatcagaaatgagcagcctgtgctggtgctggcccagtggctgcccagcctgcccacagctgagctgcggctcttcctggcccagaggctgcgctggctgtgtgacagctgcccagccagccgggccacctgtgtgcaggccggcctggtgggctgcctgctggagaccctgagcacaggcctggccctggaggcccgctgccaggagcagctgctggccctgctgcaggccctgggccgggtgtccatccggcccatggagctgcggcacctgctgcggcccaggcctggcctggacagcgagcctggaggagctgaggccggcaaggcccggcatgctggggccgtcatccgcaccctgagcggcatggcccggcaccagggccctgcccgggccctgcgctactttgacctgacccccagcatggccggcatcatggtgccccctgtgcagcgctggccaggccctggcttcaccttccacgcctggctgtgcctgcaccccatggacacagcccccaccccagccccacccaccctgcccagcagcggcatcggcggccgctgctaccccctgcgggactggagggctgaggtgccccccctggccggctag

SEQ ID NO: 279414 - DNA, 1848 bp, Artificial Sequence
  derived and/or modified sequence
atggagcccgccctgggccccggcgtgcagaaggacctgggctacctccagcagtggttaaaggcttttgtgggggcctttaaaaaatcaatctctctctcctctctagagccgcgcaggccagaagaagccggcgcagaagtgcccttgttgcccctagatgaactccacgtgctggcagaacagttgcaccaggccgacttagaacaagccctattgctgctcaaactttttatcattctttgcagaaatttggaaaacatagaagcagggagaggccaggtgctggtgccacgggtcctggccctgcttactaaacttgttgccgagttgaaagggtgcccgccgccacaaggtcgaggcacccagctcgaaaatgtggctcttcacgctctgcttttgtgtgaaggattatttgatccgtaccagacctggcggaggcagaggtccggggaggtcatcagctcaaaggagaaatccaagtacaagtttccaccagctgctcttcctcaggaattttccgccttctttcaggagtccctgcagaacgctgaccatttgccaccaatcctgctcctgagattgattcacctgttttgtgccgtcctagctgggggtaaggaaaatggtcagatggccgttagtgacgggtccgtcaaaggcctgctgagcgtggtgagagggtggtcacgagggccagcgcccgacccgtgcttggtccccctcgccttggaagctcttgtgggcgccgtccatgtgctgcacgcatctcgcgctcctcctcgaggccctgaactacgcgcgctccttgagagctacttccatgttttgaatgccgattggccagcaggcctctctagcgggcccgaagaggcccttgtgaccctgcgtgtcagcatgcttgacgcaattcctatgatgctcgcctgtgaggaccgccccgtgctgcaggccacctttttatccaacaactgtttcgaacacctgacaagattgattcaaaactcaaaggtactcgaccaggacacagacgcaatcgccgttcatgtggtgagagtattgacgtgtatcatgtccgattctccttctgctaaagaggtgttcaaagagcgcattggttatccccacttgcaggaggtgttgcagtcccacggacctcccacccacagactgttacaggaacttctgaacatggctgtggagggtgaccatagtatgtgtcctccgccacccattcgcaacgagcagcccgtactcgtcttggcccagtggctgcctagcttgccaaccgccgagctgcgcctgttcttagcgcagcgcctccgctggctttgcgattcttgcccagcctccagggctacctgcgtgcaggcaggacttgtgggctgtctgctggagacactgagtacaggactggcactggaggcacgctgtcaggagcagctgctggccctgctccaggctctgggcagggtgtctatcaggcccatggagcttcggcatctgctgagacccagacccggcctggactccgagcccgggggggccgaggctggcaaagcgagacacgcaggcgcagtcatccgaactctttccgggatggctcgccaccaagggccggcaagggcactgaggtatttcgatctgactcccagcatggctggaattatggtccccccagtgcagagatggcctggacctggcttcactttccacgcctggctgtgtttacatcccatggacaccgcccccacacctgctcccccaaccctgccctcaagtgggatcgggggacggtgctaccctctcagggactggagagccgaggtgccccctttagccggttag

SEQ ID NO: 279415 - DNA, 1901 bp, Artificial Sequence
  derived and/or modified sequence
aaagttttcctggcagcgcctagacctgggcttagccactgcccctcttgcccatggaaccagctctggggcctggggtccagaaggacctgggttacctgcagcagtggctgaaggcctttgtaggtgccttcaagaagagcatctcactgtcctctctggagccacgaaggccagaggaggcaggtgcagaggtcccgctgctaccactggatgagctgcatgtgctggccgaacagctgcaccaggctgacctggagcaagccctcctgctgctcaagctcttcatcattctctgcaggaacctggagaacatagaggcaggccggggccaagtgctagtgccccgagtgctggcactgttgaccaagttggtggcggagctgaaaggatgcccaccaccccagggccgaggcacgcagttggagaatgtggccctacatgctctgcttctctgcgagggcctctttgacccttaccaaacctggcggcgccagcgcagtggggaagtcatcagctccaaggagaagagcaaatacaagttccctcctgctgctttgccccaggaattcagcgccttcttccaagagagcctacagaatgcagaccacttgcctcccatactgctgttacgtctcatccacctcttctgcgccgtcctcgctggaggaaaggagaacgggcagatggctgtaagtgatggctctgtgaagggcctgctgagtgtggtgcggggctggagccgtgggccagccccggacccgtgcctagtgccactggctctagaggcactggtaggtgcagtccatgtcttgcatgccagccgcgcacctcctcgtggcccagagcttcgtgccctgcttgagagctacttccatgtccttaatgctgactggccagctggtctgagctcaggccccgaagaggcccttgtcaccctccgggtcagcatgctcgacgccatccccatgatgctggcatgtgaagaccggccagtgctgcaagccaccttcctcagcaacaattgctttgaacacctcactcggctcattcagaacagcaaggtcctggaccaagacacagacgccattgcagtccatgtagtcagagtgctgacctgcatcatgagtgactccccctcggccaaggaggtgtttaaggagcgcatcggctaccctcacctgcaggaggttctgcagagccatggtccccccacccatcggctgttgcaagagctgctcaacatggctgtggagggtgaccacagcatgtgcccacctccaccaatccgcaacgagcagccggtactggtgctggcgcagtggctgccgtcattgcccaccgctgagctgcggctcttcctagcgcaacgcctcaggtggctctgtgacagctgccctgccagccgtgccacctgtgtgcaggcaggcctggtgggctgcctgttggagacactcagcacagggctagccctggaggcccgctgccaagagcagctgctggcactgctacaagcactgggccgtgtatcaataaggcccatggagctgcgtcacctgctgcgcccccggccaggattggactcggaaccaggcggagctgaggctggaaaggcccgacacgcaggtgctgtcatccgcacattatcaggcatggccaggcaccagggtcctgcacgtgctctgcgctactttgacctcacgcccagcatggcgggcatcatggtaccccctgtacagcgatggccagggcctggcttcacctttcatgcctggctctgtctgcaccctatggatacagcacctacccctgccccccccaccctgcccagctcagggattggcgggcgatgttaccccctcagggattggcgggcggaagtcccgcccctcgccggctga

SEQ ID NO: 279416 - DNA, 1848 bp, Artificial Sequence
  derived and/or modified sequence
atggagcccgcactcggaccaggggttcagaaggatttggggtatctacagcaatggctgaaggccttcgtgggcgcttttaagaaatcaattagcttgagtagcctggaaccacgtagaccagaggaggccggagctgaagtgcccctgctccccctcgacgagttgcatgtgctggcagaacagctacaccaggccgatctggagcaagctctgctgttactgaaactgtttatcatactctgtagaaacctcgaaaatatcgaagcaggtaggggccaggtgttagtgccgagagtccttgccctcctgactaagcttgtggcggagttaaaagggtgcccccctccccagggcagggggactcagctggagaacgtagccctccacgcccttctgttgtgtgagggcctgttcgacccttatcaaacttggaggcgtcagcgtagcggtgaagtgatctcatccaaggagaagtcgaaatataaattccccccagccgctctgccccaagaatttagcgcgtttttccaggaatccctccagaatgcagaccacctcccacctattctgttgctaaggctaatccaccttttctgcgcagttctggccggtgggaaggaaaacggccagatggcggtttccgatggctccgtgaaaggcctgctctctgttgtcagaggctggtctcggggaccggctcccgatccctgccttgttcctttagcattagaagctctggtgggtgcagtgcatgtgctccacgctagtagggcccctccccgagggccagagctcagggccttattggaatcctacttccatgtgctgaatgcggactggccagcaggactgtcatctggcccagaggaggccctggtcactctccgcgttagtatgctggatgctattcctatgatgctggcctgtgaagatcgccctgtgcttcaagcaaccttcctgtctaataactgttttgagcacctcacccggttaatccagaactccaaggttctggatcaagacacggatgcgattgcggtacacgtggtgagggtgttaacctgcattatgagcgactctcccagtgctaaagaggtgtttaaagagagaatcggctacccgcatttgcaggaagttctccagagccacggacccccaactcacagattgctacaggagctgctgaatatggctgtggagggagaccatagcatgtgcccaccacctcccattcgtaatgaacagccggtcctggtgcttgcacaatggctgccatccttgcccaccgccgagctgcggctttttctcgcacaaagactgaggtggctctgtgatagttgccccgcatcaagagctacatgtgtccaggccggtctggtcggctgtctgctggaaacactctctacagggctggccttggaggctcgatgccaggaacagctgctggcgctgctgcaggccctcgggcgagtgtccatcaggccgatggagctaagacatctgctcagacccagaccaggccttgactcagagcccggaggggcagaggcaggcaaggcaaggcacgccggtgccgtgatccgcaccctttcaggaatggccagacatcagggtcccgctcgagccttgaggtacttcgacctgacaccctccatggccggtattatggtacctcccgtccagaggtggcctggacctggatttacatttcacgcctggctctgcctgcaccccatggatactgcccctacgccagccccacctactctcccgtccagcggtataggaggtcgatgttaccccctccgggactggagggctgaagttccgccattagcaggttag

SEQ ID NO: 279417 - DNA, 1848 bp, Artificial Sequence
  derived and/or modified sequence
atggagcccgccctgggccccggcgtgcagaaggacctgggctacctgcagcagtggctgaaggccttcgtgggcgccttcaagaagagcatcagcctgagcagcctggagcccagaagacccgaggaggccggcgccgaggtgcccctgctgcccctggacgagctgcacgtgctggccgagcagctgcaccaggccgacctggagcaggccctgctgctgctgaagctgttcatcatcctgtgcagaaacctggagaacatcgaggccggcagaggccaggtgctggtgcccagagtgctggccctgctgaccaagctggtggccgagctgaagggctgcccccccccccagggcagaggcacccagctggagaacgtggccctgcacgccctgctgctgtgcgagggcctgttcgacccctaccagacctggagaagacagagaagcggcgaggtgatcagcagcaaggagaagagcaagtacaagttcccccccgccgccctgccccaggagttcagcgccttcttccaggagagcctgcagaacgccgaccacctgccccccatcctgctgctgagactgatccacctgttctgcgccgtgctggccggcggcaaggagaacggccagatggccgtgagcgacggcagcgtgaagggcctgctgagcgtggtgagaggctggagcagaggccccgcccccgacccctgcctggtgcccctggccctggaggccctggtgggcgccgtgcacgtgctgcacgccagcagagccccccccagaggccccgagctgagagccctgctggagagctacttccacgtgctgaacgccgactggcccgccggcctgagcagcggccccgaggaggccctggtgaccctgagagtgagcatgctggacgccatccccatgatgctggcctgcgaggacagacccgtgctgcaggccaccttcctgagcaacaactgcttcgagcacctgaccagactgatccagaacagcaaggtgctggaccaggacaccgacgccatcgccgtgcacgtggtgagagtgctgacctgcatcatgagcgacagccccagcgccaaggaggtgttcaaggagagaatcggctacccccacctgcaggaggtgctgcagagccacggcccccccacccacagactgctgcaggagctgctgaacatggccgtggagggcgaccacagcatgtgcccccccccccccatcagaaacgagcagcccgtgctggtgctggcccagtggctgcccagcctgcccaccgccgagctgagactgttcctggcccagagactgagatggctgtgcgacagctgccccgccagcagagccacctgcgtgcaggccggcctggtgggctgcctgctggagaccctgagcaccggcctggccctggaggccagatgccaggagcagctgctggccctgctgcaggccctgggcagagtgagcatcagacccatggagctgagacacctgctgagacccagacccggcctggacagcgagcccggcggcgccgaggccggcaaggccagacacgccggcgccgtgatcagaaccctgagcggcatggccagacaccagggccccgccagagccctgagatacttcgacctgacccccagcatggccggcatcatggtgccccccgtgcagagatggcccggccccggcttcaccttccacgcctggctgtgcctgcaccccatggacaccgcccccacccccgccccccccaccctgcccagcagcggcatcggcggcagatgctaccccctgagagactggagagccgaggtgccccccctggccggctag

SEQ ID NO: 279418 - protein, 164 aa, Artificial Sequence
  derived and/or modified sequence
MDLEECILITDSTLIQLSIHCPKLQALVSLSFSDIIHLLKMKEPSHHNKKLFGFSFCKSLSHCELITDDGILHLSNSTCGHERLRVLELDNCLLITDVALEHLENCRGLERLELYDCQQVTRAGIKRMRAQLPHVKVHAYFAPVTPPTAVAGSGQRLCRCCVIL

SEQ ID NO: 279419 - DNA, 1529 bp, Artificial Sequence
  derived and/or modified sequence
aacgggcgtcgccggcgccgtgtgacttcgggctgtgggctcgctcgcggctcttcggccatggttttctcaaacaatgatgaaggccttattaacaaaaagttacccaaagaacttctgttaagaatgctgttcagcttgttgttaaattttacttggtctaatccagaatgtactaagtatgtacatagcattggtctggattctttttgtaatgtgaatattttccttcttggatatagtaactttgtgccgatgtgcacagatttccaaggcttggaacatcttagccctggatggaagcaactggcaaagaatagatctttttaactttcaaacagatgtagagggtcgagtggtggaaaatatctcgaagcgatgcggtggattcctgaggaagctcagcttgcgaggctgcattggtgttggggattcctccttgaagacctttgcacagaactgccgaaacattgaacatttgaacctcaatggatgcacaaaaatcactgacagcacgtgttatagccttagcagattctgttccaagctgaaacatctggatctgacctcctgtgtgtctattacaaacagctccttgaaggggatcagtgagggctgccgaaacctggagtacctgaacctctcttggtgtgatcagatcacgaaggatggcatcgaggcactggtgcgaggttgtcgaggcctgaaagccctgctcctgaggggctgcacacagttagaagatgaagctctgaaacacattcagaattactgccatgagcttgtgagcctcaacttgcagtcctgctcacgtatcacggatgaaggtgtggtgcagatatgcaggggctgtcaccggctacaggctctctgcctttcgggttgcagcaacctcacagatgcctctcttacagccctgggtttgaactgtccgcgactgcaaattttggaggctgcccgatgctcccatttgactgacgcaggttttacacttttagctcggaattgccacgaattggagaagatggatcttgaagaatgcatcctgataaccgacagcacactcatccagctctccattcactgtcctaaactgcaagccctggtgagtctgagtttttctgacattattcacctgttaaagatgaaagagccctcccaccacaacaagaagctgtttgggttctctttctgtaagagcctgtcccactgtgaactcatcacagatgatgggatcctgcacctgagcaacagtacctgtggccatgagaggctgcgggtactggagttggacaactgcctcctcatcactgatgtggccctggaacacctagagaactgccgaggcctggagcgcctcgagctgtacgactgccagcaggttacccgtgcaggcatcaagcggatgcgggctcagctccctcatgtcaaagtccacgcctactttgctcccgtcaccccaccgacagcagtggcaggaagtggacagcgactgtgcaggtgctgtgtcattctctgacagcagctgc

SEQ ID NO: 279420 - DNA, 402 bp, Artificial Sequence
  derived and/or modified sequence
atggacttggaggaatgtatattaattacggactccaccctcatccagctgagcatccactgtcccaagctccaggctttatcactaagccactgcgagctgataacagacgacggaattctgcatctcagcaacagcacctgcggccacgaacggttaagggtccttgaattggataactgtctgctcataaccgatgttgcccttgagcacctggagaattgtcgggggcttgaacgattggaactgtacgattgtcagcaggtgacaagagctggcatcaaacggatgcgtgctcagctgccacacgtaaaagtccacgcatactttgcgccggtgacacctccgacagctgtggcaggcagtggtcaacggctgtgccgctgttgtgtcatcctgtag

SEQ ID NO: 279421 - DNA, 402 bp, Artificial Sequence
  derived and/or modified sequence
atggacctggaggagtgcatcctgatcacagacagcaccctcatccagctgagcatccactgccccaagctgcaggccctgagcctgagccactgtgagctgatcacagatgatggcatcctgcacctgagcaacagcacctgtggccacgagcggctgcgggtgctggagctggacaactgcctgctgatcacagatgtggccctggagcacctggagaactgccggggcctggagcggctggagctgtatgactgccagcaggtgacccgggccggcatcaagaggatgagggcccagctgccccacgtgaaggtgcacgcctactttgcccctgtgaccccacccacagctgtggccggcagcggccagaggctgtgccgctgctgcgtcatcctgtag

SEQ ID NO: 279422 - DNA, 402 bp, Artificial Sequence
  derived and/or modified sequence
atggacctggaggagtgcatcctgatcaccgacagcaccctgatccaacttagtattcactgccctaagcttcaggcattgagcctcagtcactgcgagttgattacagacgacgggattctacacttgtctaattctacttgtggtcacgagcgactccgtgtcttggagctggataattgtctgctcattactgacgtagccttggagcacctcgagaactgccgtggcctcgagagactggaactgtatgattgccagcaggtgacaagggccgggataaagcgcatgcgtgcgcagctccctcatgttaaggtacacgcctacttcgctcccgttacgcctcctacggccgttgcgggttctggacaacggctgtgcagatgctgcgttattttatag

SEQ ID NO: 279423 - DNA, 402 bp, Artificial Sequence
  derived and/or modified sequence
atggacctggaggagtgtatcctaattaccgattccaccttgatccagctctctatccactgtcctaagctgcaggcgctgtcactgagccactgcgagctgattacagacgacggaatcctgcacctctctaatagcacgtgtgggcacgagagactccgggtgctcgagcttgataactgtttacttataaccgacgttgctctggagcatttagaaaattgccggggattggagaggctcgagttgtacgattgccagcaggtcacccgcgctgggattaaacgtatgcgggctcagctcccacacgtgaaagtgcacgcctactttgccccagtcaccccccctactgccgtggccggatcaggacaacgtttatgtcgctgctgtgtcatcctttag

SEQ ID NO: 279424 - DNA, 402 bp, Artificial Sequence
  derived and/or modified sequence
atggacctggaggagtgcatcctgatcaccgacagcaccctgatccagctgagcatccactgccccaagctgcaggccctgagcctgagccactgcgagctgatcaccgacgacggcatcctgcacctgagcaacagcacctgcggccacgagagactgagagtgctggagctggacaactgcctgctgatcaccgacgtggccctggagcacctggagaactgcagaggcctggagagactggagctgtacgactgccagcaggtgaccagagccggcatcaagagaatgagagcccagctgccccacgtgaaggtgcacgcctacttcgcccccgtgaccccccccaccgccgtggccggcagcggccagagactgtgcagatgctgcgtgatcctgtag

SEQ ID NO: 279425 - protein, 300 aa, Artificial Sequence
  derived and/or modified sequence
MEDILEELLQHREPKALQLYLRKALSNSLHPLGKLLRTLMLTFQATYAGVGANKHLQELAQEEVKQHAQELWAAYRGLLRVALERKGQALEEDEDTETRDLQVHGLVLPLMLPSFYSELFTLYLLLHEREDSFYSQGIANLSLFPDTQLLEFLDVQKHLWPLKDLTLTSNQRYSLVRDKCFLSATECLQKIMTTVDPREKLEVLERTYGEIEGTVSRVLGREYKLPMDDLLPLLIYVVSRARIQHLGAEIHLIRDMMDPNHTGGLYDFLLTALESCYEHIQKEDMRLHRLPGHWHSRELW

SEQ ID NO: 279426 - DNA, 1747 bp, Artificial Sequence
  derived and/or modified sequence
aggaaggaaccagctgtaagggagggcagagggggatgtcttggaggggaatcccagactttggacactggtctctcttggaccaagaccccctctctggcttggcctccagatctgcccacctttctgtctccgtctttccaggattccatatgcttctgtctgtcttctcgtcgcagggtagattctctgtccctttctctgctgctcttcctcctggagccgtggaggcagctgggcgtgggtgccttccccgtggaaagccgctggcagggagtctacagccccttccgggactttgtgtgtgctggctgccccagggacctgcaggaggccctgctgggcttcgacgtgcagagctccagggagctgcgtaggtctcaggattacctgtcctgcgagaggacccaccctgaggacagtgtgggcagtatggaagacatcctggaggagctgctgcagcaccgggagcccaaggccctgcagctgtacctcaggaaggctctgagcaactcactgcaccccctgggaaagctgctccggacactgatgctgaccttccaggctacctacgcaggtgtcggggccaacaagcacctgcaggagctggcccaggaggaggtgaagcagcatgcccaggaactctgggctgcctacaggggtctgctgcgagttgccttagagcgcaagggccaggccctggaggaggatgaagacacagagacaagggacctccaggtgcatggattggtgctgcccctcatgctgcccagcttctactcagagctcttcacgctctacctgctgcttcatgagcgggaggacagcttctacagccagggcattgccaacttgagcctctttcctgatacccaactgctcgagttcctggatgtgcagaagcacttgtggcccctcaaggacctcacgctgacgagcaatcagaggtactccctggtcagggacaagtgtttcctgtcagccaccgagtgcctgcagaagatcatgaccacggtggacccacgggagaagctggaggtgctggagaggacatacggggaaattgagggcacggtgtcgagggtattgggccgggagtacaagctgcccatggacgacctgctgccacttctcatctacgtggtgtcgcgcgcccgaattcagcacctgggagccgagatccacctgatccgtgacatgatggaccccaaccacacaggaggcctgtatgacttcctgctcacagccctggagtcctgttacgagcacatccagaaagaagacatgaggctgcaccgcttacctggccactggcactccagggagctctggtagcctggcctttcctggacagactgaagagctgagcagggcactgccagcctgtccctcattacccaaggcaaggggcaggacaggccctcagaagcagctcttggaggagatgagcattttgttttgcacaggaagatgctgctgctgccctgactgggatgagggtgaggggtgacgggtgtggccctggatgtggtggttttcccttggccactagcccatcttcaatgaccccttaatctgcagcagctcacaggctgggggtgaggagtccctggcttctcttagcctgagcctttctcccaagttccagagcctctccgggcctcagtgctgccatctgtacaatggtggagtgagtacgctgtaaaggaccttccattcattttgctgaattccagagtccttttgg

SEQ ID NO: 279427 - protein, 912 aa, Artificial Sequence
  derived and/or modified sequence
MEAVPRMPMIWLDLKEAGDFHFQPAVKKNAVRVPRDFEGCSVLRKYLGQLHYLQSRVPMGSGQEAAVPVTWTEIFSGKSVAHEDIKYEQACILYNLGALHSMLGAMDKRVSEECAAGAFAYLREHFPQAYSVDMSRQILTLNVNLMLGQAQECLLEKSMLDNRKSFLVARISAQVVDYYKEACRALENPDTASLLGRIQKDWKKLVQMKIYYFAAVAHLHMGKQAEEQQKFGERVAYFQSALDKLNEAIKLAKGQPDTVQDALRFTMDVIGGKYNSAKKDNDFIYHEAVPALDTLQPVKGAPLVKPLPVNPTDPAVTGPDIFAKLVPMAAHEASSLYSEEKAKLLREMMAKIEDKNEVLDQFMDSMQLDPETVDNLDAYSHIPPQLMEKCAALSVRPDTVRNLVQSMQVLSGVFTDVEASLKDIRDLLEEDELLEQKFQEAVGQAGAISITSKAELAEVRREWAKYMEVHEKASFTNSELHRAMNLHVGNLRLLSGPLDQVRAALPTPALSPEDKAVLQNLKRILAKVQEMRDQRVSLEQQLRELIQKDDITASLVTTDHSEMKKLFEEQLKKYDQLKVYLEQNLAAQDRVLCALTEANVQYAAVRRVLSDLDQKWNSTLQTLVASYEAYEDLMKKSQEGRDFYADLESKVAALLERTQSTCQAREAARQQLLDRELKKKPPPRPTAPKPLLPRREESEAVEAGDPPEELRSLPPDMVAGPRLPDTFLGSATPLHFPPSPFPSSTGPGPHYLSGPLPPGTYSGPTQLIQPRAPGPHAMPVAPGPALYPAPSSAPSFTSVWASAPTAAPSTPASTSLPTPGPRTPTPTIPLPLCPSAWGPGAAATPPTHPALPRSRSRPSASPLRGSAFPQPWAPSASPSPTGIWSCPFYQTHGPPGSPSYHSRALVCWPVHP

SEQ ID NO: 279428 - DNA, 2739 bp, Artificial Sequence
  derived and/or modified sequence
atggaagcagttcccagaatgccaatgatttggttagatctcaaggaagcaggagactttcatttccagcctgctgtgaaaaagaatgccgtgcgtgtgcctagagactttgagggttgtagtgtgcttcggaagtaccttgggcaactacattacctgcagtctcgcgttcctatgggcagcggacaggaagctgccgtacctgtgacgtggacagagattttctcagggaagtcagtggcgcatgaagacatcaaatatgaacaagcatgtatcctgtataacctgggggctctgcacagtatgcttggcgcaatggacaagcgagtcagtgaggagtgtgctgctggtgccttcgcatacctgagggagcatttccctcaagcttacagcgtagacatgtcacggcagatcctcacactcaacgtgaatcttatgttggggcaggctcaggagtgtctgctcgagaagagcatgctggacaacagaaaaagctttttggtggctcggatttctgcccaggtggtggactattataaagaggcttgccgtgcgctggaaaatcctgatactgcaagcttactcgggcggatccagaaggactggaaaaagctcgtacaaatgaagatatactatttcgccgctgtcgcccacctgcacatggggaaacaggcagaagagcagcagaagtttggagaacgagtcgcttatttccagtccgcactggacaagttgaatgaggccattaaactcgccaaaggccaacctgataccgtgcaagatgcgctgaggtttacaatggacgtgattggaggaaagtacaattctgcaaagaaggataacgactttatttaccacgaagctgtgccggctctggacacattgcagcctgtcaaaggcgctcctctggttaagcctttaccagtcaacccaaccgatcccgctgtgacgggccccgacatcttcgccaaattagtcccgatggcagctcacgaagccagcagcctgtacagcgaggagaaggcaaagttactgagggagatgatggctaaaatagaagataagaacgaggtcttggaccagttcatggactctatgcaactggacccggagaccgtggacaatttggacgcatactcacatattcccccacagctcatggagaagtgcgcagcactctctgtgcggcctgacaccgtgagaaatctggtgcagagcatgcaggtcctgagcggggttttcacagacgtggaggcttctttgaaagatatacgagacctcttggaggaggacgaactcctcgagcaaaagttccaggaggcagtgggccaggccggcgccatttccataacgtccaaggccgagctggcggaggtgagaagagagtgggcaaaatatatggaggtccatgaaaaggcctcctttacaaattctgagctgcatagggctatgaatctgcacgtcgggaatctccggttgctttccggtccattagaccaggtgcgggccgccttgccaaccccagccctctcacctgaagacaaagctgttctgcagaatcttaagagaatcttagccaaggtgcaggaaatgcgagaccagcgggtctcgttggagcagcagctgagggagctcattcagaaggacgacattacggcctctttggtcaccactgaccattctgagatgaagaaactttttgaggagcaactgaaaaagtatgaccagcttaaagtgtacctcgagcaaaacctagcagctcaggacagggttctgtgtgccctgactgaagcaaatgttcagtatgctgcggttcggcgggtgctaagcgacctggatcagaagtggaactccacacttcaaacccttgtcgccagctatgaggcttacgaggatctgatgaaaaagagtcaggaggggcgggatttttatgcggacttagagtctaaagtggccgcacttctcgagcgaacccaatctacctgtcaggccagggaagccgcgaggcaacaattgctggaccgagaactgaagaagaagccccctccccgtcctacagccccaaagcctttattaccccggcgcgaagaatccgaagctgtggaagccggggaccctccagaggagttgcgttcacttcctcctgacatggttgccggacccagactgcccgatacttttctggggtctgctacccctctgcattttcccccgtcaccttttccatcaagtactgggccagggccacattatttatccggaccattacctcctgggacctactctggtcccactcaattgatccagccacgggcacccggcccccacgcaatgcccgttgcacccggtcccgccctctaccctgcaccgtcctctgcaccgtcttttacgtccgtttgggcgtcggcaccaacggctgcgccctccactccagcatcaacaagtctgcccacgcctggtcctaggaccccaacacctaccattcctctgccactctgtcccagcgcgtggggacccggggccgcagcaacgccaccaacgcaccctgctctgccacgttcacgctcccgtccctctgcctcacccttaaggggcagtgcattccctcagccttgggcacctagcgccagcccttctccaaccgggatttggagctgccctttctatcagacacatggacctcccgggagtccatcctaccactctagggctctggtgtgttggccagtccacccatag

SEQ ID NO: 279429 - DNA, 2739 bp, Artificial Sequence
  derived and/or modified sequence
atggaggccgtgcccaggatgcccatgatctggctggacctgaaggaggccggggacttccacttccagcctgctgtgaagaagaatgctgtgcgggtgccccgggactttgagggctgcagcgtgctgaggaagtacctgggccagctgcactacctgcagagccgggtgcccatgggcagcggccaggaggccgctgtgcctgtgacctggacagagatcttcagcggcaagtctgtggcccacgaggacatcaagtatgagcaggcctgcatcctgtacaacctgggcgccctgcacagcatgctgggcgccatggacaagagggtgtctgaagaatgtgccgccggggcctttgcctacctgcgggagcacttcccccaggcctacagcgtggacatgagccggcagatcctgaccctgaatgtgaacctgatgctgggccaggcccaggagtgcctgctggagaagtccatgctggacaacaggaagagcttcctggtggcccgcatcagcgcccaggtggtggactactacaaggaggcctgccgggccctggagaacccagacacagccagcctgctgggccgcatccagaaggactggaagaagctggtgcagatgaagatctactactttgctgctgtggcccacctgcacatgggcaagcaggccgaggagcagcagaagtttggagagcgggtggcctacttccagagcgccctggacaagctgaatgaggccatcaagctggccaagggccagcctgacacagtgcaggatgccctgcgcttcaccatggatgtgattggaggcaagtacaacagcgccaagaaggacaatgacttcatctaccacgaggccgtgcctgccctggacaccctgcagcctgtgaagggggcccccctggtgaagcccctgcctgtgaaccccacagatcctgctgtgactggaccagacatctttgccaagctggtgcccatggccgcccacgaggccagcagcctgtacagcgaggagaaggccaagctgctgcgggagatgatggccaagattgaggacaagaatgaggtgctggaccagttcatggacagcatgcagctggaccctgagaccgtggacaacctggatgcctacagccacatccccccccagctgatggagaagtgtgccgccctgtctgtgcggccagacacagtgaggaacctggtgcagagcatgcaggtgctgtctggagtcttcacagatgtggaggccagcctgaaggacatccgggacctgctggaggaggatgagctgctggagcagaagttccaggaggccgtgggccaggccggggccatcagcatcaccagcaaggccgagctggccgaggtgcggcgggagtgggccaagtacatggaggtgcatgagaaggccagcttcaccaacagcgagctgcaccgggccatgaacctgcacgtgggcaacctgcggctgctgagcggccccctggaccaggtgcgggccgccctgcccaccccagccctgagccctgaggacaaggctgtgctgcagaacctgaagaggatcctggccaaggtgcaggagatgagggaccagagggtgtccctggagcagcagctgcgggagctgatccagaaggatgacatcacagccagcctggtgaccacagaccacagcgagatgaagaagctgtttgaggagcagctgaagaagtatgaccagctgaaggtgtacctggagcagaacctggccgcccaggacagagtgctgtgtgccctgacagaggccaacgtgcagtatgctgctgtgcggcgggtgctgagtgacctggaccagaagtggaacagcaccctgcagaccctggtggccagctatgaggcctatgaggacctgatgaagaagagccaggagggccgggacttctatgctgacctggagagcaaggtggccgccctgctggagaggacccagagcacctgccaggcccgggaggccgcccggcagcagctgctggaccgggagctgaagaagaagcccccaccccggcccacagcccccaagcccctgctgccccggcgggaggagagcgaggccgtggaggccggggaccccccagaggagctgcggagcctgcccccagacatggtggccggcccccggctgcctgacaccttcctgggcagcgccacccccctgcacttcccccccagccccttccccagcagcactggacctggcccccactacctgagcggccccctgcccccaggcacctacagcggccccacccagctgatccagccccgggcccctggcccccacgccatgcctgtggcccctggccctgccctgtacccagcccccagcagcgcccccagcttcacctctgtgtgggccagcgcccccacagctgcccccagcaccccagccagcaccagcctgcccaccccaggccccaggacccccacccccaccatccccctgcccctgtgccccagcgcctggggccctggagctgctgccaccccacccacccacccagccctgcccaggagccgcagccggcccagcgccagccccctgcggggcagcgccttcccccagccctgggcccccagcgccagccccagccccaccggcatctggagctgccccttctaccagacccacggccccccaggcagccccagctaccacagccgggccctggtgtgctggcctgtgcacccctag

SEQ ID NO: 279430 - DNA, 2739 bp, Artificial Sequence
  derived and/or modified sequence
atggaggccgtgccccggatgcccatgatctggctggacctgaaggaagctggagacttccactttcaacccgccgtaaagaagaatgccgtacgcgttccccgcgattttgaaggctgttccgtgcttcggaagtacctgggacaattacattacctccagtctcgtgttcctatggggtcgggacaggaggcagcagtaccagtgacttggaccgagatatttagtggaaagtcagttgcgcacgaggatatcaagtacgaacaggcttgcattctgtataacctaggcgctttgcactccatgctcggtgcaatggacaaaagggtctctgaagaatgcgctgccggtgcatttgcatacctcagagagcactttccacaggcttattcggtcgacatgagtcgtcagattctgaccctaaacgtgaatcttatgctgggccaggcccaggaatgtttgctcgagaaaagcatgctagataaccgtaaatcattcctggtggcgagaatctctgcgcaggtggtagactactataaagaggcatgtagagccttggaaaatcctgacaccgccagtctgctgggtaggatacagaaagactggaagaaactagtgcaaatgaagatttactactttgccgctgtggcccacctgcacatgggaaaacaagcagaggaacagcaaaaatttggcgagagagtcgcctactttcagtctgctcttgataagttgaatgaagcaataaagctggccaaaggtcaaccggataccgtgcaggacgcacttaggttcacaatggatgtgattggcggcaagtataacagtgctaaaaaagacaacgacttcatatatcacgaggccgtacccgccctggataccctgcaacctgtgaagggggcccctcttgtcaagccccttcctgtgaacccaactgatccggccgtgaccggccctgatatcttcgccaagctggtgcccatggcagctcacgaggcaagttctttatatagcgaggaaaaagcaaaactgctgcgggagatgatggctaagattgaagataagaacgaggttctggaccaattcatggactccatgcagttggatcccgagactgtggacaacttagacgcctacagccatatccccccacagctgatggaaaaatgcgcagccctcagcgtcagacccgacactgtacgaaatttagtgcagagtatgcaagtactgagcggggtgttcactgacgtggaggcgagcctcaaggatattcgagacctcctcgaggaggatgagctcctggagcagaaatttcaggaggccgttggacaggccggggcgatttcaatcacttcaaaggcagaactcgctgaggtgagaagagagtgggccaagtatatggaagtacacgaaaaagcgtccttcaccaactcggagctacaccgagccatgaacttgcacgtcggaaacctgcgtcttctaagtggtcccctcgaccaagtacgagcagctttgcccacacctgcccttagcccagaagataaagccgtgctccagaacctgaagcgcatcctcgccaaggtgcaggaaatgagagaccagagggttagtctcgaacagcagctgcgagagctgatccagaaagacgatataactgcttccctcgtcacgaccgaccatagcgagatgaagaagctgttcgaggaacaactgaagaagtacgaccaactgaaagtttaccttgagcagaatcttgccgcccaagacagggtgctctgtgcgctcaccgaggcgaacgtgcagtacgctgccgttagaagagtactctctgacctcgaccagaagtggaacagcaccctgcagaccctcgtggctagttacgaggcttacgaggatctgatgaagaagtctcaagaagggagggatttttacgcggatttggagtccaaagtggcagccctgctggaacgcacccaaagcacttgccaggcccgcgaagcagcgcgtcagcaacttttggatagagagctcaaaaagaagccacccccgcgcccgactgcccccaagcctctactgccccgcagagaggaaagtgaagctgtggaggccggggatcctcccgaggagcttcgctccctgcctccagatatggtggccggaccaagattgccggatacgtttcttggctctgccacaccactgcacttcccccccagcccgtttcctagttccactgggccaggcccacactacttaagtggcccactgccccccgggacctactcaggtcctacacagttaattcagcctagggcacctggtccccacgctatgcccgttgctccagggcccgctctgtaccccgccccatcctctgcccccagctttacatctgtatgggcttcagctccgaccgccgccccttctacccctgcctccacaagtttaccaacccccggcccacgaacccctacccccactattcccctacctctttgcccttccgcatggggcccaggggctgctgccaccccgccaacgcaccctgcgctgcccaggtccaggtctcgtccttccgcctcccccctgaggggatccgcctttccccagccttgggctccttccgcctcaccttcccctaccggtatctggtcttgtcctttttaccagacacatggcccacctggcagccctagctaccactcccgcgcactcgtgtgttggcccgtccacccctag

SEQ ID NO: 279431 - DNA, 2739 bp, Artificial Sequence
  derived and/or modified sequence
atggaggccgtccccaggatgcctatgatatggcttgatctcaaggaggcgggagacttccactttcaaccagccgtcaagaaaaatgccgtgagggtacccagagactttgaaggctgtagcgttctcagaaagtatctggggcagcttcactaccttcagtctcgggtgccaatgggctcagggcaggaggccgcagtccctgtgacctggactgaaatttttagcgggaaaagcgttgctcatgaggacatcaagtatgagcaggcctgtatcttatacaaccttggggcactgcacagcatgctgggggcaatggacaagagggtgtcagaagagtgtgccgcaggggcttttgcatacctgagggagcactttccccaggcctactcagtcgacatgagccggcagatcttgactctcaacgtcaacctgatgttagggcaggcccaagaatgccttctggagaagagcatgctggacaatcgtaagagctttctggtggccagaatatctgcccaggtggtagattattataaggaggcctgccgggctctggagaaccctgacaccgcatccctgctcgggaggattcagaaagattggaaaaaattagtacagatgaagatttattatttcgcggcagtcgctcatctgcatatgggcaaacaggccgaagaacagcagaaatttggggagagggtcgcatactttcagtctgctctcgacaagctgaatgaggctatcaagctggcaaaggggcagcccgatacggttcaggacgctctgcgctttactatggatgtcatcggcggaaaatataattctgcaaaaaaagataatgactttatatatcatgaagctgtacctgccctggatacgctccagcctgtcaagggcgcaccccttgtgaagcccctgcctgttaaccccacagacccagccgtgaccggcccagacatctttgccaaactggtgcctatggcagctcacgaagcatcaagcctgtactctgaagaaaaggccaagcttcttagagaaatgatggccaagattgaagacaagaatgaagtgttggatcagtttatggactccatgcagcttgaccctgaaactgtcgataatttagatgcctactcacacatcccaccccaattaatggagaagtgcgccgcattgtccgtcaggcctgacacagttagaaatcttgtgcagagcatgcaagtgctgtctggagttttcacagatgtggaggccagtcttaaggatatcagggacttactggaagaagacgagctactggaacagaaatttcaggaggctgtaggacaggccggtgcaatcagcatcacgtccaaggctgagctagctgaagtccgcagagagtgggctaaatatatggaggtgcatgagaaagcgagctttactaacagcgaactgcacagagcaatgaatcttcatgtgggtaatctgaggctgctatccgggcctttggatcaggtgagggctgccctccctactcctgcgctgtctccagaagacaaagctgtactgcaaaatctcaaaaggattctggcgaaagtgcaggaaatgcgggatcaacgtgtctcactagaacaacagctgagggaactgattcagaaagacgacatcacagcctctttggtcaccactgaccacagcgagatgaagaagctgtttgaagagcagcttaaaaaatatgaccagctcaaagtataccttgagcagaacctggccgctcaagaccgcgtgctctgcgccctcactgaagctaatgttcagtacgctgcagtcagacgcgtactgagtgacttggatcagaagtggaacagcactcttcagacccttgtagcgagctacgaggcatatgaggatctcatgaagaaatctcaggaggggagggacttctacgcagacttggaaagtaaggtggcggctctcctggaacgcacccagagcacatgccaggcccgagaggctgccaggcagcagttactcgaccgagaactgaagaagaagccgcctccccgtccaacagcacccaaaccattgttgcctcggagagaggagagcgaggccgtggaagccggtgatcccccagaggagctgcggagtcttccgccagatatggtcgcgggaccaagactgcccgacacctttcttggtagcgcaactcccctgcatttcccacccagccccttcccaagctctacaggccctggaccccattacctctctggccctcttccgcctgggacttactctggcccaacacaattgattcagccacgcgctcccggtccacatgcaatgccggtcgccccaggccctgcgctttaccctgcacccagctctgcgccatccttcacctcagtttgggccagcgcacctaccgcagcgccaagtacccccgcttccaccagcttgcccactccagggcctagaaccccaactccaacaattccattaccactctgcccttctgcatggggcccaggcgctgccgctacacctccaacccatccagctctccccagatcaaggagcagaccttcagcctcccctctccgtggcagtgcttttcctcagccgtgggccccttccgcatccccctcacctacggggatttggagctgtcctttttaccaaacccatggacccccaggtagcccttcatatcactcccgagcattggtttgctggcctgttcatccttag

SEQ ID NO: 279432 - DNA, 4741 bp, Artificial Sequence
  derived and/or modified sequence
aaggggcggggctgggctcgtggctgagccagcagctgcagcagctacgggagtggccgggtggccggcgggtgccagccgccatggaggccgtgccccgcatgcccatgatctggctggacctgaaggaggccggtgactttcacttccagccagctgtgaagaagaatgctgtccgtgtcccacgagactttgagggctgtagtgtcctccgcaagtacctcggccagcttcattacctgcagagtcgggtccccatgggctcgggccaggaggccgctgtccctgtcacctggacagagatcttctcaggcaagtctgtggcccatgaggacatcaagtacgagcaggcctgtattctctacaaccttggagcgctgcactccatgctgggggccatggacaagcgggtgtctgaggagtgcgcagccggcgccttcgcctacctacgggagcacttccctcaagcctacagcgtcgacatgagccgccagatccttacgctcaacgtcaacctcatgctgggccaggctcaggagtgcctcctggagaagtcgatgttggacaacaggaagagctttctggtggcccgcatcagtgcacaggtggtagattactacaaggaggcatgccgggccttggagaaccccgacactgcctcactgctgggccggatccagaaggactggaagaaacttgtgcagatgaagatctactacttcgcagccgtggctcatctgcacatgggaaagcaggccgaggagcagcagaagttcggggagcgggttgcatacttccagagcgccctggacaagctcaatgaagccatcaagttggccaagggccagcctgacactgtgcaagacgcgcttcgcttcactatggatgtcattgggggaaagtacaattctgccaagaaggacaacgacttcatttaccatgaggctgtcccagcattggacactcttcagcctgtaaaaggagcccccttggtgaagcccttgccagtgaaccccacagacccagctgttacaggccctgacatctttgccaaactggtacccatggctgcccacgaggcctcgtcactgtacagtgaggagaaggccaagctgctccgggagatgatggccaagattgaggacaagaatgaggtcctggaccagttcatggattcaatgcagttggatcccgagacggtggacaaccttgatgcctacagccacatcccaccccagctcatggagaagtgcgcggctctcagcgtccggcccgacactgtcaggaaccttgtacagtccatgcaagtgctgtcaggtgtgttcacggatgtggaggcttccctgaaggacatcagagatctgttggaggaggatgagctgctagagcagaagtttcaggaggcggtgggccaggcaggggccatctccatcacctccaaggctgagctggcagaggtgaggcgagaatgggccaagtacatggaagtccatgagaaggcctccttcaccaacagtgagctgcaccgtgccatgaacctgcacgtcggcaacctgcgcctgctcagcgggccgcttgaccaggtccgggctgccctgcccacaccggccctctccccagaggacaaggccgtgctgcaaaacctaaagcgcatcctggctaaggtgcaggagatgcgggaccagcgcgtgtccctggagcagcagctgcgtgagcttatccagaaagatgacatcactgcctcgctggtcaccacagaccactcagagatgaagaagttgttcgaggagcagctgaaaaagtatgaccagctgaaggtgtacctggagcagaacctggccgcccaggaccgtgtcctctgtgcactgacagaggccaacgtgcagtacgcagccgtgcggcgggtactcagcgacttggaccaaaagtggaactccacgctgcagaccctggtggcctcgtatgaagcctatgaggacctgatgaagaagtcgcaggagggcagggacttctacgcagatctggagagcaaggtggctgctctgctggagcgcacgcagtccacctgccaggcccgcgaggctgcccgccagcagctcctggacagggagctgaagaagaagccgccgccacggcccacagccccaaagccgctgctgccccgcagggaggagagtgaggcagtggaagcaggagacccccctgaggagctgcgcagcctcccccctgacatggtggctggcccacgactgcctgacaccttcctgggaagtgccaccccgctccactttcctcccagccccttccccagctccacaggcccaggaccccactatctctcaggccccttgccccctggtacctactcgggccccacccagctgatacagcccagggccccagggccccatgcaatgcccgtagcacctgggcctgccctctacccagccccatcctcagccccatccttcacaagcgtttgggcctcagcccccacagcagccccttccactccagcatccacatctcttcccaccccaggccccaggactcctacccccacaatccccctacccctatgcccctcagcctggggtcctggggcagccgccaccccccctacacacccagctctacccaggtcccgctcaagaccctctgccagcccactcaggggctctgcctttccccagccctgggccccctcagcctccccatcccccactggcatatggtcctgccccttctaccagacccatgggcccccaggcagcccctcttaccattcgagggccctcgtctgctggccagtccacccctagtccccacctggtgccttcacctgccccatctccagggcctggtccggtaccccctcgccccccagcagcagaaccacccccttgcctgcgccgaggcgccgcagctgcagacctgctctcctccagcccggagagccagcatggcggcactcagtctcctgggggtgggcagcccctgctgcagcccaccaaggtggatgcagctgagggtcgtcggccgcaggccctgcggctgattgagcgggacccctatgagcatcctgagaggctgcggcagttgcagcaggagctggaggcctttcggggtcagctgggggatgtgggagctctggacactgtctggcgagagctgcaagatgcgcaggaacatgatgcccgaggccgttccatcgccattgcccgctgctactcactgaagaaccggcaccaggatgtcatgccctatgacagtaaccgtgtggtgctgcgctcaggcaaggatgactacatcaatgccagctgcgtggaggggctctccccatactgccccccgctagtggcaacccaggccccactgcctggcacagctgctgacttctggctcatggtccatgagcagaaagtgtcagtcattgtcatgctggtttctgaggctgagatggagaagcaaaaagtggcacgctacttccccaccgagaggggccagcccatggtgcacggtgccctgagcctggcattgagcagcgtccgcagcaccgaaacccatgtggagcgcgtgctgagcctgcagttccgagaccagagcctcaagcgctctcttgtgcacctgcacttccccacttggcctgagttaggcctgcccgacagccccagcaacttgctgcgcttcatccaggaggtgcacgcacattacctgcatcagcggccgctgcacacgcccatcattgtgcactgcagctctggtgtgggccgcacgggagcctttgcactgctctatgcagctgtgcaggaggtggaggctgggaacggaatccctgagctgcctcagctggtgcggcgcatgcggcagcagagaaagcacatgctgcaggagaagctgcacctcaggttctgctatgaggcagtggtgagacacgtggagcaggtcctgcagcgccatggtgtgcctcctccatgcaaacccttggccagtgcaagcatcagccagaagaaccaccttcctcaggactcccaggacctggtcctcggtggggatgtgcccatcagctccatccaggccaccattgccaagctcagcattcggcctcctggggggttggagtccccggttgccagcttgccaggccctgcagagcccccaggcctcccgccagccagcctcccagagtctaccccaatcccatcttcctccccgccccccctttcctccccactacctgaggctccccagcctaaggaggagccgccagtgcctgaagcccccagctcggggcccccctcctcctccctggaattgctggcctccttgaccccagaggccttctccctggacagctccctgcggggcaaacagcggatgagcaagcataactttctgcaggcccataacgggcaagggctgcgggccacccggccctctgacgaccccctcagccttctggatccactctggacactcaacaagacctgaacaggttttgcctacctggtccttacactacatcatcatcatctcatgcccacctgcccacacccagcagagcttctcagtgggcacagtctcttactcccatttctgctgcctttggccctgcctggcccagcctgcacccctgtggggtggaaatgtactgcaggctctgggtcaggttctgctcctttatgggacccgacatttttcagctctttgctattgaaataataaaccaccctgttctgtg

SEQ ID NO: 279433 - DNA, 2739 bp, Artificial Sequence
  derived and/or modified sequence
atggaggccgtgcccagaatgcccatgatctggctggacctgaaggaggccggcgacttccacttccagcccgccgtgaagaagaacgccgtgagagtgcccagagacttcgagggctgcagcgtgctgagaaagtacctgggccagctgcactacctgcagagcagagtgcccatgggcagcggccaggaggccgccgtgcccgtgacctggaccgagatcttcagcggcaagagcgtggcccacgaggacatcaagtacgagcaggcctgcatcctgtacaacctgggcgccctgcacagcatgctgggcgccatggacaagagagtgagcgaggagtgcgccgccggcgccttcgcctacctgagagagcacttcccccaggcctacagcgtggacatgagcagacagatcctgaccctgaacgtgaacctgatgctgggccaggcccaggagtgcctgctggagaagagcatgctggacaacagaaagagcttcctggtggccagaatcagcgcccaggtggtggactactacaaggaggcctgcagagccctggagaaccccgacaccgccagcctgctgggcagaatccagaaggactggaagaagctggtgcagatgaagatctactacttcgccgccgtggcccacctgcacatgggcaagcaggccgaggagcagcagaagttcggcgagagagtggcctacttccagagcgccctggacaagctgaacgaggccatcaagctggccaagggccagcccgacaccgtgcaggacgccctgagattcaccatggacgtgatcggcggcaagtacaacagcgccaagaaggacaacgacttcatctaccacgaggccgtgcccgccctggacaccctgcagcccgtgaagggcgcccccctggtgaagcccctgcccgtgaaccccaccgaccccgccgtgaccggccccgacatcttcgccaagctggtgcccatggccgcccacgaggccagcagcctgtacagcgaggagaaggccaagctgctgagagagatgatggccaagatcgaggacaagaacgaggtgctggaccagttcatggacagcatgcagctggaccccgagaccgtggacaacctggacgcctacagccacatccccccccagctgatggagaagtgcgccgccctgagcgtgagacccgacaccgtgagaaacctggtgcagagcatgcaggtgctgagcggcgtgttcaccgacgtggaggccagcctgaaggacatcagagacctgctggaggaggacgagctgctggagcagaagttccaggaggccgtgggccaggccggcgccatcagcatcaccagcaaggccgagctggccgaggtgagaagagagtgggccaagtacatggaggtgcacgagaaggccagcttcaccaacagcgagctgcacagagccatgaacctgcacgtgggcaacctgagactgctgagcggccccctggaccaggtgagagccgccctgcccacccccgccctgagccccgaggacaaggccgtgctgcagaacctgaagagaatcctggccaaggtgcaggagatgagagaccagagagtgagcctggagcagcagctgagagagctgatccagaaggacgacatcaccgccagcctggtgaccaccgaccacagcgagatgaagaagctgttcgaggagcagctgaagaagtacgaccagctgaaggtgtacctggagcagaacctggccgcccaggacagagtgctgtgcgccctgaccgaggccaacgtgcagtacgccgccgtgagaagagtgctgagcgacctggaccagaagtggaacagcaccctgcagaccctggtggccagctacgaggcctacgaggacctgatgaagaagagccaggagggcagagacttctacgccgacctggagagcaaggtggccgccctgctggagagaacccagagcacctgccaggccagagaggccgccagacagcagctgctggacagagagctgaagaagaagcccccccccagacccaccgcccccaagcccctgctgcccagaagagaggagagcgaggccgtggaggccggcgacccccccgaggagctgagaagcctgccccccgacatggtggccggccccagactgcccgacaccttcctgggcagcgccacccccctgcacttcccccccagccccttccccagcagcaccggccccggcccccactacctgagcggccccctgccccccggcacctacagcggccccacccagctgatccagcccagagcccccggcccccacgccatgcccgtggcccccggccccgccctgtaccccgcccccagcagcgcccccagcttcaccagcgtgtgggccagcgcccccaccgccgcccccagcacccccgccagcaccagcctgcccacccccggccccagaacccccacccccaccatccccctgcccctgtgccccagcgcctggggccccggcgccgccgccaccccccccacccaccccgccctgcccagaagcagaagcagacccagcgccagccccctgagaggcagcgccttcccccagccctgggcccccagcgccagccccagccccaccggcatctggagctgccccttctaccagacccacggcccccccggcagccccagctaccacagcagagccctggtgtgctggcccgtgcacccctag

SEQ ID NO: 279434 - protein, 436 aa, Artificial Sequence
  derived and/or modified sequence
MGKRLDQPQMYPQYTYYYPHYLQTKSYAPAPHPMAPPSPSTNSSSNNSSNNSSGEQLSKTNLYIRGLPPGTTDQDLIKLCQPYGKIVSTKAILDKNTNQCKGYGFVDFDSPAAAQKAVASLKANGVQAQMAKQQEQDPTNLYISNLPISMDEQELENMLKPFGHVISTRILRDANGVSRGVGFARMESTEKCEVVIQHFNGKYLKTPPGIPAPSEPLLCKFADGGQKKRQNQSKYTQNGRPWPREGEAGMALTYDPTAAIQNGFYSSPYSIATNRMIPQTSITPFIAASPVSTYQVQSTSWMPHPPYVMQPTGAVITPTMDHPMSMQPANMMGPLTQQMNHLSLGTTGTIQSQDRIMILHQLLCQYMTAAAPMQGTYIPQYTPVPPTAVSIEGVVADTSPQTVAPSSQDTSGQQQQIAVDTSNEHAPAYSYQQSKP

SEQ ID NO: 279435 - DNA, 3278 bp, Artificial Sequence
  derived and/or modified sequence
acgctgctccctggagaggctctctcggttccacccaccggctggaaggaggggaagtgaatgaaaggacaggacaagccccgaacaccatgtcactctgggagggagacagcagcaactaagctgtacaaggttttttttttttttttttcttcctttttttctttttttttttctttttcccctttctttttctttctttctttctttttctttctttctttctctttctctctctcttttttctttttctttaaggtggggaaagagacaaccaagagacaggaagctgatctgcaaggattcggagttgtgctaaaaggactttgatttttttccccctttacgaacgctggcaattgacatcactacagacagcctggttagagaacaaactgcctcatcccaagtggaccccggcagctgggggaagccaggcaagatctgggaaggctgtgtgtgggtgttttttctacagatctcactcctcgccctttttttttttcctttggtgtgtgttttttgttttgttttgttttttaaaaaaattcttgctgtgttggaactagcgagtggtggagtctctgaagcctcatcagtcaccgggactgtcaggaatagtggtttaagaggaagctcggcctggggcactataccctgtcatccagttccctgcctcggagataaagattccagctacatgggcaaacgcctggatcagccacaaatgtacccccagtacacttactactatcctcattatctccaaaccaagtcctatgcaccagctccccaccccatggctcctcccagccccagcacaaacagcagcagcaacaacagcagcaacaacagcagcggggaacagttgagtaaaaccaacctgtacattcgaggcctcccaccaggcaccactgaccaggacctaatcaagctgtgccaaccgtatggaaaaattgtatctacaaaggcaattcttgacaaaaacacaaatcagtgcaaaggttatggttttgtagattttgacagtcctgcagccgcacagaaagcggtagcatctctcaaggcaaatggcgtgcaggcacagatggctaagcaacaagagcaagacccaacaaacctatacatctcaaatctccccatttctatggatgagcaggagcttgagaatatgctgaaaccctttggacatgtcatttccacaagaatactaagagacgctaatggagtcagcagaggtgttggctttgccagaatggagtctactgaaaaatgtgaagtggtaattcaacattttaatggaaaatatctgaaaacaccaccaggcatcccagcccccagtgagcctttgctgtgcaaattcgctgatggaggacaaaagaagcgacagaatcaaagcaaatatacccagaatgggaggccttggcccagggaaggagaggctggcatggctttgacctatgaccccacagctgccatacagaatggattttattcttcaccgtacagtattgcaaccaaccgcatgattccacagacatctatcacgccattcattgctgcttcccctgtctccacataccaggtccagagtacttcatggatgcctcatccgccatacgttatgcaaccaacaggtgctgtgattacaccaaccatggaccatcccatgtcaatgcagccagccaacatgatgggcccactgacacagcagatgaatcacctttcgttgggcacaacaggaacgattcaatcccaagacaggattatgatactccaccagctgttgtgtcagtatatgactgctgctgctcctatgcaagggacctacattcctcagtacacgcctgtgcctccgacagctgtttctattgaaggtgttgttgctgatacctctccccagacagtggcaccttcatcccaggacaccagtggtcagcagcaacagatagcagtggacacatccaacgaacatgcacctgcatattcttaccaacagtctaaaccataaacaggactgaagaatgtctgtctgaatctttgccttgaatgaagaaacttcattgaacaagaagttggcttccagtttgcacagacgtcaatggaatgcatttttttgttgttgttgttgttttttttttagtgttataccttacccaatgaaagcaaagtttttatgtgctgtgcaaatggtcttcatgtggtctgacaatttatttttgccatcatttttttaattaaagaaaaaatttccagaagaggaaaaaaaaactacaaaaaacaaaacattgaaggttgatattttatgtggaagaacatttgaattgaattcagaatttttctgaaggtgtagatactttttttttttttttaacagaaaacctgatgtcaagaggtgggcaatagaaatggaaacaaattgtcttcctcaataattaagctactttctctttttcccttcttgttttaatctagtgggttttttattttattttttcttagaaatatgtaggtaaggtttatcttgaatcttaattgccttaattttaaggacgtcaaaggctctcgaggcaagctgtcaacgtcttgttgaaaacaaaaatcaagaaagaattgaaatactgtgccggctttcactggcacagaagtttaagactatgagtttttagggtgaagaaaaaactgtacagtttaaatgaaaatgtttttcttcatttgaagaaaatttgttgataaaccatggcaactgcaagaattggaaaaatgctgggacttttcatgaactttgtcttaagtgttgacatgaatcattctaaaaggctaaaacattttacagtaaagttattaaggttggtttaaaaacaactgcattagaaataatgcgtgtttggggggcagaatgcagatttttttaatttacaaagcgtgatcgctagcaaaagcattagtgctttttatctgcagtcttttttatgagctttacaaagtttttagtcagctttgcttgtcacattgcaaaacctagcttaagagcattaaaaaaaaaaacttaagtagataggagcttatggtcaaaaagtgcaaaaaaaaaaacaaaaaaaaagcaatagatagagaaattgttgacaatttctgtagtctttcctagttgtgatcaaattcagcctatggatggcctattttataccaaagatgaagtgacaccctattacagtccagaagatagaggttgttttcgtttcttttctttttaaaaaaaaaaaaatttatttgaccga

SEQ ID NO: 279436 - DNA, 1311 bp, Artificial Sequence
  derived and/or modified sequence
atgggcaaaagattagaccagcctcagatgtaccctcagtacacctattattatccccactacttacagaccaaatcttatgcacccgctccccaccccatggcacctccatcgccctccacaaactcgtcctcaaacaacagttccaataactcttcaggcgagcagctgtccaaaacaaatctttatattcgaggactgccaccgggcaccacagatcaggacctgatcaagttgtgccagccttacggaaagatagtgtccacaaaggctatcctggacaagaacacaaatcaatgcaagggctacggctttgtcgactttgattctcctgcagcagctcagaaggctgtggcatccctgaaggcaaacggggtacaggcccagatggccaaacagcaagaacaggaccctaccaacctgtacataagcaatctgcctatcagtatggacgagcaagaattagagaatatgttgaaaccatttgggcatgtcatttctacgcggattctcagggatgctaacggcgtgtccagaggcgtcggctttgcacgcatggaaagcaccgagaaatgtgaggtagtcatccagcacttcaacgggaagtacttaaaaacgccccctggcatccctgcccctagcgaaccactgttgtgcaaatttgctgatggcggacaaaaaaagcgccagaaccagagtaagtatacccagaatggccgaccctggccgcgggaaggcgaggcaggcatggcactcacgtatgaccctaccgctgccatccagaatgggttctactccagcccttacagcatcgccactaacagaatgatcccccagactagcatcacaccattcatcgcagcatcaccagtctccacctaccaggtgcaatcgacgtcttggatgccccaccctccctacgtgatgcagcccaccggggccgttattacgccaacaatggaccaccctatgagtatgcagcctgctaacatgatgggaccactcactcagcaaatgaatcatttgtctttgggaaccacagggacaattcagagccaggaccggatcatgattctccaccagctcctatgccagtacatgaccgccgcagccccaatgcagggtacatacattccccagtacacaccggtgcccccgaccgccgtgtccattgaaggagtggtagcagacacatccccacaaaccgttgcccccagttcacaggacactagtggccagcagcagcagatagccgtggacacttccaatgaacacgcccccgcgtactcataccagcagtctaagccatag

SEQ ID NO: 279437 - DNA, 1311 bp, Artificial Sequence
  derived and/or modified sequence
atgggcaagaggctggaccagccccagatgtacccccagtacacctactactacccccactacctgcagaccaagagctatgccccagccccccaccccatggccccacccagccccagcaccaacagcagcagcaacaacagcagcaacaacagcagtggagagcagctgagcaagaccaacctgtacatccggggcctgcccccaggcaccacagaccaggacctgatcaagctgtgccagccctacggcaagatcgtgtccaccaaggccatcctggacaagaacaccaaccagtgcaagggctacggctttgtggactttgacagccctgctgctgcccagaaggctgtggccagcctgaaggccaacggggtgcaggcccagatggccaagcagcaggagcaggaccccaccaacctgtacatcagcaacctgcccatctccatggatgagcaggagctggagaacatgctgaagcccttcggccacgtgatcagcacccgcatcctgagagatgccaatggagtgtcccggggcgtgggctttgccaggatggagagcacagagaagtgtgaggtggtgatccagcacttcaacgggaagtacctgaagaccccacctggcatcccagcccccagcgagcccctgctgtgcaagtttgctgatggcggccagaagaagaggcagaaccagagcaagtacacccagaatggccggccctggccccgggagggggaggccggcatggccctgacctatgaccccacagctgccatccagaatggcttctacagcagcccctacagcatcgccaccaacaggatgatcccccagaccagcatcacccccttcatcgccgccagccctgtgtccacctaccaggtgcagagcacctcctggatgccccaccccccctacgtgatgcagcccaccggggccgtcatcacccccaccatggaccaccccatgtccatgcagcctgccaacatgatgggccccctgacccagcagatgaaccacctgagcctgggcaccaccggcaccatccagagccaggaccgcatcatgatcctgcaccagctgctgtgccagtacatgacagctgctgcccccatgcagggcacctacatcccccagtacacccctgtgcccccaacagctgtgtccattgaaggagtggtggccgacaccagcccccagacagtggcccccagcagccaggacaccagcggccagcagcagcagattgctgtggacaccagcaatgaacatgccccagcctacagctaccagcagagcaagccctag

SEQ ID NO: 279438 - DNA, 1311 bp, Artificial Sequence
  derived and/or modified sequence
atgggcaagcggctggaccagccccagatgtacccccagtacacctactactatccacattacctccagacgaaatcatacgccccagccccgcatcctatggcaccaccctccccttccacaaacagcagtagtaataactcgagtaataactcctccggagaacagctctccaagacaaacctctacatccgtggtctcccacccggaacaacagaccaggacctcatcaagctgtgccagccttatggtaagattgtgtccacaaaagccattcttgataagaacaccaatcaatgcaagggatatggtttcgtggactttgattctccagcggccgcgcagaaggcggtggccagcttaaaggccaacggggttcaggcccagatggcaaagcagcaagaacaggacccaacaaacctgtacatttctaatctccccatttctatggacgagcaggagctggagaatatgctgaaaccattcggacatgtgatttcaactcgcatcctgcgcgatgcaaatggggtttctagaggggtgggattcgcgcgcatggagagcacagaaaaatgcgaggttgtcatacagcacttcaacggaaagtaccttaaaaccccacccggcatccctgccccttctgaacctctgttatgcaaatttgccgatggaggacagaagaaacgacaaaatcagtctaaatatacccagaatggccgtccatggccccgggagggcgaagctggtatggctcttacttatgatcccactgcggccatccagaacgggttttattcaagtccatacagcattgcaaccaatcgcatgatccctcagactagtattacacccttcatcgcggcctcacctgttagtacctatcaagttcagtctacctcttggatgccccaccccccttacgtcatgcagccaactggggctgtgatcacccctacaatggaccaccccatgagtatgcagcctgccaatatgatgggtcctcttacccaacaaatgaaccacctcagtttaggcaccaccggcaccattcaatcccaagaccgcattatgattctccaccagctcctgtgtcaatacatgaccgctgccgctcccatgcaagggacctacattccccagtatacaccagtgccccctacggcagtcagcatagaaggcgtggttgctgacacctctccacagaccgtggccccatcatctcaggacacgagcggccagcagcagcagatagcggtggatacgtcaaatgaacatgcccctgcatactcctatcagcagagtaaaccatag

SEQ ID NO: 279439 - DNA, 1311 bp, Artificial Sequence
  derived and/or modified sequence
atgggaaagaggctggatcagccccagatgtacccgcagtatacttattattaccctcattacctccagacaaagtcctacgcgcctgctccacacccaatggcccctccaagcccatccaccaactctagctccaataatagttcaaataattcatccggggagcagttgagcaagactaatctatatattcgcggattacccccaggaaccacagatcaggacctgataaagttgtgccaaccttatggaaaaattgtgagcacgaaagccattctggataagaacacaaaccagtgtaaggggtatggcttcgtggattttgactccccggctgccgctcagaaagctgtggcgtccctaaaagccaatggagtccaagcccagatggctaaacagcaggaacaagatcctacaaacttatatatttcaaacttgccaattagtatggatgagcaggaactcgaaaacatgctgaaaccctttggtcacgtgatctccacccgcatcctgcgggatgctaatggggtaagtcggggtgtgggatttgctcgtatggaatcaactgagaaatgcgaggtagtgatccagcattttaacggaaagtacctaaagacaccgccagggatccctgcgcctagcgaacccctattgtgtaaattcgctgatggaggtcaaaagaaacgacagaatcagtccaaatacacacagaatggcaggccatggcccagagagggagaagctggcatggccctgacctacgatcctacagctgccatccaaaacggattctattcttccccatatagtatcgcaaccaataggatgatcccacagacctcaataacacccttcatcgcggcatcacctgtctctacttaccaagtccaatctacttcttggatgcctcacccaccttacgttatgcagcccacaggagcggtaattacccctacaatggatcatccaatgtctatgcagcccgcaaatatgatgggcccactgacgcaacaaatgaatcatctgtcactgggcaccactgggacgatccagtcacaggaccgtattatgatcctgcatcaacttttgtgccagtatatgaccgcggctgcgcctatgcaggggacgtatattccccagtataccccggtgccgccaacagccgttagtatcgagggggtggtggcagacacgagtcctcaaacagtcgcaccctcaagccaggacaccagtggccagcagcaacagatcgcagtggacacttctaacgagcacgcccctgcttatagttatcaacagtcgaagccatag

SEQ ID NO: 279440 - DNA, 1311 bp, Artificial Sequence
  derived and/or modified sequence
atgggcaagagactggaccagccccagatgtacccccagtacacctactactacccccactacctgcagaccaagagctacgcccccgccccccaccccatggccccccccagccccagcaccaacagcagcagcaacaacagcagcaacaacagcagcggcgagcagctgagcaagaccaacctgtacatcagaggcctgccccccggcaccaccgaccaggacctgatcaagctgtgccagccctacggcaagatcgtgagcaccaaggccatcctggacaagaacaccaaccagtgcaagggctacggcttcgtggacttcgacagccccgccgccgcccagaaggccgtggccagcctgaaggccaacggcgtgcaggcccagatggccaagcagcaggagcaggaccccaccaacctgtacatcagcaacctgcccatcagcatggacgagcaggagctggagaacatgctgaagcccttcggccacgtgatcagcaccagaatcctgagagacgccaacggcgtgagcagaggcgtgggcttcgccagaatggagagcaccgagaagtgcgaggtggtgatccagcacttcaacggcaagtacctgaagaccccccccggcatccccgcccccagcgagcccctgctgtgcaagttcgccgacggcggccagaagaagagacagaaccagagcaagtacacccagaacggcagaccctggcccagagagggcgaggccggcatggccctgacctacgaccccaccgccgccatccagaacggcttctacagcagcccctacagcatcgccaccaacagaatgatcccccagaccagcatcacccccttcatcgccgccagccccgtgagcacctaccaggtgcagagcaccagctggatgccccaccccccctacgtgatgcagcccaccggcgccgtgatcacccccaccatggaccaccccatgagcatgcagcccgccaacatgatgggccccctgacccagcagatgaaccacctgagcctgggcaccaccggcaccatccagagccaggacagaatcatgatcctgcaccagctgctgtgccagtacatgaccgccgccgcccccatgcagggcacctacatcccccagtacacccccgtgccccccaccgccgtgagcatcgagggcgtggtggccgacaccagcccccagaccgtggcccccagcagccaggacaccagcggccagcagcagcagatcgccgtggacaccagcaacgagcacgcccccgcctacagctaccagcagagcaagccctag

SEQ ID NO: 279441 - DNA, 101 bp, Artificial Sequence
  derived and/or modified sequence
gaaaaaaacggaattatcgaattgaatcaaatagaatcatcgaacggaccaaaatggaatcatctaatggaatggaatggaataatccatggactctaatg

SEQ ID NO: 279442 - DNA, 132 bp, Artificial Sequence
  derived and/or modified sequence
tggaatcatctaatggaatggaatggaataatccatggactcgaatgcaatcatcataaaatggaatcgaatggaatcaacatcaaatggaatcaaatgggatcattgaacggaattgaatggaatcgtcat

SEQ ID NO: 279443 - DNA, 864 bp, Artificial Sequence
  derived and/or modified sequence
atggacctgctggacggcctgaagctggagaccgagctgctggacggcaagaccaagctgatcctgagcccctacgagcacaagagcaagatcagcgtgaagatgggcaacaaggccaagatcgccaagtgccccctgagaaccaagaccggccacatcctgaagagcacccaggacacctgcatcggcagcgagaagctgctgcagaagaagcccgtgggcagcgagaccagccaggccaagggcgagaagaacggcatgaccttcagcagcaccaaggacctgtgcaagcagtgcatcgacaaggactgcctgcacatccagaaggagatcagccccgccacccccaacatgcagaagaccagaaacaccgtgaacaccagcctggtgggcaagcagaagccccacaagaagcacatcaccgccgagaacatgaagagcagcctggtgtgcctgacccaggaccagctgcagcagatcctgatgaccgtgaaccagggcaacagaagcctgagcctgaccgagaacggcaaggaggccaagagccagtacagcctgtacctgaacagcatcagcaaccagcccaaggacgagaacatcatgggcctgttcaagaagaccgagatggtgagcagcgtgcccgccgagaacaagagcgtgctgaacgagcaccaggagaccagcaagcagtgcgagcagaagatcgccatcgagaacgagtggaagcccgccgacatcttcagcaccctgggcgagagagagtgcgacagaagcagcctggaggccaagaaggcccagtggagaaaggagctggtgctgcagaccgtgcaggcctggtaccagcacctgctgggcttctggtag

SEQ ID NO: 279444 - DNA, 2248 bp, Artificial Sequence
  derived and/or modified sequence
atggatttattagatggtttaaagcttgaaactgaattactggatggaaaaaccaagctaatattgtctccatatgaacataaatcaaaaatttctgtgaagatgggaaataaggccaagattgcaaaatgtcctttaagaacaaaaactgggcacattctaaaatcaacacaagatacttgtattgggagtgaaaaacttttgcaaaagaagccagttggttcagaaacatcacaggcaaaaggtgaaaaaaatggaatgactttttcatccactaaggatttatgtaaacaatgtatagataaagactgtcttcatatccagaaagagatttcacctgcaacccctaatatgcagaagactagaaacaccgtaaatacatctctagtaggtaaacagaagcctcacaaaaaacacatcacagctgaaaacatgaagagcagtttggtgtgtctaacacaagaccaactacaacagattttgatgactgtaaaccaaggaaatagatctctttccctgactgagaatggaaaggaggcaaaaagtcaatatagtctatatttaaacagtatttctaatcagccaaaggatgagaacattatgggattattcaaaaaaactgaaatggtttcatctgtcccagctgaaaataaatctgtcttaaatgaacatcaggagacatctaaacagtgtgagcaaaaaattgccatagagaatgaatggaaaccagctgatatattcagtactctgggggaaagggaatgtgatagaagttcgttggaagcaaaaaaagcccagtggaggaaagagctagttttgcagactgtacaagcatggtaccagcatctcctcggcttctggtgaggcctcaggaagcttttactcacggtggaaggcaaagggggagcaggcattttacatggcaagagagatgccaggctcttttacacaaccagctctcatgtgaactgacagagggagaactcaagcatcatcccaaggggatggcaccaagccattcatgagggattcatctcctgtgacccaaacacctccccttaggccccacctccaacactggggaatcacatttcaacatgagatttgaaggggacaaatatccaaactgtatcatcaaggtaaaagaagaatgaagagattaaacttatgttagcagtatcagaaggtttggcggtcttgatgtgtgtttatatcacaatttcatctttaaatattttctttcagcacattccacatcaaaatgcaataccaaatgtctgaaataatatggaactacttggaaatgaccagaatattttgtgctttaatcatttttgttgttgttgttgttttgagacggagtttcattcttgttgcccaagctggagtgcaatggcaccatctcagctcactgcaacctctgcttgctgggttcaagtgattctcctgcctcagcctcctgagtagctgggattacaggcacctgccaccatgcccaacttactttttgtatctttagtagagacagggtttcaccatgttggccaggctggtctcaaactcctaacctcaggtgatccgcctgccttggcctcccgaagtgctgtgattacagttgtgagccaccacacctggccttatgctttaattattttaaaaatcagtttactgtttttttaacttgtctcagtaaagtgcctctatttaagtcatgcttccagtaacattcttggaatttaaatttatacaacattgaattttgtatttaaagaactactgttgattggggggttagttttgactatatctctcagacacaggcttttatgttttttacttgtcagcaattaagaaataatagctaacattcattgaatatttactttgtgccaagccctatattgagataggcactattattatccccattttatagaagaaaccaaggcttagaaagcttaccagcagttggccaactgcggtgggctcatgcctgtaatcctaccacgttgggaggccgaggcaggtggatcacaaggtcaggaaatagagaccatcctagccaacatggtgaaaccacatctccactaaaatacaaaaattagccgggcgtggtggtgctgcctgtagccccagctactcaggaggctgaggcaggggaatcgcttgaacctgggaggcggagattgcagtgagctgagatagcgccattgcactccaggctgctgacagaatgagactctatatt

SEQ ID NO: 279445 - DNA, 864 bp, Artificial Sequence
  derived and/or modified sequence
atggatttgttggacggtttgaaattggagaccgagttactcgatggtaaaactaaacttatactgtccccctacgagcataaatccaagatctctgtcaaaatgggaaacaaggctaagatcgctaagtgcccattgcggacgaagactgggcatattttgaagagcacacaggatacatgcatcgggtccgagaagcttctccaaaagaagccagtgggatcagagactagtcaggcaaaaggtgaaaagaacggtatgactttctccagcacaaaagatctctgtaagcagtgcatcgacaaggactgccttcatattcagaaggagatctctccggccacaccaaacatgcagaaaaccaggaacactgttaatacgagcttagtagggaaacagaaaccacacaagaagcacattaccgctgaaaacatgaaaagttcactggtttgcctgacgcaggatcaattgcaacagatactgatgactgtcaaccagggaaatcggtccctgagcctgactgaaaatgggaaggaggccaaatctcagtactcactgtatctgaattcgatttctaatcagcctaaggacgagaacatcatgggactgtttaagaagaccgaaatggtctctagtgtgccagccgaaaataaatctgtgctgaatgagcaccaggagacctcgaagcaatgcgagcagaaaattgcaatcgagaatgaatggaaacctgccgatatttttagtacacttggtgagcgtgagtgcgatagatctagcctcgaggccaagaaagctcaatggcgaaaggagctggtcctgcagaccgtccaggcgtggtaccagcatttgttaggcttttggtag

SEQ ID NO: 279446 - DNA, 864 bp, Artificial Sequence
  derived and/or modified sequence
atggacctgctggatggcctgaagctggagacagagctgctggatggcaagaccaagctgatcctgagcccctatgagcacaagagcaagatctctgtgaagatgggcaacaaggccaagatcgccaagtgccccctgcggaccaagacaggccacatcctgaagagcacccaggacacctgcatcggcagcgagaagctgctgcagaagaagcctgtgggcagcgagaccagccaggccaagggggagaagaatggcatgaccttcagcagcaccaaggacctgtgcaagcagtgcatcgacaaggactgcctgcacatccagaaggagatcagccctgccacccccaacatgcagaagaccaggaacacagtgaacaccagcctggtgggcaagcagaagccccacaagaagcacatcacagctgagaacatgaagagcagcctggtgtgcctgacccaggaccagctgcagcagatcctgatgacagtgaaccagggcaacagaagcctgagcctgacagaaaatggcaaggaggccaagagccagtacagcctgtacctgaacagcatcagcaaccagcccaaggatgagaacatcatgggcctcttcaagaagacagagatggtgtcctctgtgcctgctgagaacaagtctgtgctgaatgagcaccaggagaccagcaagcagtgtgagcagaagatcgccattgaaaatgagtggaagccagctgacatcttcagcaccctgggggagcgggagtgtgacaggagcagcctggaggccaagaaggcccagtggaggaaggagctggtgctgcagacagtgcaggcctggtaccagcacctgctgggcttctggtag

SEQ ID NO: 279447 - DNA, 864 bp, Artificial Sequence
  derived and/or modified sequence
atggacctgctggacggcctgaagctggagaccgagctgctggacgggaaaaccaagcttattttgtccccctatgaacataaaagtaagatctcagttaagatgggcaataaggctaagatcgccaaatgcccgctccgcacaaagaccggccacattctcaaaagcacccaagacacgtgtattggtagcgaaaagcttctccagaagaaacccgtgggttccgagacgagtcaagctaagggggaaaagaatggcatgaccttctcatctaccaaagatttatgtaaacagtgcatcgacaaagactgccttcatattcagaaggagatctcaccagccacacccaacatgcagaagacccgcaacacagttaatacctccctggtaggcaagcagaaacctcacaaaaaacacattacggccgagaatatgaagtctagtctcgtgtgcttaacacaagaccagctgcagcagatactcatgacagtcaatcagggaaaccgctcattatcacttaccgagaatgggaaagaggctaaatcccaatacagcctgtacttgaactctataagcaaccaaccaaaggatgagaacattatgggcttatttaagaagacagaaatggtttcctccgtacctgcagaaaacaagagtgtgcttaacgagcaccaggagacatcaaagcagtgcgaacaaaagattgcgattgagaatgaatggaaaccagctgacattttctccacccttggcgagagggaatgcgacaggagttccctggaggctaagaaggcacagtggcgcaaggagctggttctccagacagtacaagcctggtatcagcacctgctcgggttttggtag

SEQ ID NO: 279448 - DNA, 864 bp, Artificial Sequence
  derived and/or modified sequence
atggatctgctggacggactcaagctcgagaccgagctgttggatgggaagacgaagctgattttgtccccttatgaacataagagcaagatctctgtaaaaatgggtaataaagcaaagattgccaaatgtcccctgcggactaaaaccgggcacatcctcaagtctacccaggacacttgtattggcagtgagaagttgctgcaaaaaaagcccgtggggagcgagacgtctcaggccaagggcgagaaaaatggcatgacattttcatctaccaaggatctttgtaagcagtgtatcgacaaggattgtctgcacattcagaaagaaatctcccccgctacacctaatatgcagaagacccggaacactgtgaatacatcgctcgtggggaagcagaagccacacaagaaacacatcaccgccgaaaacatgaagagctccttggtgtgcctcacccaggatcagctgcagcaaattctcatgactgtgaatcagggtaatcgctcactgtccctgactgaaaatggcaaagaagcaaaatcacagtattccctttacctgaactctatctccaatcagcctaaagatgagaatatcatgggtttattcaagaagactgagatggtctcatcagttcctgctgaaaataagagtgtcctgaacgaacaccaggaaaccagtaagcagtgcgaacagaagattgctatcgaaaatgagtggaaacccgctgacatctttagcaccctgggagaaagggagtgtgacagatcctccctcgaggccaagaaagcgcaatggaggaaagaattggtgctgcagacagtgcaggcctggtatcaacacctcctgggcttctggtag

SEQ ID NO: 279449 - DNA, 2306 bp, Artificial Sequence
  derived and/or modified sequence
aaaatgtcgttcgtggcaggggttattcggcggctggacgagacagtggtgaaccgcatcgcggcgggggaagttatccagcggccagctaatgctatcaaagagatgattgagaactgtttagatgcaaaatccacaagtattcaagtgattgttaaagagggaggcctgaagttgattcagatccaagacaatggcaccgggatcaggaaagaagatctggatattgtatgtgaaaggttcactactagtaaactgcagtcctttgaggatttagccagtatttctacctatggctttcgaggtgaggctttggccagcataagccatgtggctcatgttactattacaacgaaaacagctgatggaaagtgtgcatacagagcaagttactcagatggaaaactgaaagcccctcctaaaccatgtgctggcaatcaagggacccagatcacggtggaggaccttttttacaacatagccacgaggagaaaagctttaaaaaatccaagtgaagaatatgggaaaattttggaagttgttggcaggtattcagtacacaatgcaggcattagtttctcagttaaaaaacaaggagagacagtagctgatgttaggacactacccaatgcctcaaccgtggacaatattcgctccatctttggaaatgctgttagtcgagaactgatagaaattggatgtgaggataaaaccctagccttcaaaatgaatggttacatatccaatgcaaactactcagtgaagaagtgcatcttcttactcttcatcaaccatcgtctggtagaatcaacttccttgagaaaagccatagaaacagtgtatgcagcctatttgcccaaaaacacacacccattcctgtacctcagactttgctaccaggacttgctggcccctctggggagatggttaaatccacaacaagtctgacctcgtcttctacttctggaagtagtgataaggtctatgcccaccagatggttcgtacagattcccgggaacagaagcttgatgcatttctgcagcctctgagcaaacccctgtccagtcagccccaggccattgtcacagaggataagacagatatttctagtggcagggctaggcagcaagatgaggagatgcttgaactcccagcccctgctgaagtggctgccaaaaatcagagcttggagggggatacaacaaaggggacttcagaaatgtcagagaagagaggacctacttccagcaaccccagaaagagacatcgggaagattctgatgtggaaatggtggaagatgattcccgaaaggaaatgactgcagcttgtaccccccggagaaggatcattaacctcactagtgttttgagtctccaggaagaaattaatgagcagggacatgaggttctccgggagatgttgcataaccactccttcgtgggctgtgtgaatcctcagtgggccttggcacagcatcaaaccaagttataccttctcaacaccaccaagcttagtgaagaactgttctaccagatactcatttatgattttgccaattttggtgttctcaggttatcggagccagcaccgctctttgaccttgccatgcttgccttagatagtccagagagtggctggacagaggaagatggtcccaaagaaggacttgctgaatacattgttgagtttctgaagaagaaggctgagatgcttgcagactatttctctttggaaattgatgaggaagggaacctgattggattaccccttctgattgacaactatgtgccccctttggagggactgcctatcttcattcttcgactagccactgaggtgaattgggacgaagaaaaggaatgttttgaaagcctcagtaaagaatgcgctatgttctattccatccggaagcagtacatatctgaggagtcgaccctctcaggccagcagagtgaagtgcctggctccattccaaactcctggaagtggactgtggaacacattgtctataaagccttgcgctcacacattctgcctcctaaacatttcacagaagatggaaatatcctgcagcttgctaacctgcctgatctatacaaagtctttgagaggtgttaaatatggttatttatgcactgtgggatgtgttcttctttctctgtattccgatacaaagtgttgtatcaaagtgtgatatacaaagtgtaccaacataagtgttggtagcacttaagacttatacttgccttctgatagtattcctttatacacagtggattgattataaataaatagatgtgtctt

SEQ ID NO: 279450 - DNA, 1131 bp, Artificial Sequence
  derived and/or modified sequence
atggaggagttccacggacgcacactgcatgacgatgatagctgtcaagtgattccggtgctcccgcaggtcatgatgatactgattccaggacagaccctgcctctgcagctgttccacccgcaggaggtctctatggtgagaaacctgatacagaaagaccggacatttgccgtgctcgcatactctaatgtgcaagaaagggaggcacaattcggaactacagcggagatatatgcctacagagaagagcaagattttggtatagagatagttaaagttaaagcgattggaaggcaacgcttcaaggtccttgaactcaggacacagagtgatggaatacagcaggcaaaagtgcagatcctgccagagtgcgttttaccaagtaccatgtccgccgttcaactcgaatctcttaacaagtgtcaaatttttccctccaaaccagtaagccgtgaggaccagtgttcatacaagtggtggcaaaagtaccagaaaaggaaatttcactgcgcgaacctcacaagttggccccgctggctgtatagcctctatgacgccgaaacattaatggacagaattaagaagcagctccgcgagtgggatgaaaacctcaaagacgactcccttccttccaacttctcctatcgcgtcgccgcatgcctaccaatagacgatgtgcttagaatccagctgctcaaaattggcagtgccattcagcggctccgctgcgagttggatatcatgaacaagtgcacaagtctgtgctgtaagcagtgtcaggagacagagattacaaccaagaacgagattttctcactcagtctctgcgggcccatggccgcgtacgttaacccacacggctatgtccacgaaacccttaccgtctacaaagcctgcaacctaaacctgataggcaggccttccacagagcatagctggtttccgggctacgcttggaccgtggcccaatgcaagatctgcgccagccacatcgggtggaagttcactgccaccaagaaagacatgtcaccacagaaattttgggggctgactaggtcagccctgctccctacgatcccagatacggaagatgagatatcacctgataaggtcatactgtgcctgtag

SEQ ID NO: 279451 - DNA, 1131 bp, Artificial Sequence
  derived and/or modified sequence
atggaggagttccacggccgcaccctgcatgatgatgacagctgccaggtgattcctgtgctgccccaggtgatgatgatcctgatccctggccagaccctgcccctgcagctgttccacccccaggaggtgtccatggtgaggaacctgatccagaaggacaggacctttgctgtgctggcctacagcaatgtgcaggagcgggaggcccagtttggcaccacagctgagatctatgcctaccgggaggagcaggactttggaattgaaattgtgaaggtgaaggccatcggccggcagcgcttcaaggtgctggagctgcggacccagagtgatggcatccagcaggccaaggtgcagatcctgcctgaatgtgtgctgcccagcaccatgtctgctgtgcagctggagagcctgaacaagtgccagatcttccccagcaagcctgtgtcccgggaggaccagtgcagctacaagtggtggcagaagtaccagaagaggaagttccactgtgccaacctgacctcctggccccgctggctgtacagcctgtatgatgctgagaccctgatggaccgcatcaagaagcagctgcgggagtgggatgagaacctgaaggatgacagcctgcccagcaacttctcctacagagtggccgcctgcctgcccattgatgatgtgctgcgcatccagctgctgaagattggcagcgccatccagaggctgcgctgtgagctggacatcatgaacaagtgcaccagcctgtgctgcaagcagtgccaggagacagagatcaccaccaagaatgagatcttcagcctgagcctgtgtggccccatggccgcctacgtgaacccccacggctacgtgcatgagaccctgactgtgtacaaggcctgcaacctgaacctgattggccggcccagcacagagcacagctggttccctggctacgcctggacagtggcccagtgcaagatctgtgccagccacatcggctggaagttcaccgccaccaagaaggacatgagcccccagaagttctggggcctgaccaggtctgccctgctgcccaccatcccagacacagaagatgagatcagcccagacaaggtgatcctgtgcctgtag

SEQ ID NO: 279452 - DNA, 1131 bp, Artificial Sequence
  derived and/or modified sequence
atggaggagttccacggccggaccctgcacgacgacgacagctgccaggtgatccccgtgttgcctcaggttatgatgatcctgattcccgggcagactctgccattgcaactatttcacccacaggaagtgagcatggtgcggaatctgattcagaaagacaggacatttgccgtccttgcgtattcgaatgtgcaagagagggaggcccagtttggaacaaccgccgaaatctacgcctaccgcgaagagcaggattttggaatagagatcgttaaggtcaaagctattggccgccagaggttcaaggtgctggagctgagaacacaaagcgatggtatccaacaggcaaaggtccaaatactcccggaatgcgttctgccatctaccatgagtgcagtacaattagagtcgctaaataagtgtcagatcttccctagtaagcctgtttcaagagaggatcagtgcagttacaagtggtggcagaagtaccaaaaacgaaaattccattgcgccaacctgacaagttggccaagatggctgtactcactttacgacgccgagactttgatggacagaatcaaaaagcagctgagagagtgggacgagaacctgaaggacgattcccttccttccaattttagctacagagtcgctgcctgcctccccattgacgatgtgttgaggatccaactcctcaaaattgggtcagccattcagcgccttcgttgtgaattggatattatgaataagtgcacctccctctgctgtaaacagtgccaggagactgagatcactaccaagaacgagattttctcactcagcctgtgcggcccaatggcagcctatgtcaacccccacgggtacgtccacgaaacgctgaccgtttacaaagcttgcaatttaaacctcattggcagaccgtctaccgaacattcttggtttcctggatatgcctggactgtcgctcagtgcaaaatctgtgcgtcccatatcgggtggaagtttactgcaactaaaaaagacatgtctccacaaaagttttggggactgaccagatcggcccttctccccactatccctgataccgaagacgagatttcaccggataaggtcatcctgtgtctctag

SEQ ID NO: 279453 - DNA, 1131 bp, Artificial Sequence
  derived and/or modified sequence
atggaggaatttcatgggcgtaccctccacgacgacgacagttgtcaggtcataccagtcctgccacaagtgatgatgatcttgatcccgggacaaactctgcctttgcaactgttccatccgcaggaagtgtccatggtcagaaacctcatacaaaaggacagaacattcgctgtgctcgcttacagcaacgtccaagaacgggaagcacaatttggcaccacagcagaaatctatgcgtatcgtgaggaacaggatttcggaatcgagattgtgaaggtcaaagctattggcaggcagcgattcaaggttctagaactgcgaactcagtccgatggtattcaacaggccaaggtgcagatcttgcccgaatgtgtactcccctcaacaatgtcggctgtgcagcttgaatcgctgaataaatgccagattttcccatctaagcctgtgagtcgtgaggaccaatgttcttataagtggtggcaaaagtaccaaaaacggaaattccactgtgcgaacctgacatcctggcccaggtggctttattccctgtatgatgccgaaacgctgatggacagaataaagaagcaactgcgtgagtgggatgaaaacctgaaagatgatagtcttcccagcaatttctcctatagagtggctgcttgcctgcctatcgatgacgtgcttagaattcagctccttaaaattggtagcgcgatccagagactccgatgcgagcttgatatcatgaacaaatgtacctcactctgctgcaagcaatgccaggagactgaaattaccacaaagaatgagatcttcagtctctctctctgtggaccaatggcagcgtatgtgaacccacatgggtacgttcatgagacgctaactgtgtacaaagcttgcaacctgaacctgataggtaggcctagcacggagcacagctggttccccggttacgcttggacagtggctcaatgtaaaatttgtgcctcacacatcggatggaagtttactgccactaaaaaggatatgtccccacagaaattctggggcttgactagaagcgccctgcttcctacaatcccagacactgaagatgagatcagtccggataaggtcatcctgtgcctctag

SEQ ID NO: 279454 - DNA, 1131 bp, Artificial Sequence
  derived and/or modified sequence
atggaggagttccacggcagaaccctgcacgacgacgacagctgccaggtgatccccgtgctgccccaggtgatgatgatcctgatccccggccagaccctgcccctgcagctgttccacccccaggaggtgagcatggtgagaaacctgatccagaaggacagaaccttcgccgtgctggcctacagcaacgtgcaggagagagaggcccagttcggcaccaccgccgagatctacgcctacagagaggagcaggacttcggcatcgagatcgtgaaggtgaaggccatcggcagacagagattcaaggtgctggagctgagaacccagagcgacggcatccagcaggccaaggtgcagatcctgcccgagtgcgtgctgcccagcaccatgagcgccgtgcagctggagagcctgaacaagtgccagatcttccccagcaagcccgtgagcagagaggaccagtgcagctacaagtggtggcagaagtaccagaagagaaagttccactgcgccaacctgaccagctggcccagatggctgtacagcctgtacgacgccgagaccctgatggacagaatcaagaagcagctgagagagtgggacgagaacctgaaggacgacagcctgcccagcaacttcagctacagagtggccgcctgcctgcccatcgacgacgtgctgagaatccagctgctgaagatcggcagcgccatccagagactgagatgcgagctggacatcatgaacaagtgcaccagcctgtgctgcaagcagtgccaggagaccgagatcaccaccaagaacgagatcttcagcctgagcctgtgcggccccatggccgcctacgtgaacccccacggctacgtgcacgagaccctgaccgtgtacaaggcctgcaacctgaacctgatcggcagacccagcaccgagcacagctggttccccggctacgcctggaccgtggcccagtgcaagatctgcgccagccacatcggctggaagttcaccgccaccaagaaggacatgagcccccagaagttctggggcctgaccagaagcgccctgctgcccaccatccccgacaccgaggacgagatcagccccgacaaggtgatcctgtgcctgtag

SEQ ID NO: 279455 - protein, 547 aa, Artificial Sequence
  derived and/or modified sequence
MEKARPLWANSLQFVFACISYAVGLGNVWRFPYLCQMYGGGSFLVPYIIMLIVEGMPLLYLELAVGQRMRQGSIGAWRTISPYLSGVGVASVVVSFFLSMYYNVINAWAFWYLFHSFQDPLPWSVCPLNGNHTGYDEECEKASSTQYFWYRKTLNISPSLQENGGVQWEPALCLLLAWLVVYLCILRGTESTGKVVYFTASLPYCVLIIYLIRGLTLHGATNGLMYMFTPKIEQLANPKAWINAATQIFFSLGLGFGSLIAFASYNEPSNNCQKHAIIVSLINSFTSIFASIVTFSIYGFKATFNYENCLKKVSLLLTNTFDLEDGFLTASNLEQVKGYLASAYPSKYSEMFPQIKNCSLESELDTAVQGTGLAFIVYTEAIKNMEVSQLWSVLYFFMLLMLGIGSMLGNTAAILTPLTDSKIISSHLPKEAISGLVCLVNCAIGMVFTMEAGNYWFDIFNDYAATLSLLLIVLVETIAVCYVYGLRRFESDLKAMTGRAVSWYWKVMWAGVSPLLIVSLFVFYLSDYILTGTLKYQAWDASQDDKL

SEQ ID NO: 279456 - DNA, 1644 bp, Artificial Sequence
  derived and/or modified sequence
atggagaaggccagacccctgtgggccaacagcctgcagttcgtgttcgcctgcatcagctacgccgtgggcctgggcaacgtgtggagattcccctacctgtgccagatgtacggcggcggcagcttcctggtgccctacatcatcatgctgatcgtggagggcatgcccctgctgtacctggagctggccgtgggccagagaatgagacagggcagcatcggcgcctggagaaccatcagcccctacctgagcggcgtgggcgtggccagcgtggtggtgagcttcttcctgagcatgtactacaacgtgatcaacgcctgggccttctggtacctgttccacagcttccaggaccccctgccctggagcgtgtgccccctgaacggcaaccacaccggctacgacgaggagtgcgagaaggccagcagcacccagtacttctggtacagaaagaccctgaacatcagccccagcctgcaggagaacggcggcgtgcagtgggagcccgccctgtgcctgctgctggcctggctggtggtgtacctgtgcatcctgagaggcaccgagagcaccggcaaggtggtgtacttcaccgccagcctgccctactgcgtgctgatcatctacctgatcagaggcctgaccctgcacggcgccaccaacggcctgatgtacatgttcacccccaagatcgagcagctggccaaccccaaggcctggatcaacgccgccacccagatcttcttcagcctgggcctgggcttcggcagcctgatcgccttcgccagctacaacgagcccagcaacaactgccagaagcacgccatcatcgtgagcctgatcaacagcttcaccagcatcttcgccagcatcgtgaccttcagcatctacggcttcaaggccaccttcaactacgagaactgcctgaagaaggtgagcctgctgctgaccaacaccttcgacctggaggacggcttcctgaccgccagcaacctggagcaggtgaagggctacctggccagcgcctaccccagcaagtacagcgagatgttcccccagatcaagaactgcagcctggagagcgagctggacaccgccgtgcagggcaccggcctggccttcatcgtgtacaccgaggccatcaagaacatggaggtgagccagctgtggagcgtgctgtacttcttcatgctgctgatgctgggcatcggcagcatgctgggcaacaccgccgccatcctgacccccctgaccgacagcaagatcatcagcagccacctgcccaaggaggccatcagcggcctggtgtgcctggtgaactgcgccatcggcatggtgttcaccatggaggccggcaactactggttcgacatcttcaacgactacgccgccaccctgagcctgctgctgatcgtgctggtggagaccatcgccgtgtgctacgtgtacggcctgagaagattcgagagcgacctgaaggccatgaccggcagagccgtgagctggtactggaaggtgatgtgggccggcgtgagccccctgctgatcgtgagcctgttcgtgttctacctgagcgactacatcctgaccggcaccctgaagtaccaggcctgggacgccagccaggacgacaagctgtag

SEQ ID NO: 279457 - DNA, 1644 bp, Artificial Sequence
  derived and/or modified sequence
atggagaaggcaaggcctctgtgggccaattcactgcaatttgtgtttgcttgtatctcttatgcagtcgggctcggaaacgtgtggcgttttccttatctgtgccaaatgtatggcggtggctcttttttggtgccttacattataatgctgatcgtggaaggtatgccactgctgtacctggaactcgctgtcgggcagagaatgaggcagggtagcatcggagcctggcgcactatctccccttatctgtctggcgtaggagtggcaagtgtggtcgtgagcttcttcctatctatgtactacaacgtgatcaatgcgtgggcattctggtatctcttccattctttccaagatccattgccctggtccgtgtgtccgctgaacggtaatcacactggctatgatgaagaatgtgagaaagcctccagcacccaatacttctggtaccggaagacactcaacatcagtccatctctccaggagaatggcggagtgcagtgggaacctgctctctgcctactgctggcctggctggtggtgtatttatgcatcctgcgcggcaccgaaagcaccgggaaggtggtgtattttaccgcatctttgccttactgtgtgttgatcatttaccttataagagggctcacactacatggtgcaaccaacgggctgatgtatatgtttactcccaagatcgaacaactggcgaaccctaaggcgtggatcaatgccgccactcagatcttcttttctctcggcctcgggtttggctcactgatcgcattcgcctcctacaacgaacctagcaacaattgtcaaaagcatgcgataatagttagcctgatcaacagcttcacctccatctttgcctcaattgtgacatttagcatctacggcttcaaggccacattcaattatgagaactgcctgaagaaggttagcctgctcctcactaatacctttgacctggaggacgggttcttgacggcctctaatctcgagcaggtcaagggatacctggcaagcgcataccctagcaagtattccgagatgtttcctcagattaagaattgctcactggagagcgagctggacactgcagtccagggcacggggctggcgttcatcgtttacacagaggcaattaagaacatggaggtcagccagctgtggtcagtcctgtatttctttatgctgctgatgctggggattgggagcatgttaggcaacaccgctgccatcctgactcccttaacagacagtaagataatttcttcccacctccctaaggaggctataagcggacttgtttgtctggtgaattgtgctattggtatggtctttaccatggaagccgggaattattggtttgatatcttcaacgattacgccgccaccctcagccttctgctgattgtcttagtcgagaccattgccgtgtgctatgtgtacgggctccggcgattcgaaagcgatttgaaggccatgacggggagagcggtaagctggtactggaaggtaatgtgggccggcgtcagccctctactcatagtaagcctattcgttttttacctgtcagattacattttaaccggaacacttaagtaccaggcatgggatgcatcccaggacgacaaattgtag

SEQ ID NO: 279458 - DNA, 1644 bp, Artificial Sequence
  derived and/or modified sequence
atggagaaggcccggcccctgtgggccaacagcctgcagtttgtgtttgcctgcatctcctatgctgtgggcctgggcaatgtgtggaggttcccctacctgtgccagatgtatggaggcggcagcttcctggtgccctacatcatcatgctgattgtggagggcatgcccctgctgtacctggagctggccgtgggccagaggatgaggcagggcagcatcggggcctggaggaccatcagcccctacctgtctggagtgggcgtggcctctgtggtggtgtccttcttcctgtccatgtactacaacgtcatcaatgcctgggccttctggtacctgttccacagcttccaggaccccctgccctggagcgtgtgccccctgaatggaaaccacacaggctatgatgaggagtgtgagaaggccagcagcacccagtacttctggtacaggaagaccctgaacatcagccccagcctgcaggagaatggaggagtgcagtgggagcccgccctgtgcctgctgctggcctggctggtggtgtacctgtgcatcctgcggggcacagagagcacaggcaaggtggtgtacttcaccgccagcctgccctactgtgtgctgatcatctacctgatccggggcctgaccctgcacggggccaccaacggcctgatgtacatgttcacccccaagattgagcagctggccaaccccaaggcctggatcaatgctgccacccagatcttcttcagcctgggcctgggcttcggcagcctcatcgcctttgccagctacaatgagcccagcaacaactgccagaagcacgccatcatcgtgtccctcatcaacagcttcaccagcatctttgccagcatcgtgaccttcagcatctacggcttcaaggccaccttcaactatgagaactgcctgaagaaggtgtccctgctgctgaccaacacctttgacctggaggatggcttcctgacagccagcaacctggagcaggtgaagggctacctggccagcgcctaccccagcaagtacagcgagatgttcccccagatcaagaactgcagcctggagagcgagctggacacagctgtgcagggcaccggcctggccttcatcgtgtacacagaggccatcaagaacatggaggtgtcccagctgtggagcgtgctgtacttcttcatgctgctgatgctgggcatcggctccatgctgggcaacacagctgccatcctgacccccctgacagacagcaagatcatcagcagccacctgcccaaggaggccatcagcggcctggtgtgcctggtgaactgtgccatcggcatggtgttcaccatggaggccggcaactactggtttgacatcttcaatgactatgctgccaccctgagcctgctgctgattgtgctggtggagaccatcgctgtgtgctacgtgtatggcctgcggagatttgaaagtgacctgaaggccatgacaggccgggctgtgtcctggtactggaaggtgatgtgggccggcgtgagccccctgctgattgtgtccctgtttgtgttctacctgagtgactacatcctgaccggcaccctgaagtaccaggcctgggatgccagccaggatgacaagctgtag

SEQ ID NO: 279459 - DNA, 1644 bp, Artificial Sequence
  derived and/or modified sequence
atggagaaggcccggcccctgtgggccaacagcctgcagttcgtgttcgcttgcatctcctacgccgtcggcttgggcaatgtatggaggtttccttatctgtgccaaatgtatggcggagggagtttccttgtgccgtacattatcatgctgattgtcgaaggcatgcccctactgtatctagagctggctgtgggacagcggatgcggcaaggtagcataggagcctggcgcaccatctctccctatttatctggggtgggagttgcgtctgtggtggtttcattctttctgagcatgtattataacgtcatcaacgcttgggctttctggtatctgtttcatagttttcaggaccctttaccttggtccgtgtgccctctgaatggtaatcatacaggttacgatgaagaatgtgagaaagcgagctctacacagtacttttggtacagaaaaaccttgaacatcagcccttccctgcaggagaacggaggcgtccagtgggagcctgcattgtgcttgcttctggcatggctcgtggtctatctatgcattctgcgggggaccgagtcgacagggaaagtggtctattttacagcttctcttccctattgcgtgctgattatttacctcatcagaggcctgactttgcatggcgctactaatgggctgatgtatatgtttacacctaagatcgagcagctcgcaaacccgaaggcttggatcaacgctgccactcagattttctttagcctgggtcttgggttcgggtcccttatagcattcgcaagttataatgagccatctaacaattgtcagaagcacgcgattattgttagtttgattaacagctttaccagcatttttgcgagcatagtgacattttcgatctatggattcaaagcaactttcaactatgagaactgcctgaaaaaagtgagtctcctgctaacgaacactttcgacctagaagacgggtttctgaccgcatccaatctggagcaggtcaaggggtacctggccagcgcttatcctagtaagtatagcgagatgttccctcagattaaaaattgctctctcgagtcagagctggatacggcagtccagggtaccgggctggcgtttattgtttacacagaagcgatcaaaaatatggaagtgtcacagctgtggagcgtgctttatttttttatgctgctcatgctaggtatcggtagcatgttggggaacacagccgccatcctgacacctttgaccgattctaaaatcatctcttcccacctgcccaaggaggcaatatccggactagtatgtctggttaattgcgcaattgggatggtgtttacaatggaggcagggaattattggttcgacatatttaatgattacgccgccacgctatcccttctgctgattgtgctggtggagaccatagccgtatgctacgtctacgggctaaggcggttcgagtccgatctcaaagccatgaccgggagggccgtatcatggtattggaaagttatgtgggcgggggtgagcccgctgctcatcgtgtccctttttgttttctacctctccgattacatcctgaccggcacacttaagtatcaggcctgggatgctagccaggatgataagttatag

SEQ ID NO: 279460 - DNA, 1644 bp, Artificial Sequence
  derived and/or modified sequence
atggaaaaagcccgtccgctttgggccaactcactgcaattcgtcttcgcctgcatatcgtatgctgtgggattaggcaacgtgtggcgatttccatacctttgccaaatgtatggcggtggatctttcctcgttccctatattatcatgctgattgtcgagggaatgccactgctgtatcttgaactcgcagtcggccagaggatgcgacaaggttcaattggtgcgtggaggacaatatccccatatttgtccggggtcggagtggcttccgtggtggtctctttcttcttatccatgtactacaacgtcatcaatgcatgggcattctggtatttgtttcacagctttcaggatcccctgccttggtctgtctgtcctctgaatggaaatcacacaggctatgatgaagagtgcgaaaaggctagttccacacaatacttttggtaccgcaagactttaaacatctccccttccttacaggaaaacggaggcgtacagtgggaacctgcgctgtgcctgttgcttgcctggctggttgtttacttgtgcattctccgaggcacggaatccacagggaaggtggtttattttacagctagccttccctactgcgttttaatcatctacctcatcagaggtctcactcttcacggagccacaaacggtctaatgtacatgtttacccctaagattgaacagctggcaaaccccaaagcgtggatcaacgcggcaactcagatttttttcagcttaggcttgggcttcggtagcttaattgcttttgcttcttacaacgagccatctaataattgtcagaagcacgccattattgtgtcactgattaattcctttacaagtatatttgctagtatcgtgaccttttccatttacggatttaaagccacattcaattatgagaactgcctgaaaaaagtttcactgcttctaacgaacacatttgatctggaggatggcttcctgaccgccagcaatctggagcaggtgaagggataccttgcctccgcatacccctcaaagtatagcgagatgtttccgcaaatcaaaaactgttccctggagtctgagctggacactgcagtgcagggcactggactggcgtttatcgtatacactgaagccattaagaacatggaggttagtcagctctggagcgtcctctactttttcatgcttttgatgttaggaatcggctctatgttgggcaacacagcagctatcctgacacccttgacggattcaaaaattatcagttcccacttgcccaaggaagcaatatccggtctggtctgcttggtgaattgcgccattggaatggtgtttaccatggaggccggtaattattggttcgatattttcaacgattatgctgcaaccttgtccctgctgctcatcgttctggtcgagacaatcgctgtctgctatgtatatggattgcgcagattcgaaagcgacttgaaggccatgaccggacgcgcagtgtcttggtattggaaggtgatgtgggccggagtatccccactgttgatcgtgagcctgttcgtgttctacctgagtgattatatactgaccgggaccctcaaatatcaggcatgggacgcttcccaggatgacaagctctag

SEQ ID NO: 279461 - DNA, 2662 bp, Artificial Sequence
  derived and/or modified sequence
accgcgcactgagactgccgtgccggacccccgagccggagccgagcgcgccgaggccggggccatggagaaagcgcggccgctgtgggccaactcgctacagttcgtgttcgcctgcatctcgtacgccgtgggcctgggcaacgtgtggcgattcccgtacctgtgccagatgtacggcggaggtagtttcctggtcccctacatcatcatgcttatcgtggagggaatgccgctcttgtacctggaactggctgtggggcagcgcatgcggcagggcagcatcggcgcctggaggaccatcagcccgtacctcagtggtgtcggggtcgccagcgtggtggtctctttcttcctctccatgtactacaacgtcatcaacgcctgggccttctggtacctcttccactccttccaggatcccctgccgtggtctgtctgcccactgaatggtaaccacacgggctacgatgaggagtgtgagaaggcgtcctccacacagtacttctggtacaggaaaaccctcaatatctcgccgtccctccaggagaacgggggtgtgcagtgggagccggcgctgtgcctcctcctggcctggctggtggtgtacctgtgcatcctgcgtggcaccgagtccactggcaaggtggtgtatttcacggcgtcactgccctattgcgtgctcatcatctacctcatcaggggcctcacgctccacggagccaccaatggcctcatgtacatgttcactcccaagatagagcagctggccaaccccaaggcctggatcaatgcagccacccagatcttcttctcacttggcctgggcttcggcagcctgatcgccttcgccagctacaatgagccatccaacaactgccagaagcacgccatcatcgtgtccctcatcaacagcttcacctccatatttgccagcattgtcaccttctccatctatggcttcaaggccaccttcaattatgaaaactgcttgaagaaggtgagtctgctgctgaccaacacttttgaccttgaagatggctttttgacagccagcaacctggagcaggtgaagggctacctcgcatctgcctacccaagcaaatacagcgagatgttcccgcaaatcaaaaactgcagcttggaatcggagctagacacggccgtccagggcactggcctggcattcatcgtctacacagaggccattaaaaacatggaggtgtcccagctgtggtcggtgctctacttcttcatgctgctgatgctgggcattgggagcatgctggggaacacagcggccatcctcacccctctgacagacagcaagatcatctccagccacctgcccaaggaggccatctcaggtctggtgtgccttgtcaactgtgccattggcatggtgttcacgatggaggctgggaactactggtttgacatattcaacgactacgcggccacactgtccctgctgctcatcgtgctggtggagacgattgccgtgtgctacgtgtacgggctgaggagatttgaaagtgaccttaaggccatgaccggccgagctgtgagctggtactggaaggtgatgtgggctggcgtaagcccactgctgattgtcagcctctttgtcttctacctgagcgactacatcctcacggggaccctgaagtatcaagcctgggacgcctcccaggatgacaagttataaagaaagaagatctttgtctgggacccccaaagggatcctttctctaaggtctctgacggtgggtccaggaccagacctctctacaaaaaattgccccaactacagtttgcaaccccaaaccacattagaagtctgtgcagacatccctccgtggtgtgtgtcttggtgcattggaaaaggagtcaggagccactgtgagtaggtcgttacccctaaagtgagcgagtcccttcctgctctaacgtccagtgcttccttgagatcatggaattctggagagtttctgtggatatatttgcacagatatctttgaagacacaaacactcacctgggacgttggccggagatgtctttttatttttgtgctgtaaaattctcttacagcaaaaataggctttagaaaggtcttctactgtcttcagcaaccatctcatcttccagcttcacctgattgtccagttatcatacatttgactttcaaatgtatgaaccagcatgtaccccatggatttaatcttatctaccccgtggattcaatcttcttatcagaaggttcttttatgtcaaaaaacctgctgtcaaggcttgaagagccggcacactcaatggcaaacacagcaccgagtctgctctgaatcctggaggatctggccctcctctcaatccccactcacagtcaccgtcttacaactcagggccacctgggatcagtcatcagtcagggtgcgtaagccttgaataccaggtagcctcaggagtgaaaagataaatgtcctagatcattaccttattcagtgtccccaccttgcagcgcattccaaccacctgggagcatttaaaactccagatgcccacaccacaccctggggccacccatcagaccttctggaagcaagacctgggcctccatggccccaaaaactccctaggtgatccgatgtgcagccaaatct

SEQ ID NO: 279462 - DNA, 589 bp, Artificial Sequence
  derived and/or modified sequence
ttttcctccgggaaaagaaacgggaagtggccgtgggccggtgaattccgtgtagtggccaagggagtggggccagccagcagaaacagtgggctgtacaacatcaccttcaaatatgacaattgtaccacctacttgaatccagtggggaagcatgtgattgctgacgcccagaatatcaccatcagccagtatgcttgccatgaccaagtggcagtcaccattctttggtccccaggggccctcggcatcgaattcctgaaaggatttcgggtaatactggaggagctgaagtcggagggaagacagtgccaacaactgattctaaaggatccgaagcagctcaacagtagcttcaaaagaactggaatggaatctcaacctttcctgaatatgaaatttgaaacggattatttcgtaaaggttgtcccttttccttccattaaaaacgaaagcaattaccaccctttcttctttagaacccgagcctgtgacctgttgttacagccggacaatctagcttgtaaacccttctggaagcctcggaacctgaacatcagccagcatggctcggacatgcaggtgtcct

SEQ ID NO: 279463 - DNA, 457 bp, Artificial Sequence
  derived and/or modified sequence
ggcggtcggtgaccgcggccggggctgcaggcggcggagcggctgggtcgcccatatttgattttgagctccaaaatggaagattggaaaatatgttttgaagagcttgccaacacttggtgtcacatgtgagcctcccacatgtattcactctccattccagctctgtgattgaactctgctcttattgactagggggcagttgggcaggcatgcctcattcctggaattgacagtcattcctaatttttgaatatactaacactgaatcagcacttctaaagcccttccttctcccactggcttcacttggctttcagacataatgaggagactggcttttcgaggcgctggttgtgctctgaagaagttggattccatgggttccaagagaagaagagctacctccccttccagcagtgtcagcggggactttgatgatgggcaccattctgtg

SEQ ID NO: 279464 - DNA, 547 bp, Artificial Sequence
  derived and/or modified sequence
tgggcccagtagccttgtcgcacctgccggcagggacaaaggcgcactacgggtcggaaactccccgcgctcctctttcccgctcgtcgcggggcagcttcaaagctgtcaacgtttccctcagtccccaataccagtgacagcttgccaacacttggtgtcacatgtgagcctcccacatgtattcactctccattccagctctgtgattgaactctgctcttattgactagggggcagttgggcaggcatgcctcattcctggaattgacagtcattcctaatttttgaatatactaacactgaatcagcacttctaaagcccttccttctcccactggcttcacttggctttcagacataatgaggagactggcttttcgaggcgctggttgtgctctgaagaagttggattccatgggttccaagagaagaagagctacctccccttccagcagtgtcagcggggactttgatgatgggcaccattctgtgtcaacaccaggcccaagcaggaaaaggaggagactttccaatcttccaactg

SEQ ID NO: 279465 - protein, 382 aa, Artificial Sequence
  derived and/or modified sequence
MSHIQIPPGLTELLQGYTVEVLRQQPPDLVEFAVEYFTRLREARAPASVLPAATPRQSLGHPPPEPGPDRVADAKGDSESEEDEDLEVPVPSRFNRRVSVCAETYNPDEEEEDTDPRVIHPKTDEQRCRLQEACKDILLFKNLDQEQLSQVLDAMFERIVKADEHVIDQGDDGDNFYVIERGTYDILVTKDNQTRSVGQYDNRGSFGELALMYNTPRAATIVATSEGSLWGLDRVTFRRIIVKNNAKKRKMFESFIESVPLLKSLEVSERMKIVDVIGEKIYKDGERIITQTKSNKDGGNQEVEIARCHKGQYFGELALVTNKPRAASAYAVGDVKCLVMDVQAFERLLGPCMDIMKRNISHYEEQLVKMFGSSVDLGNLGQ

SEQ ID NO: 279466 - DNA, 1149 bp, Artificial Sequence
  derived and/or modified sequence
atgtctcacatacagataccccccggtttgactgaactgctgcaggggtacacagttgaggtcctgcgccaacaaccccccgatctggtggagttcgcagtggaatactttaccagactgcgggaagcaagagcccctgcctctgttctgcctgcggccaccccacgccagtccctcggccatcctccccccgagcccgggccggatcgggtggctgacgcaaaaggggacagcgagagtgaggaagatgaggatctagaggtgcctgtcccatcccggttcaaccgacgagtgtcagtctgcgctgaaacatacaatccagatgaagaagaagaagacaccgatcccagagtcatccaccctaaaacagacgaacagaggtgtcggttacaagaggcctgtaaagacattctgctgtttaagaacctggaccaggagcagctgtcgcaggttctagatgctatgttcgaacggatcgttaaagcagatgagcatgttatcgaccaaggggatgacggcgacaatttctacgtgattgagcggggcacctatgatatcctcgtcacaaaagataaccagaccagatctgtgggccagtacgacaaccggggatcgtttggtgaacttgcactgatgtataatacccctagggcagctacaatcgtggcaacctccgaggggagcctttggggtctggacagggtcacatttcgcaggataatcgtcaagaataatgccaagaagagaaaaatgtttgagagttttattgaatccgtccccttgctgaagtccttagaggttagcgaaaggatgaagatagttgatgtgatcggtgagaagatctataaagacggagagcgaatcatcacccagaccaagtccaacaaggacgggggtaaccaggaggtggagatagccagatgtcacaagggtcaatattttggagagttggcactcgtgacgaacaaacctcgagcagccagtgcatatgcagtcggcgatgttaaatgcctggttatggacgtccaggctttcgaacgcctcctgggcccatgcatggacatcatgaaacgaaatatttcccattatgaggaacagctggttaaaatgtttggcagtagcgtggatctgggcaacctgggacagtag

SEQ ID NO: 279467 - DNA, 1149 bp, Artificial Sequence
  derived and/or modified sequence
atgagccacatccagatccccccaggcctgacagagctgctgcagggctacacagtggaggtgctgcggcagcagcccccagacctggtggagtttgctgtggagtacttcacccggctgcgggaggcccgggccccagcctctgtgctgcctgctgccaccccccggcagagcctgggccaccccccacctgagcccggccctgacagagtggctgatgccaagggggacagcgagagcgaggaggatgaggacctggaggtgcctgtgcccagccgcttcaacagaagagtgtctgtgtgtgccgagacctacaacccagatgaggaggaggaggacacagaccccagggtcatccaccccaagacagatgagcagcgctgccgcctgcaggaggcctgcaaggacatcctgctcttcaagaacctggaccaggagcagctgagccaggtgctggatgccatgtttgaaagaattgtgaaggcagatgaacatgtgattgaccagggagatgatggagacaacttctacgtgattgagcggggcacctatgacatcctggtgaccaaggacaaccagaccaggtctgtgggccagtatgacaacagaggcagctttggagagctggccctgatgtacaacaccccccgggccgccaccatcgtggccaccagcgagggcagcctgtggggcctggacagagtgaccttccgccgcatcatcgtgaagaacaatgccaagaagaggaagatgtttgagagcttcatcgagagcgtgcccctgctgaagagcctggaggtgtctgagaggatgaagatcgtggatgtgattggagagaagatctacaaggatggagagcgcatcatcacccagaccaagagcaacaaggatggcggcaaccaggaggtggagatcgcccgctgccacaagggccagtactttggagagctggccctggtgaccaacaagccccgggccgccagcgcctatgctgtgggagatgtgaagtgcctggtgatggatgtgcaggcctttgagcggctgctgggcccctgcatggacatcatgaagaggaacatcagccactatgaggagcagctggtgaagatgtttggcagctctgtggacctgggcaacctgggccagtag

SEQ ID NO: 279468 - DNA, 1149 bp, Artificial Sequence
  derived and/or modified sequence
atgagccacatccagatcccccccggcctgaccgagctgctgcagggttacacagtcgaagtgctgagacagcagccacctgaccttgtggagttcgccgtggagtatttcactagactacgcgaggcccgggcccccgccagcgtgttgcccgctgccactccaaggcagtctctgggccaccccccgcccgagccggggcccgaccgcgtagctgatgctaagggcgacagcgaaagtgaggaagatgaagacctggaggttccagtcccctctcggtttaaccgccgtgtatccgtctgcgctgagacatacaatccggatgaggaggaagaggacaccgacccaagggttattcaccctaaaaccgacgaacagcgctgcaggctccaggaggcctgcaaagacatcctcctctttaagaacctcgatcaggagcagttgagccaagtgctggatgcaatgtttgaaaggatcgttaaggccgacgagcatgtgatcgatcagggagacgatggtgataacttttacgtcatcgaaagggggacttacgatatactggttaccaaagacaatcaaacacgttcagtaggccagtatgacaatcgcggatctttcggcgagctggccttaatgtacaatactccccgcgcagcgacgattgtggcaacgtccgagggatcactctggggcctggaccgcgttacctttagaagaatcatagtaaagaacaatgccaagaagcggaagatgtttgaaagctttatcgaatccgttcctttgttgaagtcgcttgaggtttccgagaggatgaaaatagtagatgtgatcggggagaagatttacaaggatggtgagagaatcatcactcagacaaaatccaataaggatggcgggaaccaggaggtggagatagcaaggtgtcataaaggccagtatttcggggaactagccctcgtcactaacaagccccgggctgccagtgcttatgccgttggggatgtgaagtgcttggttatggatgtgcaggcatttgaacggctcctgggcccttgtatggatattatgaaacgtaatatcagccattatgaagaacagttagttaaaatgtttggttcctcggtggatctgggcaacttggggcagtag

SEQ ID NO: 279469 - DNA, 1149 bp, Artificial Sequence
  derived and/or modified sequence
atgtctcatatccagatcccaccgggtctgacagagctcctgcaggggtacactgttgaggttctccgacaacagccacctgacctggtggagttcgcagtagaatacttcacacgcctgcgggaggcacgcgctcctgcgtccgtgttaccagctgccacgccaaggcagtctttgggccatccccctcctgaaccaggaccagatagagtggctgatgccaaaggagactcagaatccgaggaggatgaagacctggaagtacccgtgccctcacgcttcaacaggagggtgtcagtctgtgccgagacatataacccggacgaggaggaagaagacacagatccaagggtgatccatccgaagaccgatgagcagcgatgccgcttacaggaggcatgcaaagacattctccttttcaaaaacctcgaccaagagcagctgtcacaggtcctggatgcaatgttcgagcggatcgtgaaggccgacgagcacgttattgaccagggcgacgacggcgacaatttttacgtaatcgagagagggacatacgacattttagtcacaaaggataaccagacgcgatctgtcggccagtacgataacaggggcagcttcggcgagctggctctgatgtataacactcccagggctgccaccatcgtcgcaacttccgaaggcagcctgtggggccttgatagagttacatttcgcaggatcattgtgaaaaataacgccaaaaaacgcaagatgtttgagagcttcatcgagtccgtacctctgctgaagagcttggaggtatccgaacgcatgaagattgtcgacgtcatcggtgagaagatctacaaagacggtgagcgaatcatcacccagaccaagtcgaataaggatggaggcaaccaagaggtcgagatcgccaggtgccacaaggggcaatactttggtgagcttgcgctggtcacaaataagccaagggcagcgtcagcgtatgctgtaggggatgtgaagtgcttggtcatggatgtccaggccttcgagcgtctgttggggccttgtatggatattatgaagaggaacatcagccactacgaggagcagctcgttaaaatgtttgggagctctgtggacctggggaatctgggacagtag

SEQ ID NO: 279470 - DNA, 3318 bp, Artificial Sequence
  derived and/or modified sequence
tccccgcggcggcggcggctgcccagtgacagcggcggcggtgccaggtcggccgtggtagcgtagggttgcgcggcccggaaacgcagagccggccaaagagcggcgcgacgtgagccggggccgtgcgcgaagagacctcgcgggcgcggagcgaaaggccggcgtgagtgagcgcggagacagtggccgccggcggcccaacccgtctatcccttcggccgccgccggcatgagccacatccagatcccgccggggctcacggagctgctgcagggctacacggtggaggtgctgcgacagcagccgcctgacctcgtcgaattcgcagtggagtacttcacccgcctgcgcgaggcccgcgccccagcctcagtcctgcccgccgccaccccacgccagagcctgggccaccccccgccagaacccggcccggaccgtgtcgccgacgccaaaggggacagcgagtcggaggaggacgaggacttggaagttccagttcctagcagatttaatagacgagtatcagtctgtgctgagacctataaccctgatgaggaagaggaagatacagatccaagggtgattcatcctaaaactgatgaacagagatgcagacttcaggaagcttgcaaagatattctccttttcaaaaatcttgatcaggaacagctttctcaagttctcgatgccatgtttgaaaggatagtcaaagctgatgagcatgtcattgaccaaggagatgatggagacaacttttatgtcatagaacggggaacttatgacattttagtaacaaaagataatcaaacccgctctgttggtcaatatgacaaccgtggcagttttggagaactagctctgatgtacaacaccccgagagctgctaccattgttgctacctcagaaggctccctttggggactggaccgggtgacttttagaagaatcatagtgaaaaataatgcaaagaagaggaagatgtttgaatcatttattgagtctgtgcccctccttaaatcactagaggtgtcagaacgaatgaagattgtggatgtaataggagagaagatctataaggatggagaacgcataatcactcagactaaatcaaacaaggatggtgggaaccaggaggtcgagattgcccgctgccataaggggcagtactttggagagcttgccctggtcaccaacaaacccagagctgcctcagcttatgcagttggagatgtcaaatgcttagttatggatgtacaagcattcgagaggcttctggggccctgcatggacatcatgaagaggaacatctcacactatgaggaacagctggtgaagatgtttggctccagcgtggatctgggcaacctcgggcagtaggtgtgccacaccccagagccttcttagtgtgacaccaaaaccttctggtcagccacagaacacatacagaaaacagacatgacagaactgttcctgccgttgccgccactgctgccattgctgtggttatgggcatttagaaaacttgaaagtcagcactaaaggatgggcagaggttcaacccacacctccactttgcttctgaaggcccattcattagaccacttgtaaagattactccaacccagtttttatatctttggttcaaaacggcatgtctctccaacaatttaagtgcctgatacaaagtccaaagtataaacatgctcctttcctctcttgctgctactcttgcttttggaagttaccacagggtctgcagaaacctgttgtataactgtagacactctctaatggttctcaaaggaggaaatgtagccttcagtctcctcatttgtcctttgaggaagtccacatttgttcacagttgcagcctttggttttacagtgggaaatggtggtggatgatatggacatatgtagcccagtggcattgtactttctgctgacagctgcacacattacagctgtctccaaacccacagtgatgcttagggaaagaccctgctcaggacccagcaggtcagcaccccagagcagactgataggtccgtgggacccatgttagagcagaaaatttgggctcagcacattttactgttagtagagagccaggaaacgttttctgggttggggattttgtgggattttttaatttttttagtaggttttgtttaacctctgtgcagtttgtatgaatgaattgctatacatttataaggagccagggtctggagggttgctatcactttgtccagcccaaataccttcctgggcaactcctaccatttgtttgcagttgcctctactagctgatggcagtatgctggaaagaggttgtactataaagagagttctttccttctactccagagttgttgtgtagctttgccattgaaccgatcaatttttaaactctttaaagaagcagcagctatttttttgaaattaaagaaaattctcaggccaggctcaatggctcatgcctataattgtagtgctttgggaggctgagctgggaggatcgcttaagaccagcctaggcaacagagtgagatcctgtctctacaaaaacaaaaattttttttttgttttctttttgagacggagtttcgctcttgttgcccaggctggagtgcaatggtgcggtcttggctcaccgcaacctccgcctcccagattaaagtgattctcctgcctcaacctcctgagtagctgggattacaggcatgcgccaccatgccgggcgaattttgtatttttaatagagacagggtttctctgtgttggtcaggctggtctcaaactcccaacctcaggtgatccgcccacctcagcctctcagagtgctgggattacagatgtgagccactgcacctggcaaaaaaaaaatttttttttaatttgtcaggtgtggtgatgcatgcatgtagtcccaaatacttaggaggctgaggtggaaggatcacttgagcccaggaggtcaaggcaacagtgagctgtgatcatgccactgcactccagtctgggtgacacagtgagaccctgtctcttaaaaaaaaaaaaagaaagaaaaaaaattattctttaggtaatttcacttggacatattcatgtatatggagtttgtcagctgactcaggcatttaccctaaagatcaaatctgttttcaaaaattggcattggccaggcacggtgacccacacctgtaatcccagcactttgggaggccgaggcgggcggatcacgaggtcaggggttcaagaccagcctggccaacatagtgaaaccccgtctctactaaaaatacaaaaaa

SEQ ID NO: 279471 - DNA, 1149 bp, Artificial Sequence
  derived and/or modified sequence
atgagccacatccagatcccccccggcctgaccgagctgctgcagggctacaccgtggaggtgctgagacagcagccccccgacctggtggagttcgccgtggagtacttcaccagactgagagaggccagagcccccgccagcgtgctgcccgccgccacccccagacagagcctgggccaccccccccccgagcccggccccgacagagtggccgacgccaagggcgacagcgagagcgaggaggacgaggacctggaggtgcccgtgcccagcagattcaacagaagagtgagcgtgtgcgccgagacctacaaccccgacgaggaggaggaggacaccgaccccagagtgatccaccccaagaccgacgagcagagatgcagactgcaggaggcctgcaaggacatcctgctgttcaagaacctggaccaggagcagctgagccaggtgctggacgccatgttcgagagaatcgtgaaggccgacgagcacgtgatcgaccagggcgacgacggcgacaacttctacgtgatcgagagaggcacctacgacatcctggtgaccaaggacaaccagaccagaagcgtgggccagtacgacaacagaggcagcttcggcgagctggccctgatgtacaacacccccagagccgccaccatcgtggccaccagcgagggcagcctgtggggcctggacagagtgaccttcagaagaatcatcgtgaagaacaacgccaagaagagaaagatgttcgagagcttcatcgagagcgtgcccctgctgaagagcctggaggtgagcgagagaatgaagatcgtggacgtgatcggcgagaagatctacaaggacggcgagagaatcatcacccagaccaagagcaacaaggacggcggcaaccaggaggtggagatcgccagatgccacaagggccagtacttcggcgagctggccctggtgaccaacaagcccagagccgccagcgcctacgccgtgggcgacgtgaagtgcctggtgatggacgtgcaggccttcgagagactgctgggcccctgcatggacatcatgaagagaaacatcagccactacgaggagcagctggtgaagatgttcggcagcagcgtggacctgggcaacctgggccagtag

SEQ ID NO: 279472 - protein, 171 aa, Artificial Sequence
  derived and/or modified sequence
MGFEEGETHLIFPKKASVEQLQKIRDLIAIERSSRLDGSNKSHKVKSSQQPAASTQLPTTPSSNPSGLNQHTRNRQGQSSDPPSASTVAADSAILEVLQSNIQHVLVYENPALQEKALACIPVQELKRKSQEKLSRARKLDKDIITLRNFWKQDVDGVASGPIVLHCAAEL

SEQ ID NO: 279473 - protein, 1907 aa, Artificial Sequence
  derived and/or modified sequence
MQFVSWATLLTLLVRDLAEMGSPDAAAAVRKDRLHPRQVKLLETLSEYEIVSPIRVNALGEPFPTNVHFKRTRRSINSATDPWPAFASSSSSSTSSQAHYRLSAFGQQFLFNLTANAGFIAPLFTVTLLGTPGVNQTKFYSEEEAELKHCFYKGYVNTNSEHTAVISLCSGMLGTFRSHDGDYFIEPLQSMDEQEDEEEQNKPHIIYRRSAPQREPSTGRHACDTSEHKNRHSKDKKKTRARKWGERINLAGDVAALNSGLATEAFSAYGNKTDNTREKRTHRRTKRFLSYPRFVEVLVVADNRMVSYHGENLQHYILTLMSIDGPSISFNAQTTLKNFCQWQHSKNSPGGIHHDTAVLLTRQDICRAHDKCDTLGLAELGTICDPYRSCSISEDSGLSTAFTIAHELGHVFNMPHDDNNKCKEEGVKSPQHVMAPTLNFYTNPWMWSKCSRKYITEFLDTGYGECLLNEPESRPYPLPVQLPGILYNVNKQCELIFGPGSQVCPYMMQCRRLWCNNVNGVHKGCRTQHTPWADGTECEPGKHCKYGFCVPKEMDVPVTDGSWGSWSPFGTCSRTCGGGIKTAIRECNRPEPKNGGKYCVGRRMKFKSCNTEPCLKQKRDFRDEQCAHFDGKHFNINGLLPNVRWVPKYSGILMKDRCKLFCRVAGNTAYYQLRDRVIDGTPCGQDTNDICVQGLCRQAGCDHVLNSKARRDKCGVCGGDNSSCKTVAGTFNTVHYGYNTVVRIPAGATNIDVRQHSFSGETDDDNYLALSSSKGEFLLNGNFVVTMAKREIRIGNAVVEYSGSETAVERINSTDRIEQELLLQVLSVGKLYNPDVRYSFNIPIEDKPQQFYWNSHGPWQACSKPCQGERKRKLVCTRESDQLTVSDQRCDRLPQPGHITEPCGTDCDLRWHVASRSECSAQCGLGYRTLDIYCAKYSRLDGKTEKVDDGFCSSHPKPSNREKCSGECNTGGWRYSAWTECSKSCDGGTQRRRAICVNTRNDVLDDSKCTHQEKVTIQRCSEFPCPQWKSGDWSECLVTCGKGHKHRQVWCQFGEDRLNDRMCDPETKPTSMQTCQQPECASWQAGPWGQCSVTCGQGYQLRAVKCIIGTYMSVVDDNDCNAATRPTDTQDCELPSCHPPPAAPETRRSTYSAPRTQWRFGSWTPCSATCGKGTRMRYVSCRDENGSVADESACATLPRPVAKEECSVTPCGQWKALDWSSCSVTCGQGRATRQVMCVNYSDHVIDRSECDQDYIPETDQDCSMSPCPQRTPDSGLAQHPFQNEDYRPRSASPSRTHVLGGNQWRTGPWGACSSTCAGGSQRRVVVCQDENGYTANDCVERIKPDEQRACESGPCPQWAYGNWGECTKLCGGGIRTRLVVCQRSNGERFPDLSCEILDKPPDREQCNTHACPHDAAWSTGPWSSCSVSCGRGHKQRNVYCMAKDGSHLESDYCKHLAKPHGHRKCRGGRCPKWKAGAWSQCSVSCGRGVQQRHVGCQIGTHKIARETECNPYTRPESERDCQGPRCPLYTWRAEEWQECTKTCGEGSRYRKVVCVDDNKNEVHGARCDVSKRPVDRESCSLQPCEYVWITGEWSECSVTCGKGYKQRLVSCSEIYTGKENYEYSYQTTINCPGTQPPSVHPCYLRDCPVSATWRVGNWGSCSVSCGVGVMQRSVQCLTNEDQPSHLCHTDLKPEERKTCRNVYNCELPQNCKEVKRLKGASEDGEYFLMIRGKLLKIFCAGMHSDHPKEYVTLVHGDSENFSEVYGHRLHNPTECPYNGSRRDDCQCRKDYTAAGFSSFQKIRIDLTSMQIITTDLQFARTSEGHPVPFATAGDCYSAAKCPQGRFSINLYGTGLSLTESARWISQGNYAVSDIKKSPDGTRVVGKCGGYCGKCTPSSGTGLEVRVL

SEQ ID NO: 279474 - protein, 991 aa, Artificial Sequence
  derived and/or modified sequence
  misc_feature (1)..(1): Xaa can be any naturally occurring amino acid
XECSAQCGLGYRTLDIYCAKYSRLDGKTEKVDDGFCSSHPKPSNREKCSGECNTGGWRYSAWTECSKSCDGGTQRRRAICVNTRNDVLDDSKCTHQEKVTIQRCSEFPCPQWKSGDWSECLVTCGKGHKHRQVWCQFGEDRLNDRMCDPETKPTSMQTCQQPECASWQAGPWGQCSVTCGQGYQLRAVKCIIGTYMSVVDDNDCNAATRPTDTQDCELPSCHPPPAAPETRRSTYSAPRTQWRFGSWTPCSATCGKGTRMRYVSCRDENGSVADESACATLPRPVAKEECSVTPCGQWKALDWSSCSVTCGQGRATRQVMCVNYSDHVIDRSECDQDYIPETDQDCSMSPCPQRTPDSGLAQHPFQNEDYRPRSASPSRTHVLGGNQWRTGPWGACSSTCAGGSQRRVVVCQDENGYTANDCVERIKPDEQRACESGPCPQWAYGNWGECTKLCGGGIRTRLVVCQRSNGERFPDLSCEILDKPPDREQCNTHACPHDAAWSTGPWSSCSVSCGRGHKQRNVYCMAKDGSHLESDYCKHLAKPHGHRKCRGGRCPKWKAGAWSQCSVSCGRGVQQRHVGCQIGTHKIARETECNPYTRPESERDCQGPRCPLYTWRAEEWQECTKTCGEGSRYRKVVCVDDNKNEVHGARCDVSKRPVDRESCSLQPCEYVWITGEWSECSVTCGKGYKQRLVSCSEIYTGKENYEYSYQTTINCPGTQPPSVHPCYLRDCPVSATWRVGNWGSCSVSCGVGVMQRSVQCLTNEDQPSHLCHTDLKPEERKTCRNVYNCELPQNCKEVKRLKGASEDGEYFLMIRGKLLKIFCAGMHSDHPKEYVTLVHGDSENFSEVYGHRLHNPTECPYNGSRRDDCQCRKDYTAAGFSSFQKIRIDLTSMQIITTDLQFARTSEGHPVPFATAGDCYSAAKCPQGRFSINLYGTGLSLTESARWISQGNYAVSDIKKSPDGTRVVGKCGGYCGKCTPSSGTGLEVRVL

SEQ ID NO: 279475 - DNA, 336 bp, Artificial Sequence
  derived and/or modified sequence
atggtgagcctgtgggtggaggacaccttcctgagccccggcttcggcttcgcccacgtggcctgcagcggcctgggcatgaagcagaagagaaaggccgccagcagcgagcccaccagcgaggtggccctgggcggcagcgccggccccgtgagaagccacctgcaccccgagggcctgctgtggtgcagcagatgcttcttcagcctgagacccaagggcaccgagccccccggcagaagcgccggcctgcagggcgccaccgagagaagcggctggaccagcgtgcaggcccaggcccaggcctgcgagaacctggtgcccgccgccgtgtag

SEQ ID NO: 279476 - DNA, 7060 bp, Artificial Sequence
  derived and/or modified sequence
ggagggaggggtgggaagcaccatgcagtttgtatcctgggccacactgctaacgctcctggtgcgggacctggccgagatggggagcccagacgccgcggcggccgtgcgcaaggacaggctgcacccgaggcaagtgaaattattagagaccctgagcgaatacgaaatcgtgtctcccatccgagtgaacgctctcggagaaccctttcccacgaacgtccacttcaaaagaacgcgacggagcattaactctgccactgacccctggcctgccttcgcctcctcctcttcctcctctacctcctcccaggcgcattaccgcctctctgccttcggccagcagtttctatttaatctcaccgccaatgccggatttatcgctccactgttcactgtcaccctcctcgggacgcccggggtgaatcagaccaagttttattccgaagaggaagcggaactcaagcactgtttctacaaaggctatgtcaataccaactccgagcacacggccgtcatcagcctctgctcaggaatgctgggcacattccggtctcatgatggggattattttattgaaccactacagtctatggatgaacaagaagatgaagaggaacaaaacaaaccccacatcatttataggcgcagcgccccccagagagagccctcaacaggaaggcatgcatgtgacacctcagaacacaaaaataggcacagtaaagacaagaagaaaaccagagcaagaaaatggggagaaaggattaacctggctggtgacgtagcagcattaaacagcggcttagcaacagaggcattttctgcttatggtaataagacggacaacacaagagaaaagaggacccacagaaggacaaaacgttttttatcctatccacggtttgtagaagtcttggtggtggcagacaacagaatggtttcataccatggagaaaaccttcaacactatattttaactttaatgtcaattgatgggccttccatatcttttaatgctcagacaacattaaaaaacttttgccagtggcagcattcgaagaacagtccaggtggaatccatcatgatactgctgttctcttaacaagacaggatatctgcagagctcacgacaaatgtgataccttaggcctggctgaactgggaaccatttgtgatccctatagaagctgttctattagtgaagatagtggattgagtacagcttttacgatcgcccatgagctgggccatgtgtttaacatgcctcatgatgacaacaacaaatgtaaagaagaaggagttaagagtccccagcatgtcatggctccaacactgaacttctacaccaacccctggatgtggtcaaagtgtagtcgaaaatatatcactgagtttttagacactggttatggcgagtgtttgcttaacgaacctgaatccagaccctaccctttgcctgtccaactgccaggcatcctttacaacgtgaataaacaatgtgaattgatttttggaccaggttctcaggtgtgcccatatatgatgcagtgcagacggctctggtgcaataacgtcaatggagtacacaaaggctgccggactcagcacacaccctgggccgatgggacggagtgcgagcctggaaagcactgcaagtatggattttgtgttcccaaagaaatggatgtccccgtgacagatggatcctggggaagttggagtccctttggaacctgctccagaacatgtggagggggcatcaaaacagccattcgagagtgcaacagaccagaaccaaaaaatggtggaaaatactgtgtaggacgtagaatgaaatttaagtcctgcaacacggagccatgtctcaagcagaagcgagacttccgagatgaacagtgtgctcactttgacgggaagcattttaacatcaacggtctgcttcccaatgtgcgctgggtccctaaatacagtggaattctgatgaaggaccggtgcaagttgttctgcagagtggcagggaacacagcctactatcagcttcgagacagagtgatagatggaactccttgtggccaggacacaaatgatatctgtgtccagggcctttgccggcaagctggatgcgatcatgttttaaactcaaaagcccggagagataaatgtggggtttgtggtggcgataattcttcatgcaaaacagtggcaggaacatttaatacagtacattatggttacaatactgtggtccgaattccagctggtgctaccaatattgatgtgcggcagcacagtttctcaggggaaacagacgatgacaactacttagctttatcaagcagtaaaggtgaattcttgctaaatggaaactttgttgtcacaatggccaaaagggaaattcgcattgggaatgctgtggtagagtacagtgggtccgagactgccgtagaaagaattaactcaacagatcgcattgagcaagaacttttgcttcaggttttgtcggtgggaaagttgtacaaccccgatgtacgctattctttcaatattccaattgaagataaacctcagcagttttactggaacagtcatgggccatggcaagcatgcagtaaaccctgccaaggggaacggaaacgaaaacttgtttgcaccagggaatctgatcagcttactgtttctgatcaaagatgcgatcggctgccccagcctggacacattactgaaccctgtggtacagactgtgacctgaggtggcatgttgccagcaggagtgaatgtagtgcccagtgtggcttgggttaccgcacattggacatctactgtgccaaatatagcaggctggatgggaagactgagaaggttgatgatggtttttgcagcagccatcccaaaccaagcaaccgtgaaaaatgctcaggggaatgtaacacgggtggctggcgctattctgcctggactgaatgttcaaaaagctgtgacggtgggacccagaggagaagggctatttgtgtcaatacccgaaatgatgtactggatgacagcaaatgcacacatcaagagaaagttaccattcagaggtgcagtgagttcccttgtccacagtggaaatctggagactggtcagagtgcttggtcacctgtggaaaagggcataagcaccgccaggtctggtgtcagtttggtgaagatcgattaaatgatagaatgtgtgaccctgagaccaagccaacatctatgcagacttgtcagcagccggaatgtgcatcctggcaggcgggtccctggggacagtgcagtgtcacttgtggacagggataccagctaagagcagtgaaatgcatcattgggacttatatgtcagtggtagatgacaatgactgtaatgcagcaactagaccaactgatacccaggactgtgaattaccatcatgtcatcctcccccagctgccccggaaacgaggagaagcacatacagtgcaccaagaacccagtggcgatttgggtcttggaccccatgctcagccacttgtgggaaaggtacccggatgagatacgtcagctgccgagatgagaatggctctgtggctgacgagagtgcctgtgctaccctgcctagaccagtggcaaaggaagaatgttctgtgacaccctgtgggcaatggaaggccttggactggagctcttgctctgtgacctgtgggcaaggtagggcaacccggcaagtgatgtgtgtcaactacagtgaccacgtgatcgatcggagtgagtgtgaccaggattatatcccagaaactgaccaggactgttccatgtcaccatgccctcaaaggaccccagacagtggcttagctcagcaccccttccaaaatgaggactatcgtccccggagcgccagccccagccgcacccatgtgctcggtggaaaccagtggagaactggcccctggggagcatgttccagtacctgtgctggcggatcccagcggcgtgttgttgtatgtcaggatgaaaatggatacaccgcaaacgactgtgtggagagaataaaacctgatgagcaaagagcctgtgaatccggcccttgtcctcagtgggcttatggcaactggggagagtgcactaagctgtgtggtggaggcataagaacaagactggtggtctgtcagcggtccaacggtgaacggtttccagatttgagctgtgaaattcttgataaacctcccgatcgtgagcagtgtaacacacatgcttgtccacacgacgctgcatggagtactggcccttggagctcgtgttctgtctcttgtggtcgagggcataaacaacgaaatgtttactgcatggcaaaagatggaagccatttagaaagtgattactgtaagcacctggctaagccacatgggcacagaaagtgccgaggaggaagatgccccaaatggaaagctggcgcttggagtcagtgctctgtgtcctgtggccgaggcgtacagcagaggcatgtgggctgtcagatcggaacacacaaaatagccagagagaccgagtgcaacccatacaccagaccggagtcggaacgcgactgccaaggcccacggtgtcccctctacacttggagggcagaggaatggcaagaatgcaccaagacctgcggcgaaggctccaggtaccgcaaggtggtgtgtgtggatgacaacaaaaacgaggtgcatggggcacgctgtgacgtgagcaagcggccggtggaccgtgaaagctgtagtttgcaaccctgcgagtatgtctggatcacaggagaatggtcagagtgctcagtgacctgtggaaaaggctacaaacaaaggcttgtctcgtgcagcgagatttacaccgggaaggagaattatgaatacagctaccaaaccaccatcaactgcccaggcacgcagccccccagtgttcacccctgttacctgagggactgccctgtctcggccacctggagagttggcaactgggggagctgctcagtgtcttgtggtgttggagtgatgcagagatctgtgcaatgtttaaccaatgaggaccaacccagccacttatgccacactgatctgaagccagaagaacgaaaaacctgccgtaatgtctataactgtgagttaccccagaattgcaaggaggtaaaaagacttaaaggtgccagtgaagatggtgaatatttcctgatgattagaggaaagcttctgaagatattctgtgcggggatgcactctgaccaccccaaagagtacgtgacactggtgcatggagactctgagaatttctccgaggtttatgggcacaggttacacaacccaacagaatgtccctataacgggagccggcgcgatgactgccaatgtcggaaggattacacggccgctgggttttccagttttcagaaaatcagaatagacctgaccagcatgcagataatcaccactgacttacagtttgcaaggacaagcgaaggacatcccgtcccttttgccacagccggggattgctacagcgctgccaagtgcccacagggtcgttttagcatcaacctttatggaaccggcttgtctttaactgaatctgccagatggatatcacaagggaattatgctgtctctgacatcaagaagtcgccggatggtacccgagtcgtagggaaatgcggtggttactgtggaaaatgcactccatcctctggtactggcctggaggtgcgagttttatagctaaggtgctttgaagaggaagccattatggatggatgaaggatagtaatgcaatacctccaccttaatttgggtgcatgtgtatgtgtgtgtgtgtttgtgtgtgacttgtatgcttgtgtgtgtaaatgtgtgtacatatacatatatacatatctacacatacatatatacacatatatgtgtgtatgtagatatgtagactatcctaatgatgtaaagtttaatatttatgtttgaaattatttattgtgatgtaatatttttgtacgtaaaatgattctattatgactgcctttgcatgtagtaatatgacaaagtgatccttcattatcacggtacactattgtttacttttcatctgtaaatgttttattgttacttttttaaaatgaatttttttaaaacaatctagccatcatcaaggtgctataagagttgtataaaagatatttttggcatttctaggcaagtatcagccaataagtatgttagtgatatcacagattgtaccaactattaactatgttaaataagtattcagtttcatgtgatctctgggaaaaaaatatgctgccttggtgctaatattgtatgtatttaaatgatcatccgactcagaaatataaacacttttaatgaaagggaggaacggaaggacaatttccagtgcacagaatcacttggatgaaataagaccagctctttacccttatttttggatatgccttttttggaagagacttagactttatccttattgttgttagtgttgttaatattcgttgcttcagcccacggtgccttggtctctccacaatcaaatggaggatcccccaagcagcttcattacagagtgatattgggaaagtgagatcctctcaccattttgccaagatactctaaaatgacatccaagtttaccagtagaaagacacaggatgcacagaatgggcatgaccttcagctcacgagcacacctggagaaattcagaaccaggttctgaatcatcacgattgccttttgcatgaaaacatcggctggtgatgtgacttctcttcaggccatgagcctaacaccctgccggttttcatgcccgctgcagtaatggacgtttgtgtgaagaaatgaactgtggagtacaaaatgctttgagtctttccgattgctcattaattcacttttttgttacttctttccaaaatggaagtgctgaagccatggtctttctgcccctccaagctgatgaagggaagcctttgccaatggcccatggaagacacttggtttgagaaaccctgcccacttccaaa

SEQ ID NO: 279477 - DNA, 5724 bp, Artificial Sequence
  derived and/or modified sequence
atgcagttcgtgagctgggccacgctgctcaccttgctggttcgagacttggccgagatggggagtcctgatgccgcagccgccgtccggaaggacagactccaccctcggcaggtcaagctcctggaaacgctgtcagaatatgagatcgtgtcacccatcagagttaatgctctgggagagcccttccccactaacgtgcatttcaaacgaacgcggaggagtattaatagcgctacagacccctggccagccttcgcaagttcttcatcctcctccacatcatctcaggctcactatagacttagtgcgttcggccagcagttcctgttcaaccttacagccaatgctggcttcattgcaccgttgtttacagtgacccttttgggtacccctggggtgaaccagaccaagttctattcagaagaagaagctgagctgaaacattgcttctacaagggctacgttaataccaattctgaacataccgcagtgatcagcttatgtagtggtatgctgggtacgtttaggagccatgacggagattacttcatagagccactgcagtccatggacgagcaggaagacgaggaggagcagaataagcctcatattatttatcggcgcagtgccccccaaagagagcctagcaccggaaggcatgcgtgcgatacaagcgagcacaagaacagacacagcaaagataaaaagaagactagggctcgcaaatggggtgaaaggatcaatctagcaggggacgtcgccgcgttgaattccgggctggcgacagaggcattcagtgcgtacggtaacaaaaccgacaatacaagagaaaaacggacacacaggcgtaccaagagatttctttcctatccgcgattcgttgaagtgttagtggtggctgataatcgcatggtgtcataccatggcgaaaacttgcagcactacattctcacgctgatgagtatcgatggcccatctattagcttcaacgctcagactactctcaagaatttttgtcaatggcagcactccaaaaatagtcccggcggaatccaccacgacaccgctgtcttgttaacccggcaagatatatgcagagctcacgataaatgcgatacgctcgggttggcagaattaggaacgatttgcgatccatacaggtcgtgtagtatctccgaagattcaggcttatccaccgcattcacgatagcacacgaactaggacacgtgtttaacatgccccacgatgataacaacaagtgcaaagaggaaggagtgaagtcgccacaacacgttatggctccaaccctgaacttttacacaaatccttggatgtggagcaaatgctcgcggaagtacataactgaatttctagacaccgggtacggggagtgtttgctgaatgaaccagagtccaggccctatccccttcctgtgcagctccccggtattctttacaacgtgaacaaacagtgcgagcttatcttcggtcccgggagtcaagtgtgtccatacatgatgcagtgccgtcgcttgtggtgcaacaatgtaaatggagtgcacaaggggtgtcgcacgcaacatactccttgggcggacggaacagaatgcgagcctggaaaacactgtaaatacggcttttgcgtccctaaagaaatggatgtgcccgtgacagatggcagctggggatcatggagtccttttgggacttgttcccgaacctgtggaggtggcatcaagactgctatcagggaatgcaatcggcctgaaccaaagaatggagggaaatactgcgttggcaggcggatgaagttcaagtcctgcaacaccgagccctgtctcaaacaaaaaagggattttcgcgatgagcagtgtgcacatttcgatggtaagcattttaacattaatggcctgttgccaaatgtccgttgggtcccgaagtactccgggattcttatgaaggacagatgtaaacttttttgtagggttgctggcaataccgcgtactaccaattaagggacagggtcatcgacgggaccccttgcggccaggataccaatgatatttgtgtacaggggctgtgtaggcaggccggctgtgaccatgtgctgaatagcaaagcaaggcgggataagtgtggcgtgtgcggcggggacaattcctcatgcaagacagttgcagggacgttcaatacagtgcactacggatacaatactgtggtgcgcattcccgctggagccactaatatcgatgttcgtcagcactccttctccggcgagaccgacgacgacaactacctcgccctctcttcatcgaagggggaatttctcttgaatggcaattttgtcgttacaatggctaagcgtgaaattaggatcggtaatgccgtagttgagtactccggctctgaaacagccgtagagagaataaacagtacagaccgcattgaacaggaactgctgctccaggtcctctctgtgggaaagctctacaatcccgatgttcgttacagttttaatattcccatcgaggacaaacctcagcagttttactggaattctcatggcccttggcaggcatgttcaaaaccatgccagggtgagaggaagcgcaaattggtctgtacccgagaaagcgaccagctcaccgtgagtgatcagagatgcgacagactgcctcagccaggccatattactgaaccctgtggaactgactgcgatctccgatggcacgttgcttctcggtccgaatgcagcgcccaatgcggactgggatatagaacattagatatctactgcgccaaatatagccgcctggacggtaaaacagaaaaggtggacgatggcttctgtagttctcatccgaagccttccaacagagagaaatgcagcggcgaatgcaatacgggcggttggcgctactcagcttggaccgagtgttcgaaatcctgcgacgggggaacccaaaggcgccgggccatatgcgtcaacacgcgaaacgatgtcctggacgactcaaaatgcactcaccaggagaaggtaaccatacagcgctgcagtgaatttccatgccctcagtggaaatccggcgattggtccgaatgtcttgtgacatgtggtaaaggacacaaacataggcaagtgtggtgccagttcggtgaagaccggttgaatgatcggatgtgtgatcctgagacgaaacctacttctatgcagacttgtcagcagccagagtgcgcttcgtggcaggctggaccctggggtcaatgttcagtgacgtgtgggcagggctaccagctgcgtgccgtgaaatgtataatcggcacttatatgtccgtggtcgatgacaatgattgcaatgctgccacccggcccaccgatacgcaagactgcgagctcccctcatgtcatccccctcctgctgcgcccgagacccgccgcagcacatacagtgctcctaggacccagtggaggttcgggtcatggacaccctgtagtgctacttgcgggaagggcacgaggatgcgctatgtgtcgtgtcgggacgaaaacggttcagtggccgatgagtcagcctgcgcgacgttgccaaggccagtcgccaaggaagagtgctccgtcacgccctgtggtcagtggaaggcgctagactggtcttcatgttcagtaacctgcggacaaggccgggccacccggcaggttatgtgtgtgaactacagtgatcacgtgattgaccgcagtgagtgcgatcaggattacatacctgagaccgatcaggactgttcaatgagcccttgtccgcagcgaactccggactcaggtcttgctcaacatcctttccagaatgaagattaccgtccaaggagcgcgtccccatctaggacgcatgtgctggggggaaaccagtggcgcaccggaccctggggcgcctgctccagcacatgcgctggaggtagccagcgaagggtcgtggtctgtcaggacgaaaatggttacactgccaacgattgcgtcgagagaattaagcctgatgaacagagagcatgcgagagcggcccatgcccacagtgggcttatggcaattggggcgaatgcacaaagctttgcgggggcggaattcggacgcgcctagttgtgtgtcagcgcagtaatggggagcgctttccagatctgtcctgcgagatcctggacaagcctcccgatagagaacagtgcaatactcacgcttgccctcatgacgcggcttggagcacagggccctggtccagctgttctgtgagttgcggcaggggtcacaaacaaagaaatgtttactgtatggctaaggacggcagtcatctggaatccgactactgcaagcaccttgccaagccacatggtcacagaaagtgtagaggaggccgttgtcccaagtggaaggccggggcttggtcccagtgtagtgtgtcctgcggtcgaggtgttcagcagagacatgtaggctgtcagatcgggacccataagattgccagggaaaccgaatgcaacccttatacccgacccgaatcggaaagggattgccagggtccaagatgtcctttgtacacttggcgtgcagaagagtggcaggagtgtaccaagacctgtggggaaggaagtaggtaccggaaggttgtttgcgttgatgataataagaacgaagtacatggtgcaagatgcgatgtgtcaaaacgtcccgttgaccgtgagtcttgttcactccagccctgcgaatatgtgtggatcaccggcgagtggtccgaatgctcagtaacatgcggcaaaggctacaagcagcgtctcgtgagttgctccgaaatttatacaggcaaagaaaactatgagtattcttatcaaacaaccattaattgtccaggaacacaaccaccgagcgttcacccttgctacctgcgtgactgccctgttagcgcgacttggcgggtcggtaactggggaagctgcagcgtgagctgtggggtgggtgtgatgcaacgatcagtccaatgcctgacgaacgaagaccagccctcccatttgtgtcacacagatctgaaaccagaagagcgcaaaacatgtagaaatgtgtacaattgcgaattaccgcagaactgcaaggaagtcaagaggctgaagggagcctctgaggacggcgaatattttctgatgatcaggggcaaacttctgaagattttctgtgccggcatgcactcagatcatccaaaggaatatgtaaccctggttcacggcgatagtgaaaacttttcagaggtttacggccacagactacataaccctacagagtgcccctacaatgggtctaggagagatgactgccagtgcaggaaggattacacagctgcaggctttagctcgtttcaaaaaatcaggatcgacttgactagcatgcagatcattacaactgacctgcagttcgctcggacatcagaaggccacccagtgccctttgccactgccggggattgctactctgctgcaaagtgccctcaaggccggttcagcattaacctttatggaacgggactgtcactgacggagtcagcacggtggatctctcaggggaactatgccgtcagtgatattaagaagagccccgacggcacaagggttgtgggaaaatgcgggggatactgcggtaaatgtaccccttccagcgggactggactcgaagtgagagtgttgtag

SEQ ID NO: 279478 - DNA, 5724 bp, Artificial Sequence
  derived and/or modified sequence
atgcagtttgtgtcctgggccaccctgctgaccctgctggtgcgggacctggccgagatgggcagcccagatgctgctgctgctgtgaggaaggaccggctgcacccccggcaggtgaagctgctggagaccctgtctgaatatgagatcgtgagccccatccgggtgaatgccctgggggagcccttccccaccaacgtgcacttcaagaggaccaggaggagcatcaacagcgccacagacccctggccagcctttgccagcagcagcagcagcagcaccagcagccaggcccactaccgcctgagcgccttcggccagcagttcctgttcaacctgacagccaatgccggcttcatcgcccccctcttcaccgtgaccctgctgggcaccccaggagtgaaccagaccaagttctacagcgaggaggaggccgagctgaagcactgcttctacaagggctacgtgaacaccaacagcgagcacacagctgtgatcagcctgtgcagcggcatgctgggcaccttccgcagccatgatggagactacttcatcgagcccctgcagagcatggatgagcaggaggatgaggaggagcagaacaagccccacatcatctaccgccgcagcgccccccagcgggagcccagcactggaagacatgcctgtgacaccagcgagcacaagaacagacacagcaaggacaagaagaagacccgggccaggaagtggggcgagcgcatcaacctggccggagatgtggccgccctgaacagcggcctggccacagaggccttcagcgcctacggcaacaagacagacaacacccgggagaagaggacccacaggaggaccaagcgcttcctgagctaccccaggtttgtggaggtgctggtggtggccgacaacaggatggtgtcctaccatggagagaacctgcagcactacatcctgaccctgatgagcattgatggccccagcatctccttcaatgcccagaccaccctgaagaacttctgccagtggcagcacagcaagaacagccctgggggcatccaccacgacacagctgtgctgctgacccggcaggacatctgccgggcccatgacaagtgtgacaccctgggcctggccgagctgggcaccatctgtgacccctaccgcagctgcagcatcagcgaggacagcggcctgagcacagccttcaccatcgcccacgagctgggccacgtgttcaacatgcctcatgatgacaacaacaagtgcaaggaggagggcgtgaagagcccccagcacgtgatggcccccaccctgaacttctacaccaacccctggatgtggagcaagtgcagcaggaagtacatcacagagttcctggacaccggctatggagaatgtctgctgaatgaacctgagagccggccctaccccctgcctgtgcagctgcccggcatcctgtacaacgtgaacaagcagtgtgagctgatctttggacctggcagccaggtgtgcccctacatgatgcagtgccggcggctgtggtgcaacaacgtgaatggagtgcacaagggctgcaggacccagcacaccccctgggcagatggaacagaatgtgagcccgggaagcactgcaagtatggcttctgtgtgcccaaggagatggatgtgcctgtgacagatggctcctggggctcctggagccccttcggcacctgcagcaggacctgtggcggcggcatcaagacagccatccgggagtgcaacagacctgagcccaagaatggaggcaagtactgtgtgggccgcaggatgaagttcaagagctgcaacacagagccctgcctgaagcagaagagggacttcagagatgagcagtgtgcccactttgatggcaagcacttcaacatcaatggcctgctgcccaacgtgcgctgggtgcccaagtacagcggcatcctgatgaaggaccgctgcaagctgttctgccgggtggccggcaacacagcctactaccagctgcgggacagagtgattgatggcaccccctgtggccaggacaccaatgacatctgtgtgcagggcctgtgccggcaggccggctgtgaccacgtgctgaacagcaaggcccggcgggacaagtgtggggtgtgtggcggggacaacagcagctgcaagacagtggccggcaccttcaacacagtgcactacggctacaacacagtggtgcgcatcccagctggggccaccaacattgatgtgcggcagcacagcttctctggagaaacagatgatgacaactacctggccctgagcagcagcaagggggagttcctgctgaatggaaactttgtggtgaccatggccaagcgggagatcagaattggaaatgctgtggtggagtacagcggcagcgagacagctgtggagcgcatcaacagcacagacagaattgagcaggagctgctgctgcaggtgctgtctgtgggcaagctgtacaacccagatgtgcgctacagcttcaacatccccatcgaggacaagccccagcagttctactggaacagccacggcccctggcaggcctgcagcaagccctgccagggcgagaggaagaggaagctggtgtgcacccgggagagtgaccagctgactgtgtctgaccagagatgtgaccggctgccccagcccggccacatcacagagccctgtggcacagactgtgacctgcgctggcacgtggccagccgctctgagtgcagcgcccagtgtggcctgggctaccgcaccctggacatctactgtgccaagtacagccggctggatggcaagacagagaaggtggatgatggcttctgcagcagccaccccaagcccagcaaccgggagaagtgcagcggggagtgcaacacaggaggctggagatacagcgcctggacagagtgcagcaagagctgtgatggcggcacccagaggcggcgggccatctgtgtgaacaccagaaatgatgtgctggatgacagcaagtgcacccaccaggagaaggtgaccatccagcgctgcagcgagttcccctgcccccagtggaagagcggggactggagcgaatgtctggtgacctgtgggaagggccacaagcaccggcaggtgtggtgccagtttggagaagatcggctgaatgacaggatgtgtgaccctgagaccaagcccacctccatgcagacctgccagcagccagaatgtgcctcctggcaggccggcccctggggccagtgcagcgtgacctgtggccagggctaccagctgcgggctgtgaagtgcatcatcggcacctacatgtctgtggtggatgacaatgactgcaatgctgccacccggcccacagacacccaggactgtgagctgcccagctgccaccccccacctgctgcccctgagaccaggaggagcacctacagcgcccccaggacccagtggaggtttggctcctggaccccctgcagcgccacctgtgggaagggcaccaggatgagatatgtgtcctgcagagatgaaaatggatctgtggctgatgagagcgcctgtgccaccctgcccaggcctgtggccaaggaggagtgcagcgtgaccccctgtggccagtggaaggccctggactggagcagctgcagcgtgacctgtggccagggccgggccacccggcaggtgatgtgtgtgaactacagcgaccacgtgattgacagaagtgaatgtgaccaggactacatccctgagacagaccaggactgcagcatgagcccctgcccccagaggaccccagacagcggcctggcccagcaccccttccagaatgaagactaccggcccaggtctgccagccccagcaggacccacgtgctgggcggcaaccagtggaggacaggcccctggggcgcctgcagcagcacctgtgccggcggcagccagaggagagtggtggtgtgccaggatgaaaatggctacacagccaatgactgtgtggagcgcatcaagccagatgagcagagggcctgtgagagcggcccctgcccccagtgggcctacggcaactggggagaatgtaccaagctgtgtggcggcggcatccgcacccggctggtggtgtgccagaggagcaatggagagcgcttcccagacctgagctgtgagatcctggacaagcccccagaccgggagcagtgcaacacccacgcctgcccccatgatgctgcctggagcacaggcccctggagcagctgcagcgtgtcctgtggccggggccacaagcagagaaatgtgtactgcatggccaaggatggcagccacctggagagtgactactgcaagcacctggccaagccccacggccacaggaagtgccggggcggccgctgccccaagtggaaggccggggcctggagccagtgcagcgtgtcctgtggccggggcgtgcagcagagacatgtgggctgccagatcggcacccacaagatcgcccgggagacagagtgcaacccctacaccaggcctgagagcgagcgggactgccagggcccccgctgccccctgtacacctggagggctgaggagtggcaggagtgcaccaagacctgtggggagggcagccgctacaggaaggtggtgtgtgtggatgacaacaagaatgaggtgcatggagcccgctgtgatgtgtccaagaggcctgtggaccgggagagctgcagcctgcagccctgtgaatatgtgtggatcaccggggagtggagcgaatgttctgtgacctgtgggaagggctacaagcagaggctggtgtcctgcagcgagatctacaccgggaaggaaaattatgagtacagctaccagaccaccatcaactgccccggcacccagccccccagcgtgcacccctgctacctgcgggactgccctgtgtctgccacctggagggtgggcaactggggcagctgcagcgtgtcctgtggggtgggcgtgatgcagaggtctgtgcagtgcctgaccaatgaagaccagcccagccacctgtgccacacagacctgaagccagaggagaggaagacctgcagaaatgtgtacaactgtgagctgccccagaactgcaaggaggtgaagaggctgaagggggcctctgaagatggagagtacttcctgatgatccggggcaagctgctgaagatcttctgtgccggcatgcacagcgaccaccccaaggagtatgtgaccctggtgcatggagacagcgagaacttcagcgaggtgtatggccaccggctgcacaaccccacagagtgcccctacaacggcagcagaagagatgactgccagtgcaggaaggactacacagctgctggcttcagcagcttccagaagatcagaattgacctgacctccatgcagatcatcaccacagacctgcagtttgcccggaccagcgagggccaccctgtgccctttgccacagctggggactgctacagcgctgccaagtgcccccagggccgcttcagcatcaacctgtatggaacaggcctgagcctgacagagagcgcccgctggatcagccagggcaactatgctgtgtctgacatcaagaagagcccagatggcaccagggtggtgggcaaatgtggcggctactgtgggaagtgcacccccagcagcggcaccggcctggaggtgcgggtgctgtag

SEQ ID NO: 279479 - DNA, 5724 bp, Artificial Sequence
  derived and/or modified sequence
atgcagttcgtgagctgggccaccctgctgaccctgctggtgcgggacctggccgagatggggtcgcctgacgccgcagccgccgttcggaaagaccgactacacccgagacaggttaaacttctggagacattgagcgagtatgagattgtgagtccaattcgtgttaacgcacttggtgaacctttccctacaaacgttcactttaagagaactaggcggtccatcaacagcgccaccgatccgtggccggctttcgcttcatcttcttcatcatcaacaagctcacaagcccactaccgcctgtccgctttcggacaacaatttctattcaacctgactgctaacgcgggatttatcgccccattatttacggtgaccctcctcgggaccccaggggtgaaccagacaaagttctactcagaggaagaggcagagctcaaacattgtttttacaagggctacgttaacacaaattcagagcataccgcagtgatttccctgtgctctggaatgttgggaacatttcgttcccatgatggcgattatttcattgaacctcttcagtctatggacgaacaagaggatgaagaggagcagaacaaaccccatatcatctatcgtagaagcgctccccagcgggaaccttctaccggtcgccatgcatgtgacacttctgagcacaagaaccgacacagtaaagataaaaagaaaacgcgggcgagaaagtggggcgaacgtattaatctggcaggcgatgtggccgcacttaactccggcctggccacagaagccttctctgcatacggcaacaagacggataacactagggagaagcgcacacatcgtcgcaccaaacgcttcctctcttacccccggttcgtggaagttctggtggtcgccgataacagaatggtgtcttaccacggtgagaacttgcagcactatatcctcactctgatgtcaattgacgggccaagcataagcttcaacgcccagacaacactgaagaacttctgtcagtggcagcactctaaaaactcccccgggggcatccatcacgataccgctgtgctgttaacacggcaggatatttgcagagcacacgataagtgtgatacgctcggattggccgagctcggcacaatctgcgacccataccggtcctgttccatcagcgaggattcgggcttgagcaccgcctttactattgcccatgagttgggccacgtgttcaacatgccacacgatgacaacaataaatgtaaagaagagggcgttaagtctccacaacacgtgatggccccaacactgaacttctacaccaacccttggatgtggtccaagtgctctaggaagtatatcaccgagtttttggataccggctatggggagtgcctgttaaacgaacccgagagtagaccatatcctctgcccgttcaactccctggcatcctgtacaatgtgaataagcaatgtgagctaatatttggccctggctctcaagtgtgcccctatatgatgcaatgccgcaggctgtggtgtaacaatgtaaatggcgtccacaagggatgcaggacacaacacactccatgggctgatggcacagagtgcgaacccggaaaacattgtaagtacgggttctgtgtcccgaaggagatggatgtgccagtgaccgatggtagctggggaagctggtcccctttcgggacgtgctcgagaacctgcgggggtggaatcaagacagcaattcgggaatgcaaccgacctgagccaaagaatggcgggaaatattgcgttgggcgtcggatgaagtttaagagctgtaatacggagccatgcctaaagcagaaaagagactttcgggacgagcagtgcgctcattttgacggcaaacattttaatataaacggcctcctgccaaatgtcaggtgggttccgaaatactctggaatcctgatgaaagatagatgcaagctgttctgtcgggtggcagggaacaccgcgtattaccagcttagagatagagtgatcgacggtaccccatgtgggcaagataccaacgatatctgcgttcagggcctgtgccggcaggccggatgcgaccatgttctgaacagcaaagccagaagggacaagtgtggagtctgtggcggcgataacagtagctgcaaaacagtcgcggggacctttaataccgtgcattacggatataacacggtcgtgcggataccagctggagccacaaacatcgatgtgagacagcacagtttctccggagagacagacgacgacaattaccttgctttgagctcatcaaagggagagtttcttctgaacggtaatttcgtggtgacaatggctaaaagagaaattagaatcggtaacgctgtcgtggagtattcaggcagcgagactgccgtggaacgaattaattccactgaccgaatcgaacaagagttgctgctgcaggtcctctctgtgggcaaactctataatcctgacgtgcgatacagcttcaatatcccaatagaggataaacctcagcagttctattggaactcacatggtccttggcaggcctgctcgaagccatgccagggggaaagaaaaagaaagctggtctgtacacgtgaatctgaccaactgactgtctccgatcagaggtgcgaccgtctcccacaacctggccacatcaccgagccttgtggaaccgactgcgatcttagatggcatgtggcttcccggtccgagtgcagcgctcaatgcgggctgggctacaggactctcgacatctactgcgcgaagtactcgcggttggatggtaagaccgagaaagtggacgacggcttctgctctagccatcctaagccaagtaacagggaaaagtgtagcggagaatgcaacactgggggatggagatactccgcctggaccgagtgtagcaagtcctgtgacggggggactcaacgacgccgtgccatctgtgtaaatacccgaaatgatgtactggatgatagcaaatgcacccatcaagagaaagtcactatccagagatgctccgagttcccgtgcccccagtggaaaagcggagactggtcagaatgtctcgtcacttgtggcaagggacataagcaccggcaagtctggtgccaatttggagaagaccggctgaatgatcgcatgtgtgacccggagaccaagcccacttccatgcagacttgccaacagcccgaatgtgcaagctggcaagctggaccttggggacaatgcagcgtaacctgcgggcaagggtaccaactgcgtgccgtcaagtgcatcattggcacatatatgagtgtggtcgatgataacgactgcaacgctgcaactcgaccaactgatacacaagattgtgagctcccttcgtgccacccaccccctgctgcccccgaaaccagaagaagcacgtattcagctccgcgcactcagtggcgtttcgggtcttggacaccgtgttcagcgacatgtggtaagggcacccggatgcgttacgtttcctgccgggatgaaaatggtagcgtggccgacgaatctgcatgcgctacacttccgcgcccggtcgcaaaagaagagtgcagtgtcactccatgcggccaatggaaagccctggactggtcgagttgttctgttacttgtggacaggggcgggccaccagacaggtgatgtgtgttaattatagcgatcacgtgattgacagatccgagtgtgaccaagattacattcccgagacggatcaagactgctcgatgtccccttgcccccagaggactcccgatagcgggctggctcagcatccatttcagaacgaagattataggccccggtctgccagccctagcaggacacatgtcttaggcggaaaccagtggcgcacgggcccatggggtgcatgcagctcaacgtgcgccggcggttcccagcgccgggtcgtcgtctgtcaggatgagaatggctatacagccaatgattgcgtcgaacggataaagcctgacgaacagcgagcctgtgaaagcggcccgtgccctcagtgggcctacggcaactggggggagtgtaccaaactgtgtggagggggaattcgcacacgactcgtagtctgtcagcgtagcaacggtgagagatttcctgatctgagctgtgaaattctggataagcccccagatcgcgagcagtgcaacacacacgcctgcccccacgacgccgcttggagtaccggtccctggagctcttgtagcgtatcgtgcgggaggggacacaagcagaggaacgtgtactgcatggcgaaagacggaagccacttggagtctgactattgtaagcacctggctaagccccacggacacaggaaatgccgcggcggacggtgcccaaaatggaaagccggagcatggtcccaatgtagtgtgtcttgtggtcgcggggttcagcagagacacgtgggctgtcagattgggacacataaaatcgcgagagaaacggaatgcaacccatacacacggccagaatccgagagggattgccaaggaccccgctgtcccctgtatacgtggcgcgctgaagaatggcaagagtgcaccaagacatgcggggagggctcgcgatatcgcaaggtggtgtgcgtagacgacaataagaacgaagtccatggagctcgatgcgacgtgagcaagaggccggtcgatagagagtcatgttccctccagccatgcgagtacgtatggatcactggcgagtggtccgagtgctctgtcacttgcggcaaaggatataaacagcggctggtatcctgctctgaaatctatactgggaaggagaactacgagtactcttaccagaccacaataaattgtcctgggacgcagccgccttcggtccatccttgttacctgcgagactgtcccgtcagcgccacgtggcgtgtgggcaactggggcagctgctccgtatcttgtggcgtgggagtgatgcagcgctccgtgcaatgtctcacaaatgaagaccagccctcccacctctgccacacagatctaaaacctgaggagaggaaaacctgtcgcaatgtgtacaactgtgagctcccccagaattgcaaagaggtgaagagacttaaaggcgccagtgaggacggggagtacttcctcatgattcgggggaaactgctaaagattttctgcgccggcatgcattctgatcacccaaaggaatatgttactctggtgcacggagactccgagaatttctctgaggtctatggccaccggctgcataacccaaccgaatgcccatacaacggcagccgtagggatgattgccagtgtcgcaaggactacaccgccgcgggcttctcctctttccagaaaatacggatcgacctcactagcatgcaaatcatcacaacggatctgcagtttgcccgcacaagcgaaggccaccccgtgccttttgctacggcgggtgactgctacagcgcggcaaaatgtccgcagggccggttctcaattaacctgtacggtactggtctaagtttaacggaaagcgccagatggattagccagggaaactacgcagtgagcgacataaagaaaagccccgatgggaccagagtcgtaggcaaatgcgggggctactgtggaaagtgcacccccagctccgggacaggtctggaagtccgcgtactatag

SEQ ID NO: 279480 - DNA, 5724 bp, Artificial Sequence
  derived and/or modified sequence
atgcaatttgtctcctgggccaccctgctcacgcttctggtgcgtgacttggctgagatggggtccccagatgctgcagccgctgtgagaaaagatcgtctccacccccgacaggtcaagctgttggaaactctcagtgagtatgagattgtgagtcccattagggtgaacgctcttggggaacccttcccaaccaacgtacatttcaagaggaccaggagaagtatcaacagcgccacagatccgtggcctgcttttgcatcttcatcttcaagctctacgagctcacaggcacactataggttgagtgcctttgggcagcagttcttattcaatttgacagccaacgcagggttcatcgcccctctcttcaccgtgacattactggggactcccggagtcaaccaaactaagttctactccgaagaagaagctgaattgaagcactgtttttacaaaggctacgttaataccaactcagaacataccgccgtaatcagcctttgttccgggatgttagggacattccgttcacacgacggggattatttcatagagcctctacaaagtatggacgagcaggaggacgaagaagaacagaataaaccccatataatctaccggaggtccgcaccgcagcgcgaaccttccaccggtcggcatgcttgcgatacctcagagcacaagaacaggcacagtaaggacaaaaagaagacgagggctaggaaatggggagagcgcatcaatctggctggtgacgtcgccgctttgaatagcgggttggctaccgaggcattttctgcatatggcaataaaactgacaacactcgtgagaagcgtactcaccgcaggactaagcggttcctttcctatccgcgttttgtcgaggtactggtggttgctgataaccgaatggtgtcatatcatggagagaatcttcagcattacatcctgacgctcatgtcaatcgacggcccaagcatttccttcaacgcccagaccactcttaaaaacttctgccagtggcagcatagcaaaaatagccccggaggtattcatcatgatacagccgtcctgttgacacgccaggacatctgcagggctcatgataaatgtgacactctcggcctcgccgagcttgggaccatttgcgacccttacagaagctgttccatctcagaggactcaggcctctctactgctttcacaatcgcacatgaactgggacacgtgttcaatatgccgcacgacgacaacaataagtgtaaggaagagggcgtgaaatccccccagcacgttatggcacctaccttgaacttctacactaatccttggatgtggtcaaaatgctcaaggaaatatatcacagaatttttggacactggctatggtgaatgcctgctgaatgagccagagagtcggccatatcccttacctgtacagctgcctggaattctttacaacgtgaataaacagtgcgaactgatttttggaccaggatcgcaagtttgcccctacatgatgcaatgccggcgtctgtggtgtaataatgtgaatggggtgcacaagggatgtagaacacagcacaccccctgggcggacggtacagagtgcgagcccggaaagcattgtaagtacgggttctgtgtccctaaagaaatggacgttcctgtgacggatggaagctgggggtcttggtctccattcgggacctgttcccggacctgcggtggcggaatcaagactgcgattcgtgagtgcaaccgaccggagccaaagaacggagggaaatattgtgtggggagaagaatgaaatttaaatcgtgcaacaccgaaccgtgcctcaagcagaaacgggattttagagacgaacaatgtgcccacttcgatggtaagcactttaatatcaatggcctgctcccaaatgtgcgctgggtgccaaaatattcaggaatcctaatgaaggacaggtgcaaactgttctgtcgagtggcagggaacacggcctactaccaactgagggacagagtgatcgatggaacaccctgcggtcaggacactaacgacatttgcgtccagggtctgtgtagacaggctgggtgtgatcacgtgcttaattctaaggcgagacgtgacaagtgcggggtgtgcgggggagacaactcttcctgcaaaacagtagcaggcacattcaacactgtgcactacggatacaacactgtggttagaattcctgctggggcaactaacatcgacgtcaggcagcactctttctctggtgagacggatgacgataactatctcgccttatcatcctccaaaggagaattcctgttaaacggaaatttcgttgtcaccatggcaaaacgcgaaatccggatcggtaacgcagtggtcgagtattcggggagcgagacagctgtggagaggatcaattcaacagaccgtatcgaacaggagttgctcctgcaagtgctgtcagtgggtaagctttacaaccccgacgtgcgttatagcttcaacatacccatagaggataaacctcaacagttctactggaattcccatggcccatggcaggcttgttccaagccatgccaaggtgagaggaagcggaaacttgtttgtacccgcgaatccgaccagttaactgtcagtgatcagcgatgtgatagattgccacaacctgggcacatcacagagccttgcggaaccgactgtgacctgcgatggcatgtagcatcaagatcagaatgtagtgcccagtgcggccttggttaccgcacattagacatttactgtgcgaagtattccaggttggatggaaagactgagaaggtggatgatggtttctgtagcagccatccgaaaccctcgaatagagagaaatgctctggcgagtgtaacacaggcggatggaggtattccgcttggaccgagtgtagtaagtcatgcgatggcggaactcagaggcgccgagcgatctgtgtcaacacgcgaaatgatgtgctggacgattcgaagtgcacgcaccaggagaaggtgacaatacagagatgctcagagtttccgtgcccccagtggaagagcggggattggtctgaatgcctggtgacttgcgggaagggacacaagcaccgccaggtttggtgtcagttcggcgaagaccgcctcaatgaccgcatgtgcgaccccgagactaaacctaccagtatgcagacttgccagcagcctgagtgcgcctcctggcaagctggaccatggggccaatgttcagtaacctgcggccagggctatcaactgagagctgttaaatgcatcatcgggacatacatgtcagttgtcgacgacaatgattgtaatgcagctaccaggccaactgatacgcaggattgtgaactgccgtcgtgtcacccaccacccgcagccccagaaacgaggcgcagtacctatagtgcccctcgaacacagtggagattcgggtcttggactccctgtagcgccacttgcggcaaaggtacacggatgcgttatgtgtcctgtagagatgagaatggatctgtggccgatgagtccgcgtgtgctactctgcctcgtcccgtggccaaggaggagtgttccgtgactccctgcggacagtggaaggcactggactggagctcgtgctctgtaacctgcggccagggccgtgctactcgccaggtcatgtgtgtgaactactctgatcatgtaatcgacagatcagagtgcgaccaggactatatccctgaaaccgaccaggattgttctatgtccccctgtccacagcgaacccccgattccgggttagcacagcatccttttcaaaatgaagattacagaccacgcagcgcttcaccctcacggactcacgtgttggggggaaatcagtggcgaactgggccttggggggcatgtagttctacttgtgccggaggctcccagcggagagtcgttgtgtgccaagatgagaatggatatactgcaaatgactgcgtcgaacggatcaagcctgacgaacaaagagcttgcgagagtggaccatgcccccaatgggcctatggaaactggggagagtgcaccaaactctgcggaggagggatacgtaccagactagtggtgtgccagaggagcaacggagaacgattccctgacctgagctgcgaaatcctcgataagccacccgaccgagagcagtgtaacacgcatgcatgtccccacgatgcagcatggtcgaccggcccttggagcagttgctctgtgtcttgtggtcgcggtcataagcagaggaatgtttactgtatggcgaaagatggatctcacttagaaagtgattactgtaaacatctcgccaaaccccacggtcacagaaagtgtcggggaggaagatgtccaaagtggaaagcaggcgcatggtcccagtgcagtgtttcatgcgggcgaggggtacagcagaggcacgtcgggtgtcaaatcggcacgcataaaatcgctagagagactgagtgcaacccctatactaggccagaatccgaaagagattgccaaggccctcggtgtcctttatacacatggagagccgaagaatggcaggaatgcactaaaacttgtggagagggcagtaggtatcgaaaggtcgtgtgtgtagacgataataagaacgaggtccacggggctaggtgcgatgtttcaaaacggcctgtggaccgggaatcttgtagtctgcagccctgcgagtacgtttggatcactggtgaatggtctgagtgcagtgtgacatgtggcaagggctacaaacagcggctcgtgagctgcagcgagatctataccggcaaggagaactacgagtattcctaccagacgactatcaattgtccaggcacacagccaccttctgtgcacccctgctatctgagagactgtcccgtgtccgcgacatggagagttggaaattgggggagctgcagtgtttcctgtggggtcggggtgatgcaaaggtctgtgcaatgtctcactaacgaagatcagccatcccacctctgtcatacggacctgaaacctgaggagagaaagacctgcagaaatgtgtacaactgcgagctgccccagaattgcaaggaagtgaaaagactgaaaggagcctctgaggatggggagtactttctcatgatacggggaaagctgctgaagatcttctgcgctggcatgcatagcgatcatcccaaggagtacgtgacgctggtgcatggggattctgaaaactttagtgaggtgtatggacacaggttgcacaatcccacggagtgtccttataatggtagcagacgggacgactgtcagtgcagaaaggactacacagcggcaggattttcctcattccagaagattcgtattgatctgacatccatgcaaatcataaccactgatttacagtttgccagaacctcagaaggccacccagtgccatttgccactgcgggagactgctactccgctgcgaaatgcccccaggggcgattctcaatcaatctctatgggaccggtctcagccttacagaatccgctcgctggatctcgcagggaaactatgctgtaagtgatatcaagaaatcccctgacggcactagggtagtcggaaaatgtggtggatattgtggcaaatgcacaccctccagcggcactggattggaagtgcgtgtgctctag

SEQ ID NO: 279481 - DNA, 5724 bp, Artificial Sequence
  derived and/or modified sequence
atgcaatttgtgtcttgggccacattacttactctccttgtgagggatctcgctgaaatgggatccccagacgctgccgcggctgtcagaaaggacaggctgcacccaaggcaggtaaaactcctagagactctgtcggaatacgaaattgtaagtccaattcgcgtcaacgctttaggtgagcccttcccgacgaacgtgcattttaagagaacccgccgctccatcaatagcgccaccgatccttggcccgctttcgcatcgtcttcgagttcatcaactagttcccaagcccattatagactgagcgcattcggacagcagttcctgttcaatttaactgctaacgctggatttatcgccccgctcttcacagtaactctgctggggacaccgggggttaaccagacaaaattttacagcgaagaagaggcagagctaaaacactgtttttacaaaggatacgtgaataccaatagcgaacacacggctgtgatttccttatgctcagggatgcttggaacttttcgatcacacgatggggattactttattgagcccttgcaatcaatggacgagcaagaggacgaagaagagcagaacaaaccccatatcatttacaggaggtctgctccccaacgcgagccctctacaggtcggcacgcatgcgatacctctgaacacaaaaatcggcactctaaggataagaaaaaaaccagagcaaggaagtggggcgagaggatcaatctggcaggcgacgtcgctgccttaaactccgggctggcaactgaagcctttagcgcctacggaaacaagacggacaacacaagggagaagcggacacacagacggactaaacggtttttgtcttacccaagattcgtcgaagtgctggtggtggcggataatcgtatggtgtcatatcatggggaaaacctgcagcattatatactgacacttatgtctatcgacggaccctctattagtttcaacgctcagacaactctgaagaatttttgtcagtggcagcatagcaagaattcacccggaggcattcaccatgacaccgccgttctgctgactagacaggacatttgcagagcccatgacaagtgcgacacgctaggcctcgccgagctgggtactatttgcgatccgtatagatcgtgcagcatctctgaggactccgggctcagcaccgcctttacgatcgcccacgaacttggtcatgtgttcaatatgccgcacgatgacaataataagtgcaaggaggagggagtgaaaagtccccagcatgtgatggccccaactctgaacttttatacaaacccctggatgtggtcaaagtgttcaagaaagtacatcaccgaatttctcgacaccggctacggcgaatgcctgcttaacgagcctgagagcagaccgtacccgcttcccgttcagctcccaggtatactgtataacgtcaacaagcagtgcgaactcatattcggtcccggtagccaggtctgcccctatatgatgcagtgtcgccggctctggtgcaacaacgtgaatggtgtacataaagggtgccgaacgcagcacaccccttgggcagatggcaccgagtgtgaaccaggtaagcattgtaaatacggcttctgcgtgcctaaggagatggacgtgcccgtgactgacgggtcatggggcagctggtctcccttcggcacctgttcacgtacatgcggaggaggcatcaagacagccatccgtgaatgcaatcggcccgagcctaagaacggcgggaaatactgcgttggacgaagaatgaagttcaaatcctgtaacacggagccctgtctgaagcagaagcgagattttagggatgagcagtgtgctcacttcgacggaaaacacttcaacattaacggcttgctgcctaacgttcggtgggttcctaaatatagtggcattctgatgaaggatcgctgtaagcttttttgtagagtggctgggaacactgcttactaccaactacgggacagggtgatcgatggcactccctgtggtcaggatactaacgacatctgtgtccagggtctgtgcaggcaggcagggtgtgaccacgtgcttaacagcaaggcaagacgagacaagtgtggagtatgcggaggcgataattcgtcttgcaagaccgtggcaggtacatttaacaccgtgcactacgggtataacaccgttgtcaggatccctgctggcgctaccaatatcgatgttcgccaacactccttctcgggtgagacagacgatgacaactacctggccttatcatctagcaagggcgagtttctcctgaatggcaacttcgtagtaaccatggcgaaaagagaaattcggataggaaacgccgtggtagagtactcaggatcagaaacagcagtggagaggatcaattccaccgataggatagagcaggaactactgttacaggttctatcggtgggcaaactctataaccctgacgtgcgttatagctttaatattccgatcgaggacaagccacaacagttttattggaactcacacgggccttggcaggcttgttccaaaccatgtcagggagaacggaagcgcaagttggtttgcactagagaaagcgaccaactcactgtatcagatcagcggtgtgaccgactgccccagcctggccatatcaccgagccttgcggtactgattgcgacctacgttggcacgtggcatcaagatccgaatgctctgcgcagtgtgggcttggctataggacattggacatctactgcgccaagtactcacgtcttgacggcaagaccgagaaagtcgatgacggtttttgtagttcccaccctaaaccatcaaaccgggaaaaatgcagcggtgaatgtaacacaggcggctggcgctactcagcgtggaccgaatgcagcaagagctgtgacggaggtacacagcggcgcagagccatatgtgtcaatactcggaacgatgtgctagacgattcaaaatgcacacaccaggagaaggtcactatccagcggtgcagtgagtttccctgcccacagtggaagagcggcgactggtctgaatgcctggtgacctgcggcaagggccataaacatagacaggtgtggtgccagttcggcgaagacagactcaacgatcgcatgtgtgatcccgagacaaagccgacttcgatgcagacctgccagcaaccagagtgcgctagctggcaggcaggaccctggggccaatgttcggtgacgtgcggccaaggctatcaattgcgggccgttaaatgcataataggcacatacatgagtgtggttgatgataacgattgtaatgccgctacaaggcctacggatactcaggattgcgaactcccgagctgccacccacctcccgcagcaccagagacccgacgatcaacctatagcgcacccagaacccagtggcgttttggctcctggactccctgctctgctacctgtggcaaaggtactagaatgcgctatgtgtcgtgccgtgacgagaatgggagcgtcgcagatgagtccgcttgtgcaacgcttccgaggccagttgcaaaggaggaatgctccgttaccccatgcgggcagtggaaggcgttagattggagttcatgttctgtcacatgcggccagggacgggctacgaggcaggtgatgtgcgtcaattatagcgatcacgttatagaccggagtgagtgtgatcaggactacattcccgaaacggatcaggactgcagtatgtccccttgtccccagcggacccctgattccggactggctcagcatcccttccaaaacgaagattaccgccctcggagtgcttcaccatctagaacccacgtgttgggaggcaatcagtggcggactggcccctggggggcttgtagttctacctgcgctggcggcagccagagacgggtggtggtatgtcaagacgaaaacggatacacagctaacgactgtgtggaaagaatcaaaccggacgaacagagagcgtgcgaatcagggccctgcccgcaatgggcatacggcaattggggggaatgcaccaaactctgcgggggcgggatccggacacgactggttgtgtgccagcggagtaacggcgaacgcttcccggatctgtcatgtgaaattctagataagccgccagatcgcgagcaatgcaatacccacgcatgtccccacgacgctgcctggagcactggtccttggagcagttgcagcgtgtcctgtgggcggggccataagcagcgaaacgtgtactgcatggctaaggatggctcacacctggaaagtgactactgcaaacacctggctaagcctcatggacataggaaatgccggggtggtcgttgtccaaagtggaaggcaggcgcttggtcacaatgctctgttagttgcggacgtggggtgcagcagcgccacgtgggttgccaaatagggacccacaagatcgcacgcgaaaccgaatgcaatccatatacacgccctgaatcagaacgcgactgtcagggtcctagatgcccgttgtatacgtggagagccgaagagtggcaggaatgtaccaagacatgcggagagggaagtagataccggaaggtagtctgcgtggacgataataaaaatgaagtgcatggtgctaggtgcgatgtgtcaaagcggcccgtggatcgtgagtcttgtagcctgcaaccatgtgagtatgtctggatcacgggtgaatggtcagaatgttcggtgacttgcggcaagggatacaaacaaagattagtgagttgttccgaaatttacaccggcaaagagaactatgagtattcctaccagaccactatcaattgtccaggcacacaacctccatctgtgcatccatgctacctgagagactgtcctgtctccgctacttggcgtgtcggaaactgggggtcatgcagtgtttcctgcggagtgggtgtcatgcagaggtccgtacagtgcctgactaacgaggaccagccctctcatctatgccataccgacctgaagcctgaggaaaggaaaacctgtagaaacgtgtacaactgtgaactgccacagaactgtaaggaggttaaaaggttgaaaggagcctctgaagatggagagtatttcctcatgatacgagggaagttgcttaaaatcttttgtgccggcatgcactccgatcacccaaaggaatatgtcacgttagtgcacggcgactccgagaacttttccgaagtctatggacaccgtctgcacaacccaacagagtgtccatacaacgggtcaaggcgcgacgactgccagtgccgaaaagactacaccgctgcagggttctcttcctttcagaagatcagaatagatctgaccagtatgcaaatcattactacagacctccagtttgctaggacatctgaaggccaccccgtaccattcgcgacagcaggcgattgctatagtgccgccaagtgccctcaggggagattttccattaatctgtatggtaccgggctgtcactgactgaatcggccaggtggatctcacaaggcaattacgcagtgtcggacattaaaaagtcccccgacggtactcgcgttgttggtaaatgcggtggttattgcgggaaatgtactccgtcatctggaactggccttgaggtaagagttttgtag

SEQ ID NO: 279482 - DNA, 5724 bp, Artificial Sequence
  derived and/or modified sequence
atgcagtttgttagttgggccacattactgactcttctggtgcgagatctggccgagatgggtagccctgacgccgcagcagcggttcggaaagatcgcctgcatccacgccaggttaaactcctagagactctctctgaatacgagattgtaagcccaataagagtgaacgctttaggtgagccttttccaaccaacgtccacttcaaaagaacccgacgcagcatcaactccgcaacagacccctggcctgcctttgccagcagctctagctcctctacttcatctcaagcccattacagactgagcgcattcggacagcagttcctgttcaatttaactgctaacgctggatttatcgccccgctcttcacagtaactctgctggggacaccgggggttaaccagacaaaattttacagcgaagaagaggcagagctaaaacactgtttttacaaaggatacgtgaataccaatagcgaacacacggctgtgatttccttatgctcagggatgcttggaacttttcgatcacacgatggggattactttattgagcccttgcaatcaatggacgagcaagaggacgaagaagagcagaataagccacacatcatttacaggaggtcagccccacaaagggaacccagcactggaagacatgcatgtgatacatccgagcataaaaatcggcatagcaaggataagaaaaagacccgtgccagaaagtggggcgagagaattaatttagcaggggatgtcgccgcactcaatagtggactggctactgaagcattctcagcatacggtaataagactgacaacacaagggagaaaagaacacatcggcggaccaaaagatttctcagctacccccgattcgtagaggtcctagttgtagcggataaccgcatggtttcctatcacggagagaacttgcagcactacatcctcaccctcatgagcatcgatggaccatctatatcttttaacgcgcaaactactctgaaaaatttttgccaatggcaacactctaaaaattcaccgggcggaatacaccacgataccgccgtgctgctcactaggcaggatatttgtcgcgcccatgataagtgtgacaccctcggactggccgagttgggaaccatctgcgacccctaccgttcctgctcaatttctgaagatagtggcttatcgactgctttcactatcgctcacgagcttggacatgtcttcaatatgccgcatgatgataataacaaatgtaaagaggaaggcgttaagtcaccccagcacgtaatggctcccacactgaacttttacacaaacccctggatgtggagcaaatgttcaaggaagtacataactgaatttctcgacacgggttatggagagtgcctcttgaatgagccggaaagcaggccctatcccctgccagtgcagttacctggaatcctgtataacgttaacaagcagtgcgaattgatcttcggcccggggagccaagtttgcccctacatgatgcaatgcagaagactatggtgtaataacgtgaatggcgttcataagggctgtcgaactcagcataccccatgggctgatggaaccgaatgcgaaccgggcaaacactgcaagtatggattctgcgtgcccaaggagatggacgtgcccgtgaccgacgggagttgggggtcatggagtcccttcggtacttgtagtcgaacatgtggagggggcatcaaaacagccatcagagaatgtaatcgccccgagcctaaaaatggcgggaagtactgcgtcgggcggagaatgaaatttaagagttgcaacaccgagccgtgtttgaaacaaaaaagggactttagggacgagcaatgtgctcatttcgatggaaaacactttaacattaatggccttctccccaacgtgcggtgggtgccaaagtatagcggcattctgatgaaggataggtgtaagctattctgtcgtgtggctggaaatactgcctactaccaacttcgggatcgcgtcatcgatggaactccgtgtggacaggacactaatgatatttgcgtacaggggctgtgtcgccaggcgggatgcgatcacgtccttaatagcaaggcccgtcgcgataagtgtggcgtgtgtggcggtgataactcctcctgtaaaacggtcgcagggacctttaacacagttcactacggatacaacactgttgttcggattcctgccggagcaacaaatatagatgttcgtcaacattcctttagcggcgagaccgatgatgacaactatttggcactatcctctagtaaaggtgaattcttgcttaacggaaactttgttgtcacgatggccaaaagagaaatcaggattggaaatgccgtagtcgagtactccggctctgagaccgccgtcgaacggattaactctacagatcgtatcgagcaggaactgttgctccaagtcctaagcgtcggaaaactgtataatccggacgtcagatatagtttcaatattccgatagaagataaacctcagcagttctattggaactctcacggaccatggcaggcttgctcaaaaccttgtcaaggagaacgaaaaaggaagctcgtctgcacgcgcgagagcgatcagctgactgttagcgatcagaggtgtgacagactcccacagcccggccatattaccgagccttgtggaactgactgcgatctgcgttggcatgttgcgtcgcggagtgagtgcagcgctcagtgtgggcttggataccgaaccttggatatctattgtgctaaatattctagactcgatggcaagaccgaaaaagtggatgatggattctgttcatctcatcctaagcctagtaaccgggaaaagtgtagcggagagtgcaacaccggcggatggcgatacagtgcgtggaccgaatgcagcaagagttgcgatggaggcacccagagacggagagccatttgtgtgaatactcgaaatgacgtgcttgacgattcaaagtgcacacaccaggaaaaggttacaattcaaagatgtagcgagttcccttgtccccaatggaaatccggtgactggagcgaatgccttgtcacgtgtgggaagggacacaagcaccgacaggtatggtgccagtttggggaagacagattaaacgacaggatgtgtgatcctgaaactaaaccaacttcaatgcagacatgtcagcaaccagaatgcgcaagttggcaagccggaccctggggacaatgcagcgtgacttgtggccaggggtaccagttgcgagccgtcaagtgtatcattggaacctatatgagcgtggtcgacgacaatgactgcaacgccgcaacacggccgaccgatactcaagactgcgaactgcctagttgtcacccacccccggctgctccagagactcggagaagtacttattcagcgccacgtacccaatggaggttcggttcttggacaccttgttctgccacctgcggcaaagggactaggatgaggtatgtttcttgtagggacgaaaacggatcagttgcagatgagtccgcatgtgccaccttaccacggcctgtagcgaaagaagaatgctccgtgactccatgcggacaatggaaagccctggactggtcaagctgttctgtgacctgtgggcaaggtagagccacaagacaggtcatgtgcgtaaactacagtgaccatgttatcgaccgctctgaatgtgatcaggattatatcccagaaacagatcaggattgttcaatgagtccttgcccccagcggactccagattctggactagcccagcatcccttccaaaatgaggactaccgacccagaagcgctagcccatcccgaactcacgtgcttgggggaaaccagtggcgtaccggaccgtggggggcgtgttcatcgacctgtgcaggaggctcccagaggcgggtggtagtctgccaagacgaaaacggctacacagcaaacgactgcgtggagagaatcaaaccagacgagcagcgagcatgcgagtccggcccatgtccgcaatgggcgtacgggaattggggtgagtgtactaaactgtgcggaggaggaataaggactcggttagtagtttgtcaaagatccaatggggaacggtttcctgacctctcttgcgagatactggacaagcccccagacagggaacagtgcaatactcatgcctgtccacacgacgctgcatggagcacaggaccttggtcttcttgttcagtaagctgtgggcgcggtcataaacagcgaaatgtgtattgtatggcaaaagacgggtcccacctagaaagcgattactgtaagcacttggctaagccacacggtcatcggaagtgcagaggaggtcggtgtcctaagtggaaggcaggggcatggtcacaatgcagcgtttcttgcggccgaggtgttcaacagcggcatgtgggatgtcagataggaacccacaaaattgccagagaaacagaatgtaacccatacacacggcccgagtcagagcgggattgtcagggcccaagatgtccactgtacacatggagggctgaagaatggcaagaatgtaccaagacatgtggtgaggggagtagatatcggaaagtggtgtgcgttgatgataacaagaacgaggtgcacggagcaaggtgcgacgtgtctaagagaccggtggatagggagtcttgtagtctgcaaccttgcgagtatgtatggattaccggtgaatggtccgaatgctcagttacatgtggcaagggctacaagcaaagactagtgtcctgctccgagatctataccgggaaggagaattacgaatatagctatcagacgacgatcaactgtccaggaactcagcccccaagtgtgcacccttgttaccttagagattgcccagtgtcggccacatggagagtgggtaattgggggtcttgcagcgtgtcttgtggcgttggggtcatgcagcgtagcgtacaatgcttaactaacgaagaccaaccctctcatttatgtcacacagatctgaagccagaagaacggaaaacatgccgcaatgtttacaattgtgaattaccgcagaattgcaaggaagtcaagcgattgaagggtgcatctgaagacggagaatattttctgatgattagggggaagctgttgaaaatattttgcgccggtatgcactccgaccacccaaaagaatatgttaccttagtgcacggagactccgaaaacttctcagaggtctacggacatcgccttcacaacccgaccgaatgcccttataacggctcacgccgagacgattgtcaatgcaggaaagattacactgcggccggcttttcgagctttcagaaaataagaatcgatttgacatctatgcaaattataaccacagatttacagtttgctaggactagtgagggtcaccccgtgccatttgcgacggccggagattgctactcagccgctaagtgccctcagggtcgatttagcatcaatctctatggcacaggcttatctctgacggaatctgctagatggatctcgcagggtaactatgccgtttctgacattaaaaaatcaccagacggcacaagggttgtggggaaatgtggaggctactgtggtaagtgtacaccctctagcggtaccggacttgaagtacgcgttttgtag

SEQ ID NO: 279483 - DNA, 5724 bp, Artificial Sequence
  derived and/or modified sequence
atgcagttcgtgagctgggccaccctgctgaccctgctggtgagagacctggccgagatgggcagccccgacgccgccgccgccgtgagaaaggacagactgcaccccagacaggtgaagctgctggagaccctgagcgagtacgagatcgtgagccccatcagagtgaacgccctgggcgagcccttccccaccaacgtgcacttcaagagaaccagaagaagcatcaacagcgccaccgacccctggcccgccttcgccagcagcagcagcagcagcaccagcagccaggcccactacagactgagcgccttcggccagcagttcctgttcaacctgaccgccaacgccggcttcatcgcccccctgttcaccgtgaccctgctgggcacccccggcgtgaaccagaccaagttctacagcgaggaggaggccgagctgaagcactgcttctacaagggctacgtgaacaccaacagcgagcacaccgccgtgatcagcctgtgcagcggcatgctgggcaccttcagaagccacgacggcgactacttcatcgagcccctgcagagcatggacgagcaggaggacgaggaggagcagaacaagccccacatcatctacagaagaagcgccccccagagagagcccagcaccggcagacacgcctgcgacaccagcgagcacaagaacagacacagcaaggacaagaagaagaccagagccagaaagtggggcgagagaatcaacctggccggcgacgtggccgccctgaacagcggcctggccaccgaggccttcagcgcctacggcaacaagaccgacaacaccagagagaagagaacccacagaagaaccaagagattcctgagctaccccagattcgtggaggtgctggtggtggccgacaacagaatggtgagctaccacggcgagaacctgcagcactacatcctgaccctgatgagcatcgacggccccagcatcagcttcaacgcccagaccaccctgaagaacttctgccagtggcagcacagcaagaacagccccggcggcatccaccacgacaccgccgtgctgctgaccagacaggacatctgcagagcccacgacaagtgcgacaccctgggcctggccgagctgggcaccatctgcgacccctacagaagctgcagcatcagcgaggacagcggcctgagcaccgccttcaccatcgcccacgagctgggccacgtgttcaacatgccccacgacgacaacaacaagtgcaaggaggagggcgtgaagagcccccagcacgtgatggcccccaccctgaacttctacaccaacccctggatgtggagcaagtgcagcagaaagtacatcaccgagttcctggacaccggctacggcgagtgcctgctgaacgagcccgagagcagaccctaccccctgcccgtgcagctgcccggcatcctgtacaacgtgaacaagcagtgcgagctgatcttcggccccggcagccaggtgtgcccctacatgatgcagtgcagaagactgtggtgcaacaacgtgaacggcgtgcacaagggctgcagaacccagcacaccccctgggccgacggcaccgagtgcgagcccggcaagcactgcaagtacggcttctgcgtgcccaaggagatggacgtgcccgtgaccgacggcagctggggcagctggagccccttcggcacctgcagcagaacctgcggcggcggcatcaagaccgccatcagagagtgcaacagacccgagcccaagaacggcggcaagtactgcgtgggcagaagaatgaagttcaagagctgcaacaccgagccctgcctgaagcagaagagagacttcagagacgagcagtgcgcccacttcgacggcaagcacttcaacatcaacggcctgctgcccaacgtgagatgggtgcccaagtacagcggcatcctgatgaaggacagatgcaagctgttctgcagagtggccggcaacaccgcctactaccagctgagagacagagtgatcgacggcaccccctgcggccaggacaccaacgacatctgcgtgcagggcctgtgcagacaggccggctgcgaccacgtgctgaacagcaaggccagaagagacaagtgcggcgtgtgcggcggcgacaacagcagctgcaagaccgtggccggcaccttcaacaccgtgcactacggctacaacaccgtggtgagaatccccgccggcgccaccaacatcgacgtgagacagcacagcttcagcggcgagaccgacgacgacaactacctggccctgagcagcagcaagggcgagttcctgctgaacggcaacttcgtggtgaccatggccaagagagagatcagaatcggcaacgccgtggtggagtacagcggcagcgagaccgccgtggagagaatcaacagcaccgacagaatcgagcaggagctgctgctgcaggtgctgagcgtgggcaagctgtacaaccccgacgtgagatacagcttcaacatccccatcgaggacaagccccagcagttctactggaacagccacggcccctggcaggcctgcagcaagccctgccagggcgagagaaagagaaagctggtgtgcaccagagagagcgaccagctgaccgtgagcgaccagagatgcgacagactgccccagcccggccacatcaccgagccctgcggcaccgactgcgacctgagatggcacgtggccagcagaagcgagtgcagcgcccagtgcggcctgggctacagaaccctggacatctactgcgccaagtacagcagactggacggcaagaccgagaaggtggacgacggcttctgcagcagccaccccaagcccagcaacagagagaagtgcagcggcgagtgcaacaccggcggctggagatacagcgcctggaccgagtgcagcaagagctgcgacggcggcacccagagaagaagagccatctgcgtgaacaccagaaacgacgtgctggacgacagcaagtgcacccaccaggagaaggtgaccatccagagatgcagcgagttcccctgcccccagtggaagagcggcgactggagcgagtgcctggtgacctgcggcaagggccacaagcacagacaggtgtggtgccagttcggcgaggacagactgaacgacagaatgtgcgaccccgagaccaagcccaccagcatgcagacctgccagcagcccgagtgcgccagctggcaggccggcccctggggccagtgcagcgtgacctgcggccagggctaccagctgagagccgtgaagtgcatcatcggcacctacatgagcgtggtggacgacaacgactgcaacgccgccaccagacccaccgacacccaggactgcgagctgcccagctgccaccccccccccgccgcccccgagaccagaagaagcacctacagcgcccccagaacccagtggagattcggcagctggaccccctgcagcgccacctgcggcaagggcaccagaatgagatacgtgagctgcagagacgagaacggcagcgtggccgacgagagcgcctgcgccaccctgcccagacccgtggccaaggaggagtgcagcgtgaccccctgcggccagtggaaggccctggactggagcagctgcagcgtgacctgcggccagggcagagccaccagacaggtgatgtgcgtgaactacagcgaccacgtgatcgacagaagcgagtgcgaccaggactacatccccgagaccgaccaggactgcagcatgagcccctgcccccagagaacccccgacagcggcctggcccagcaccccttccagaacgaggactacagacccagaagcgccagccccagcagaacccacgtgctgggcggcaaccagtggagaaccggcccctggggcgcctgcagcagcacctgcgccggcggcagccagagaagagtggtggtgtgccaggacgagaacggctacaccgccaacgactgcgtggagagaatcaagcccgacgagcagagagcctgcgagagcggcccctgcccccagtgggcctacggcaactggggcgagtgcaccaagctgtgcggcggcggcatcagaaccagactggtggtgtgccagagaagcaacggcgagagattccccgacctgagctgcgagatcctggacaagccccccgacagagagcagtgcaacacccacgcctgcccccacgacgccgcctggagcaccggcccctggagcagctgcagcgtgagctgcggcagaggccacaagcagagaaacgtgtactgcatggccaaggacggcagccacctggagagcgactactgcaagcacctggccaagccccacggccacagaaagtgcagaggcggcagatgccccaagtggaaggccggcgcctggagccagtgcagcgtgagctgcggcagaggcgtgcagcagagacacgtgggctgccagatcggcacccacaagatcgccagagagaccgagtgcaacccctacaccagacccgagagcgagagagactgccagggccccagatgccccctgtacacctggagagccgaggagtggcaggagtgcaccaagacctgcggcgagggcagcagatacagaaaggtggtgtgcgtggacgacaacaagaacgaggtgcacggcgccagatgcgacgtgagcaagagacccgtggacagagagagctgcagcctgcagccctgcgagtacgtgtggatcaccggcgagtggagcgagtgcagcgtgacctgcggcaagggctacaagcagagactggtgagctgcagcgagatctacaccggcaaggagaactacgagtacagctaccagaccaccatcaactgccccggcacccagccccccagcgtgcacccctgctacctgagagactgccccgtgagcgccacctggagagtgggcaactggggcagctgcagcgtgagctgcggcgtgggcgtgatgcagagaagcgtgcagtgcctgaccaacgaggaccagcccagccacctgtgccacaccgacctgaagcccgaggagagaaagacctgcagaaacgtgtacaactgcgagctgccccagaactgcaaggaggtgaagagactgaagggcgccagcgaggacggcgagtacttcctgatgatcagaggcaagctgctgaagatcttctgcgccggcatgcacagcgaccaccccaaggagtacgtgaccctggtgcacggcgacagcgagaacttcagcgaggtgtacggccacagactgcacaaccccaccgagtgcccctacaacggcagcagaagagacgactgccagtgcagaaaggactacaccgccgccggcttcagcagcttccagaagatcagaatcgacctgaccagcatgcagatcatcaccaccgacctgcagttcgccagaaccagcgagggccaccccgtgcccttcgccaccgccggcgactgctacagcgccgccaagtgcccccagggcagattcagcatcaacctgtacggcaccggcctgagcctgaccgagagcgccagatggatcagccagggcaactacgccgtgagcgacatcaagaagagccccgacggcaccagagtggtgggcaagtgcggcggctactgcggcaagtgcacccccagcagcggcaccggcctggaggtgagagtgctgtag

SEQ ID NO: 279484 - protein, 403 aa, Artificial Sequence
  derived and/or modified sequence
MSGSDGGLEEEPELSITLTLRMLMHGKEVGSIIGKKGETVKRIREQSSARITISEGSCPERITTITGSTAAVFHAVSMIAFKLDEDLCAAPANGGNVSRPPVTLRLVIPASQCGSLIGKAGTKIKEIRETTGAQVQVAGDLLPNSTERAVTVSGVPDAIILCVRQICAVILESPPKGATIPYHPSLSLGTVLLSANQGFSVQGQYGAVTPAEVTKLQQLSSHAVPFATPSVVPGLDPGTQTSSQEFLVPNDLIGCVIGRQGSKISEIRQMSGAHIKIGNQAEGAGERHVTITGSPVSIALAQYLITACLETAKSTSGGTPSSAPADLPAPFSPPLTALPTAPPGLLGTPYAISLSNFIGLKPMPFLALPPASPGPPPGLAAYTAKMAAANGSKKAERQKFSPY

SEQ ID NO: 279485 - protein, 377 aa, Artificial Sequence
  derived and/or modified sequence
MSGSDGGLEEEPELSITLTLRMLMHGKEVGSIIGKKGETVKRIREQSSARITISEGSCPERITTITGSTAAVFHAVSMIAFKLDEDLCAAPANGGNVSRPPVTLRLVIPASQCGSLIGKAGTKIKEIRETTGAQVQVAGDLLPNSTERAVTVSGVPDAIILCVRQICAVILESPPKGATIPYHPSLSLGTVLLSANQGFSVQGQYGAVTPAEVTKLQQLSSHAVPFATPSVVPGLDPGTQTSSQEFLVPNDLIGCVIGRQGSKISEIRQMSGAHIKIGNQAEGAGERHVTITGSPVSIALAQYLITACLETAKSTSGGTPSSAPADLPAPFSPPLTAPQLPLACWAHPMPSPSPTSSAQAHALLGFTTCFPRAAAGL

SEQ ID NO: 279486 - protein, 424 aa, Artificial Sequence
  derived and/or modified sequence
MPRCPALILYLQSSARITISEGSCPERITTITGSTAAVFHAVSMIAFKLDEDLCAAPANGGNVSRPPVTLRLVIPASQCGSLIGKAGTKIKEIREVRGEIYHPQGIRGKGAVVRGVLGLWRPPHLESSEPGQPFSGLWEQPEVAPVLCLQTTGAQVQVAGDLLPNSTERAVTVSGVPDAIILCVRQICAVILESPPKGATIPYHPSLSLGTVLLSANQGFSVQGQYGAVTPAEVTKLQQLSSHAVPFATPSVVPGLDPGTQTSSQEFLVPNDLIGCVIGRQGSKISEIRQMSGAHIKIGNQAEGAGERHVTITGSPVSIALAQYLITACLETAKSTSGGTPSSAPADLPAPFSPPLTALPTAPPGLLGTPYAISLSNFIGLKPMPFLALPPASPGPPPGLAAYTAKMAAANGSKKAERQKFSPY

SEQ ID NO: 279487 - protein, 46 aa, Artificial Sequence
  derived and/or modified sequence
MSGSDGGLEEEPELSITLTLRMLMHGKEVGSIIGKKGETVKRIREQ

SEQ ID NO: 279488 - protein, 168 aa, Artificial Sequence
  derived and/or modified sequence
MSGSDGGLEEEPELSITLTLRMLMHGKEVGSIIGKKGETVKRIREQSSARITISEGSCPERITTITGSTAAVFHAVSMIAFKLDEDLCAAPANGGNVSRPPVTLRLVIPASQCGSLIGKAGTKIKEIRETTGAQVQVAGDLLPNSTERAVTVSGVPDAIILCVRQICA

SEQ ID NO: 279489 - protein, 75 aa, Artificial Sequence
  derived and/or modified sequence
MSGSDGGLEEEPELSITLTLRMLMHGKEVGSIIGKKGETVKRIREQSSARITISEGSCPERITTITGSTAAVFHA

SEQ ID NO: 279490 - protein, 86 aa, Artificial Sequence
  derived and/or modified sequence
MSGSDGGLEEEPELSITLTLRMLMHGKEVGSIIGKKGETVKRIREQSSARITISEGSCPERITTITGSTAAVFHAVSMIAFKLDEV

SEQ ID NO: 279491 - DNA, 2015 bp, Artificial Sequence
  derived and/or modified sequence
gtcaaacccctcattgttcgcagctgatgtcactcgcagttgtgagcggccgcctctcccggggacaatgtgggactgagcggcccagccgccgtgccgccgccgccgccgccgcaggacagccccagcgagagccggccaggttgcagcgcggacacactcgcaggtcgctgtggccccagcctcgcctgacagaatgagcggctcggacgggggactggaggaggagccagagctcagcatcaccctcacgctgcggatgctgatgcacgggaaggaagtgggcagcatcatcgggaagaagggcgagactgtaaagcgaatccgggagcagagcagtgcccggatcaccatctccgagggctcctgccctgaacgcatcaccaccatcaccgggtctacagcagctgtcttccatgcagtctccatgattgctttcaaactggatgaggacctttgtgctgctcctgcaaatggtggaaatgtctccaggcctccagtgaccctgcgccttgtcatccctgccagtcagtgtggctcactgattgggaaggctggcaccaagatcaaggagatccgagagactacgggtgcccaggtacaggtggcaggggacctgctccccaactccacagagcgagctgttacggtatctggggtgcctgatgccatcatcctgtgtgtgcgccagatctgcgctgttatcctggagtccccacccaaaggagccactatcccctaccatccgagcctctccctaggtactgttcttctctctgccaaccagggcttctctgtccagggtcagtatggggctgtgaccccagctgaggtcaccaagctccagcagctctcaagccatgcggtcccctttgccacacccagcgtggtgccaggactggatcccggcacacagaccagctcacaggagttcttggttcccaacgatttgattggctgtgtgatcgggcgccagggcagcaagatcagcgagatccggcagatgtcaggggcacatatcaagatcgggaaccaagcagagggcgctggggagcggcatgtcaccatcactggctctccggtctccatcgccctggcccagtacctcatcactgcctgtctagagacggccaagtctacctctggggggacgcccagctcggcccccgcagacctgcctgcccccttctcgccacccctgacggccctgcccacagctccccctggcctgctgggcacaccctatgccatctccctctccaacttcatcggcctcaagcccatgcccttcttggctttaccacctgcttccccagggccgccgccgggcttggcggcctacactgccaagatggcagcagctaatgggagcaagaaggctgagcggcagaaattctccccctactgaggccagctgaggtacaggcaggggcaggcaggaccaccagcagggggctgcctctgcaccctacccgcccaaggagactccaccctggggtcccaaacgccgctaacgcccagacgcatggatgcaccccctaccctgcctccatctatgggagttctttctctcagagtgggggcagtttctggcccaggggtctgagctgcggcagccccagggcagggggccctacctcctcagctctgtgcttggatacagggagcagccaggagactccctagtgcccccaccatggcgggtgtcactcacgcactccccatcccttagggcttcctggcctactgcatccttgtgggagtcagggaggagggcccgttgggtagctggggccaggcttctctccccaccacctgcagatttcttgctgcttccactgatacccttttgactggaatgaactggctgggcttgtcagggggcaccccaaagagggggcactgccaggtagctgggggagtggcatggggcaggggcccagttctcagcagcagacactctgtacagttttttcaatccctgtttttgaataaatattctcagcgaccaggaa

SEQ ID NO: 279492 - DNA, 2147 bp, Artificial Sequence
  derived and/or modified sequence
attgttcgcagctgatgtcactcgcagttgtgagcggccgcctctcccggggacaatgtgggactgagcggcccagccgccgtgccgccgccgccgccgccgcaggacagccccagcgaggccatttccagcacatagaagagagattggaaaccaacgtgcagaactgccagtcccctgacacgctgtgccccacccactgcagcccagtgctgaatgaaccctgcccagaggtgtctgtagtgagcttctgccctagtgacttttgagccggccaggttgcagcgcggacacactcgcaggtcgctgtggccccagcctcgcctgacagaatgagcggctcggacgggggactggaggaggagccagagctcagcatcaccctcacgctgcggatgctgatgcacgggaaggaagtgggcagcatcatcgggaagaagggcgagactgtaaagcgaatccgggagcagagcagtgcccggatcaccatctccgagggctcctgccctgaacgcatcaccaccatcaccgggtctacagcagctgtcttccatgcagtctccatgattgctttcaaactggatgaggacctttgtgctgctcctgcaaatggtggaaatgtctccaggcctccagtgaccctgcgccttgtcatccctgccagtcagtgtggctcactgattgggaaggctggcaccaagatcaaggagatccgagagactacgggtgcccaggtacaggtggcaggggacctgctccccaactccacagagcgagctgttacggtatctggggtgcctgatgccatcatcctgtgtgtgcgccagatctgcgctgttatcctggagtccccacccaaaggagccactatcccctaccatccgagcctctccctaggtactgttcttctctctgccaaccagggcttctctgtccagggtcagtatggggctgtgaccccagctgaggtcaccaagctccagcagctctcaagccatgcggtcccctttgccacacccagcgtggtgccaggactggatcccggcacacagaccagctcacaggagttcttggttcccaacgatttgattggctgtgtgatcgggcgccagggcagcaagatcagcgagatccggcagatgtcaggggcacatatcaagatcgggaaccaagcagagggcgctggggagcggcatgtcaccatcactggctctccggtctccatcgccctggcccagtacctcatcactgcctgtctagagacggccaagtctacctctggggggacgcccagctcggcccccgcagacctgcctgcccccttctcgccacccctgacggccctgcccacagctccccctggcctgctgggcacaccctatgccatctccctctccaacttcatcggcctcaagcccatgcccttcttggctttaccacctgcttccccagggccgccgccgggcttggcggcctacactgccaagatggcagcagctaatgggagcaagaaggctgagcggcagaaattctccccctactgaggccagctgaggtacaggcaggggcaggcaggaccaccagcagggggctgcctctgcaccctacccgcccaaggagactccaccctggggtcccaaacgccgctaacgcccagacgcatggatgcaccccctaccctgcctccatctatgggagttctttctctcagagtgggggcagtttctggcccaggggtctgagctgcggcagccccagggcagggggccctacctcctcagctctgtgcttggatacagggagcagccaggagactccctagtgcccccaccatggcgggtgtcactcacgcactccccatcccttagggcttcctggcctactgcatccttgtgggagtcagggaggagggcccgttgggtagctggggccaggcttctctccccaccacctgcagatttcttgctgcttccactgatacccttttgactggaatgaactggctgggcttgtcagggggcaccccaaagagggggcactgccaggtagctgggggagtggcatggggcaggggcccagttctcagcagcagacactctgtacagttttttcaatccctgtttttgaataaatattctcagcgacca

SEQ ID NO: 279493 - DNA, 1964 bp, Artificial Sequence
  derived and/or modified sequence
cctctggagtccctgtggcagaactcaaatggaaggaggagcagctgcacccaggggagcagggtgtcacctccgttggatagagccggccaggttgcagcgcggacacactcgcaggtcgctgtggccccagcctcgcctgacagaatgagcggctcggacgggggactggaggaggagccagagctcagcatcaccctcacgctgcggatgctgatgcacgggaaggaagtgggcagcatcatcgggaagaagggcgagactgtaaagcgaatccgggagcagagcagtgcccggatcaccatctccgagggctcctgccctgaacgcatcaccaccatcaccgggtctacagcagctgtcttccatgcagtctccatgattgctttcaaactggatgaggacctttgtgctgctcctgcaaatggtggaaatgtctccaggcctccagtgaccctgcgccttgtcatccctgccagtcagtgtggctcactgattgggaaggctggcaccaagatcaaggagatccgagagactacgggtgcccaggtacaggtggcaggggacctgctccccaactccacagagcgagctgttacggtatctggggtgcctgatgccatcatcctgtgtgtgcgccagatctgcgctgttatcctggagtccccacccaaaggagccactatcccctaccatccgagcctctccctaggtactgttcttctctctgccaaccagggcttctctgtccagggtcagtatggggctgtgaccccagctgaggtcaccaagctccagcagctctcaagccatgcggtcccctttgccacacccagcgtggtgccaggactggatcccggcacacagaccagctcacaggagttcttggttcccaacgatttgattggctgtgtgatcgggcgccagggcagcaagatcagcgagatccggcagatgtcaggggcacatatcaagatcgggaaccaagcagagggcgctggggagcggcatgtcaccatcactggctctccggtctccatcgccctggcccagtacctcatcactgcctgtctagagacggccaagtctacctctggggggacgcccagctcggcccccgcagacctgcctgcccccttctcgccacccctgacggccctgcccacagctccccctggcctgctgggcacaccctatgccatctccctctccaacttcatcggcctcaagcccatgcccttcttggctttaccacctgcttccccagggccgccgccgggcttggcggcctacactgccaagatggcagcagctaatgggagcaagaaggctgagcggcagaaattctccccctactgaggccagctgaggtacaggcaggggcaggcaggaccaccagcagggggctgcctctgcaccctacccgcccaaggagactccaccctggggtcccaaacgccgctaacgcccagacgcatggatgcaccccctaccctgcctccatctatgggagttctttctctcagagtgggggcagtttctggcccaggggtctgagctgcggcagccccagggcagggggccctacctcctcagctctgtgcttggatacagggagcagccaggagactccctagtgcccccaccatggcgggtgtcactcacgcactccccatcccttagggcttcctggcctactgcatccttgtgggagtcagggaggagggcccgttgggtagctggggccaggcttctctccccaccacctgcagatttcttgctgcttccactgatacccttttgactggaatgaactggctgggcttgtcagggggcaccccaaagagggggcactgccaggtagctgggggagtggcatggggcaggggcccagttctcagcagcagacactctgtacagttttttcaatccctgtttttgaataaatattctcagcgaccagg

SEQ ID NO: 279494 - DNA, 1323 bp, Artificial Sequence
  derived and/or modified sequence
aacccctcattgttcgcagctgatgtcactcgcagttgtgagcggccgcctctcccggggacaatgtgggactgagcggcccagccgccgtgccgccgccgccgccgccgcaggacagccccagcgagagccggccaggttgcagcgcggacacactcgcaggtcgctgtggccccagcctcgcctgacagaatgagcggctcggacgggggactggaggaggagccagagctcagcatcaccctcacgctgcggatgctgatgcacgggaaggaagtgggcagcatcatcgggaagaagggcgagactgtaaagcgaatccgggagcagagcagtgcccggatcaccatctccgagggctcctgccctgaacgcatcaccaccatcaccgggtctacagcagctgtcttccatgcagtctccatgattgctttcaaactggatgaggacctttgtgctgctcctgcaaatggtggaaatgtctccaggcctccagtgaccctgcgccttgtcatccctgccagtcagtgtggctcactgattgggaaggctggcaccaagatcaaggagatccgagagactacgggtgcccaggtacaggtggcaggggacctgctccccaactccacagagcgagctgttacggtatctggggtgcctgatgccatcatcctgtgtgtgcgccagatctgcgctgttatcctggagtccccacccaaaggagccactatcccctaccatccgagcctctccctaggtactgttcttctctctgccaaccagggcttctctgtccagggtcagtatggggctgtgaccccagctgaggtcaccaagctccagcagctctcaagccatgcggtcccctttgccacacccagcgtggtgccaggactggatcccggcacacagaccagctcacaggagttcttggttcccaacgatttgattggctgtgtgatcgggcgccagggcagcaagatcagcgagatccggcagatgtcaggggcacatatcaagatcgggaaccaagcagagggcgctggggagcggcatgtcaccatcactggctctccggtctccatcgccctggcccagtacctcatcactgcctgtctagagacggccaagtctacctctggggggacgcccagctcggcccccgcagacctgcctgcccccttctcgccacccctgacggccccacagctccccctggcctgctgggcacaccctatgccatctccctctccaacttcatcggcccaagcccatgcccttcttggctttaccacctgcttccccagggccgccgccgggctt

SEQ ID NO: 279495 - DNA, 1212 bp, Artificial Sequence
  derived and/or modified sequence
atgagtggctctgatgggggacttgaagaggagcctgaactgagtatcaccctgacactccgcatgctgatgcacggtaaagaagtgggctccataatcggtaaaaaaggggagactgtgaaacggattcgggagcagagctcagctaggatcaccattagcgagggctcttgtcctgaacggatcacgaccattaccggatctacagccgccgtgttccatgccgtgagcatgattgcgttcaaactggatgaggacctgtgcgccgcaccggcgaacggcgggaatgtatccaggccgcctgtgaccctgaggctcgtcattcctgctagccagtgcggcagcctcatcgggaaagcgggaactaaaattaaagagatccgtgaaaccacgggagcgcaagtgcaagttgccggagacctcttgcctaactccactgaacgagcagtgaccgtttccggggttcctgacgcaatcatcctctgcgtgcgtcagatctgtgcggttatactggagagcccacccaaaggagctacaattccctatcatcctagcctctctctcgggactgttctgctcagtgcaaaccaagggtttagtgtgcaaggccagtacggagccgttacacctgctgaagtcaccaagctacagcaactgtccagtcacgcagtcccctttgctacaccttctgtcgtgccaggtctcgaccccgggacgcagacgagctctcaagagttcctggtgccgaatgatctgataggttgtgttatcggtcggcaggggtctaaaattagtgaaatcagacagatgagcggagctcacatcaaaattgggaaccaggcggagggcgccggtgaaaggcacgtcacaatcaccggctctcctgtttccatcgcgttagcacagtacctgattactgcctgtctggagactgctaaaagtacgagcggagggacacccagctccgctcctgccgatctccccgccccgttttcacctcctctcaccgcactgccaactgctccacccggactgctgggaaccccttatgcaatctctcttagtaacttcatcggtctaaaacctatgcctttcctagccctcccccccgcgtcccctggaccgccacccggtctggcagcttatacagcaaaaatggctgctgccaatggcagtaagaaagccgaaaggcagaagttcagtccctactag

SEQ ID NO: 279496 - DNA, 1212 bp, Artificial Sequence
  derived and/or modified sequence
atgtccgggtctgatgggggccttgaagaagaacctgaactttccatcacccttaccctgcgaatgctgatgcatggcaaggaggttggatcaatcatcgggaaaaagggcgagactgtgaaacgaattagagagcagagtagcgctagaatcactatctccgagggatcgtgcccggagcgcatcactacaatcaccggtagcactgcggctgtgtttcatgcagtgagtatgattgccttcaaacttgatgaagatttgtgtgccgctcctgccaacggaggaaatgtgtcacgaccgccagttacgctgagattagttatccctgccagccagtgtggaagtctaattgggaaagccgggacaaagatcaaggaaatacgcgaaacaacaggggcacaagtgcaggtggccggagatttactgcccaattccactgaacgtgccgtgactgtaagtggtgtaccagacgctatcattctgtgcgtgcgccagatctgtgcagtgattcttgaatctccccccaaaggcgccactattccgtaccacccgtcactatcccttggaaccgtgctgctctcagcgaatcaggggtttagcgtacagggacagtacggtgctgtcacacccgccgaggttaccaagctgcaacagcttagttcacatgcggtcccgttcgctacaccatctgttgtccctgggctggatcccggcacacagacaagtagtcaagaattccttgtgccaaatgacctgatcgggtgcgttatcggacgccagggttccaagatttcagagataagacagatgtctggcgcccatatcaaaatcggtaatcaggcggagggcgctggggagagacacgtcaccattactgggtctcctgtgtccatcgcacttgctcagtacttgatcaccgcctgtctggagaccgctaagagcactagcggcggcacccccagcagcgcacctgccgatttgccggctccattcagtccaccgttgaccgctttgcctacagcaccgccaggactgctgggtacaccttatgcaatctccctgtctaattttatcggtctgaaacccatgccttttttagcgctgcctcctgcgtctcccggccctcccccaggcttggccgcatacacagcaaaaatggccgccgccaatggatccaagaaggctgaacgacagaaatttagcccttactag

SEQ ID NO: 279497 - DNA, 1212 bp, Artificial Sequence
  derived and/or modified sequence
atgagcggttctgacggcggcctggaggaggagcccgaactgtccatcacactaaccttaagaatgctgatgcacggaaaagaggtcggctctatcattgggaagaaaggagagactgtcaaaaggatccgcgagcagagctcagcccgtattactatctcagaagggagctgcccagagcggatcaccaccataacgggaagcacagctgccgtatttcacgccgtctcaatgatcgcattcaagttagatgaggacctttgtgcagcaccggcaaacggaggcaacgtgagcagacccccagttacactgcgcttggtgattcccgcgagccagtgtggaagcctgattggcaaggccggaaccaagattaaggagatacgcgaaacgaccggcgcccaggttcaagttgccggtgaccttctcccaaattccacggagcgcgctgtgactgtctccggagtgcctgacgcaatcatcctttgtgttcggcaaatctgtgccgttatcttagagtccccccccaaaggagcaacaatcccctaccatccctctctgagtctgggtaccgtcttgctctccgcaaaccaaggcttctctgtccagggacagtatggcgccgtgacgcccgccgaggttacaaagttgcaacagctgagtagccacgccgtcccgttcgccacacccagtgttgtcccaggcctggacccaggcacacagacatcctctcaggagtttctggtcccaaacgatctaattggatgcgtgatagggcggcagggatcaaagatcagtgagatccgccagatgagtggtgcacatattaagatagggaatcaagcagagggcgcaggggaacgtcacgtcacaatcacaggctctcccgtgagtattgcactggcacagtacctgattacagcatgcctggagacagccaagagtacctctgggggcactccttcaagtgctccagctgatctgccagctcccttcagcccgcccctgacagcgcttcctacagccccccctggattgctgggcacgccttacgcaatttcactgtctaatttcatcggcttgaaacctatgccctttctggccctgcccccagcttcccccgggcccccgcctgggttggccgcttacactgccaaaatggccgccgctaatggatccaagaaagcagaacgccagaaattctcaccttactag

SEQ ID NO: 279498 - DNA, 1212 bp, Artificial Sequence
  derived and/or modified sequence
atgagcggcagtgatggcggcctggaggaggagcctgagctgagcatcaccctgaccctgaggatgctgatgcacggcaaggaggtgggcagcatcatcggcaagaagggggagaccgtgaagaggatccgggagcagagcagcgcccgcatcaccatcagcgagggcagctgcccagagcgcatcaccaccatcaccggcagcacagctgctgtgttccacgctgtgtccatgattgccttcaagctggatgaggacctgtgtgccgccccagccaatggaggaaatgtgtcccggccccctgtgaccctgcggctggtgatcccagccagccagtgtggcagcctgattggcaaggccggcaccaagatcaaggagatccgggagaccactggagcccaggtgcaggtggccggggacctgctgcccaacagcacagaaagagctgtgacagtgtctggagtgcctgatgccatcatcctgtgtgtgcggcagatctgtgccgtcatcctggagagcccccccaagggggccaccatcccctaccaccccagcctgagcctgggcaccgtgctgctgagcgccaaccagggcttctctgtgcagggccagtatggagctgtgaccccagctgaggtgaccaagctgcagcagctgagcagccatgctgtgccctttgccacccccagcgtggtgcccggcctggaccccggcacccagaccagcagccaggagttcctggtgcccaatgacctgattggctgtgtgattggccggcagggcagcaagatcagcgagatccggcagatgtctggggcccacatcaagattggcaaccaggccgagggcgctggggagcggcacgtgaccatcaccggcagccctgtgtccatcgccctggcccagtacctgatcacagcctgcctggagacagccaagagcaccagcggcggcacccccagcagcgccccagctgacctgcctgcccccttcagcccccccctgacagccctgcccacagcccctcctggcctgctgggcaccccctatgccatcagcctgagcaacttcatcggcctgaagcccatgcccttcctggccctgcccccagccagccctggccccccacctggcctggccgcctacacagccaagatggccgccgccaacggcagcaagaaggccgagcggcagaagttcagcccctactag

SEQ ID NO: 279499 - DNA, 1212 bp, Artificial Sequence
  derived and/or modified sequence
atgagcggcagcgacggcggcctggaggaggagcccgagctgagcattaccctgacattaaggatgctgatgcatgggaaggaggtcggctctatcataggcaagaaaggcgagacagttaagaggattcgagagcagagttctgcgaggattactatttccgagggttcctgccccgagagaatcactaccataaccgggtccacagcagccgtctttcatgcagtgtctatgatcgccttcaaactggatgaagacttgtgtgcagcaccggctaacggaggaaatgtgtctaggccacctgtgactctgcgcctggtgataccagcctctcagtgcggctcattgataggtaaggcaggcactaaaatcaaggaaatccgagagacaaccggtgctcaggtacaggtagccggtgaccttctccctaacagtacagaacgcgccgtgacagtcagtggggttccagacgcgattattctctgcgtccgacaaatatgcgcggtaatactggaatctccgcccaaaggcgctactattccataccacccctcacttagccttgggaccgtgctgctcagcgcgaatcagggctttagcgtccagggccaatatggggcagttactccggccgaggtgaccaaacttcagcagctgtcgagtcatgcagtgccgtttgccactccctctgtagtccccggattagaccctgggactcagacatcctcccaggagtttcttgtacctaacgatttgataggttgtgtgattggccggcagggctcaaagatcagcgagataaggcagatgagtggcgcacacataaagatcggaaaccaggccgagggtgccggagagaggcatgtgacaatcaccggcagccctgtgagtatcgctctggcgcagtacctgataacagcgtgtctggaaacagccaagtcgacgagtggcggtaccccttcttcagctccagccgatctcccagcgcccttcagccctcccctcacggctcttcccaccgcccccccagggctcctgggaacaccatacgcaatatcactatcgaactttatcgggttgaagccgatgccgtttctggctctgccacccgcgtcacccgggcccccacccgggctggcagcatatacagctaagatggccgccgcaaacggatctaagaaagctgagcggcagaagtttagcccgtattag

SEQ ID NO: 279500 - DNA, 1212 bp, Artificial Sequence
  derived and/or modified sequence
atgagcggcagcgacggcggcctggaggaggagcccgagctgagcatcaccctgacactgcggatgcttatgcatgggaaagaggtagggagtatcattggcaaaaaaggggaaaccgttaagcgaattcgagaacagtccagcgctcggataactattagcgaggggagctgtccagagcgaattactactatcaccggatccactgccgccgtcttccacgctgtgtccatgatcgcctttaaattagatgaagacttgtgtgctgctcctgcaaatgggggaaatgtgtctaggccccctgtgactctccggctagtgattccagcctcccaatgtggatctttgatcggcaaagccggaaccaagataaaagaaatacgtgaaacgacgggcgcccaggtccaagtggctggcgacctgctgccgaacagcacggagcgggcggtcaccgtatctggcgtgcctgacgctattatcttgtgtgtcaggcaaatttgcgcagttatcctcgagtcgcctcctaagggcgccacaatcccgtaccatccgtcgttaagcttaggtaccgttctgttatccgcgaatcagggcttttcagtacaaggccaatatggcgcagttacccccgccgaagtaacgaagctccaacagctgagttctcatgcagtcccctttgccaccccttctgtggtgcctggcctcgatcccggcacccagacatcctctcaggagttcctcgtacctaacgacttgataggatgtgtcattggacgccaaggttcaaaaattagcgaaataaggcagatgagtggtgcccatattaagatcgggaatcaggcagaaggggctggagagagacatgtcacgatcactgggtcccctgtgagcatcgccctcgctcagtatcttataactgcttgtctggagacagccaagtctacctctgggggaacaccttcctccgctcctgcagacctccccgctccgttcagtccaccactaacagccctcccgacagcgccacccggactgcttggcactccatatgccatcagtctgagtaactttatcggcctcaagccgatgccttttctagccctcccccccgcttcccctggacctccacctggactggctgcctataccgccaaaatggccgcagctaatggaagcaaaaaggcggaacggcagaagtttagtccctattag

SEQ ID NO: 279501 - DNA, 1212 bp, Artificial Sequence
  derived and/or modified sequence
atgagcggcagcgacggcggcctggaggaggagcccgagctgagcattaccctgactctacggatgctgatgcatggcaaagaagtgggctccatcattgggaaaaagggcgagacagtgaaacggatccgtgagcaaagctcagcccggatcacaattagtgaggggtcgtgccccgagagaatcaccactatcacaggatctacggccgcggtgtttcatgcagtttcaatgattgcatttaaactggacgaagacctgtgcgccgccccagcgaatggaggcaatgtatcccggccacccgtgactttgaggcttgttatcccagccagtcaatgcgggagtctcattggaaaggcaggaacaaaaattaaggaaattagagaaactacaggtgctcaggtgcaggtagccggcgacttgctccccaactccacagaacgggcagtaactgtttcgggggtgccagatgcaataatcctttgcgtgcgacagatctgcgcagtgattctggagtcgcctcccaagggagctaccattccatatcatccttcactgtcccttggtactgtgcttttgagtgccaaccaaggcttcagtgtacagggccaatatggcgcagttacacccgccgaggtgaccaagctgcagcagctgagtagtcatgctgtcccgtttgccactcctagtgtggtgcccgggttggatcctggtacacaaacgtcaagccaggaatttttagtgcccaacgacctaatcggatgcgtgattggtcggcaaggtagcaaaatctctgaaattcggcaaatgtccggggctcacataaagattgggaatcaggccgaaggcgcgggtgaacggcacgtcacgatcaccggaagccctgtgtccattgccttagcccagtacctgatcacggcgtgcctcgaaacagccaaatctacatcaggcggaacaccaagttccgcgcccgcagatcttccagcccccttttcgcctccattgactgccctgcctactgctccccctggcctcctggggacaccttacgcaatctcccttagtaattttattgggctcaagccaatgccatttctggcattgccaccagctagccccgggccccctcccggactcgcggcatacactgctaaaatggctgctgccaacggatccaagaaggctgagcggcagaagttcagcccttactag

SEQ ID NO: 279502 - DNA, 1212 bp, Artificial Sequence
  derived and/or modified sequence
atgtcaggttccgatggaggcctggaggaggagcctgagctttccatcacactgactctcagaatgcttatgcacggcaaagaagtgggttctattatcggcaagaaaggcgagaccgtcaagcgtatccgcgagcagagtagtgcgcgaatcactatttccgagggctcttgccctgagcggattactacaatcacgggcagtaccgctgcagtgttccatgctgtttcaatgatcgctttcaaactggacgaagatctctgcgccgctccagcaaacggaggcaatgtctctcgcccacctgtgacactgaggctggtgattcccgctagtcaatgtgggtctctcattggaaaagccggaaccaagatcaaggagattagagaaacaactggcgctcaagtgcaggtcgccggagaccttcttcccaactctactgagcgagccgtgactgtttcaggagtacccgacgctatcatcctctgcgtgagacagatctgcgccgtgattcttgaaagccccccaaagggcgctacaatcccctaccacccttctctgagccttgggactgtccttctgtcagccaatcagggattttctgtgcagggtcagtacggtgccgttaccccagcggaagtcaccaagctgcagcagctgtcatcacacgctgtccctttcgctacgccgagcgttgtgccgggactggatcctggaacgcagacgagctctcaggaattcctcgtccccaacgacctgatcggctgtgtaatcggtcgccagggctcaaaaatatctgagatcagacagatgagtggcgcacacataaagataggaaatcaggcagagggagcaggagagcgccatgtgaccattacagggtcccctgtcagcatcgccctggcccaatatctgattaccgcgtgcctggaaactgctaaatctacctcaggtggtacccccagctctgctcccgctgatctgcccgctcctttttcacctcctctgacagcactcccaactgcccctcccggattactgggcactccgtatgccatcagtctgtccaacttcattggactaaagcccatgccctttttagcacttccacccgcttcccccggacccccaccgggactcgccgcttatactgctaaaatggctgccgctaatggcagcaaaaaggctgaacgacagaagttctcaccttactag

SEQ ID NO: 279503 - DNA, 1212 bp, Artificial Sequence
  derived and/or modified sequence
atgtcgggttccgacggcggactggaagaggagccagagctttctattacattgaccctgcgtatgttaatgcatggcaaagaagtgggaagcatcatcggaaagaagggggaaaccgtgaaacgaattcgtgaacagtcttccgcgagaattaccatttccgaaggctcctgccccgagcgcatcactaccataacgggttctaccgccgcagtgtttcacgcagtatccatgatcgctttcaaactggatgaagacctatgcgccgctccggctaacggtggcaacgtcagcagacctcctgtgaccctgcgattagtgattccagccagtcagtgcggaagtctgattggcaaggccggaactaagataaaggaaattagagagactacaggagctcaagtacaagttgctggagacctgctacctaatagcactgagcgcgcagtcaccgtgagcggagtacccgatgcaatcattctgtgtgtgcgacagatctgcgctgttatccttgaaagtccccctaagggagccactattccttatcatcccagtctgagcctcgggactgtcctccttagcgctaatcaaggcttcagcgttcagggacagtatggtgctgtcacgcctgcagaggtgacgaagctccaacagcttagtagccatgctgtcccgtttgcgacccctagcgtggtaccagggctggatcctggaacacagaccagcagtcaagagtttctcgtgcccaatgacttgatcggatgcgtgattggcaggcagggcagcaagatctccgaaatcaggcaaatgagtggagcccatataaagataggaaatcaggcggagggtgcaggcgagagacacgtgaccatcactggttctccagtcagcatcgcattggcacaatatctgatcaccgcctgtctggaaacagccaaatcaacgagtggcggaactcctagtagcgctccggctgatctacccgctccattctccccccctcttacggccctcccaactgctccacccggtctgctgggcactccgtacgcaatcagtctgtcaaacttcattgggttgaaaccaatgccttttctggccctgccacctgcctctcctggtccaccacctggattggccgcttacactgccaagatggctgccgcaaatgggtctaagaaagctgaacgccaaaagttcagcccttactag

SEQ ID NO: 279504 - DNA, 1212 bp, Artificial Sequence
  derived and/or modified sequence
atgagtggcagcgatgggggactggaggaagagccagagctctccattaccctcacactgaggatgctgatgcatgggaaggaagttggctccattatcggcaaaaagggagagactgtgaagcggattagagaacagtctagcgcgagaattaccatctctgagggctcctgccccgagagaattaccaccattaccgggagtacggctgccgtgtttcacgctgtttccatgattgcttttaaacttgacgaggacctctgtgcagctccggctaacgggggaaatgtgagcagacctcctgtgaccctgaggctggttatccctgcaagccagtgtggatccctgattgggaaggccggtacaaagattaaggaaattagggagacaactggcgctcaggtgcaggtagcgggagatttattacccaactccactgaacgggctgtaaccgtgagcggcgtacccgatgccattatcctttgcgtcaggcagatctgtgcggtgatactcgaatctccgccaaagggagctacaatcccttatcatccctctctgagtctcgggaccgttctgctcagcgctaatcagggattctcagtacagggacagtacggggctgtcaccccggctgaagttacaaagttgcagcaactatctagccacgccgttccattcgctactcctagtgtcgtgcctggactggatccaggaactcagaccagctctcaggagttcttggtccccaacgacctgattggatgcgttatcggccgacagggaagtaaaatatccgaaataagacagatgagcggggcacatattaagattggtaaccaggctgagggggctggcgaacgtcatgttacaattacaggcagccccgttagcattgctctcgctcagtacctgattaccgcatgtttggagaccgccaagtcgacttccgggggtacccctagcagcgcccctgcagatctgcctgcccctttctcccctcctctcactgcactcccaactgctcccccaggcctgctcggcactccgtacgcaatctccctgtcaaattttattggactgaaaccaatgcctttcctggcactccccccagcatcccctggtccgcctcctgggctggccgcttatacagctaagatggcagcagccaacggaagtaagaaggccgaaaggcagaagtttagtccatactag

SEQ ID NO: 279505 - DNA, 1212 bp, Artificial Sequence
  derived and/or modified sequence
atgagcggcagcgacggcggcctggaggaggagcccgagctgagcatcaccctgaccctgagaatgctgatgcacggcaaggaggtgggcagcatcatcggcaagaagggcgagaccgtgaagagaatcagagagcagagcagcgccagaatcaccatcagcgagggcagctgccccgagagaatcaccaccatcaccggcagcaccgccgccgtgttccacgccgtgagcatgatcgccttcaagctggacgaggacctgtgcgccgcccccgccaacggcggcaacgtgagcagaccccccgtgaccctgagactggtgatccccgccagccagtgcggcagcctgatcggcaaggccggcaccaagatcaaggagatcagagagaccaccggcgcccaggtgcaggtggccggcgacctgctgcccaacagcaccgagagagccgtgaccgtgagcggcgtgcccgacgccatcatcctgtgcgtgagacagatctgcgccgtgatcctggagagcccccccaagggcgccaccatcccctaccaccccagcctgagcctgggcaccgtgctgctgagcgccaaccagggcttcagcgtgcagggccagtacggcgccgtgacccccgccgaggtgaccaagctgcagcagctgagcagccacgccgtgcccttcgccacccccagcgtggtgcccggcctggaccccggcacccagaccagcagccaggagttcctggtgcccaacgacctgatcggctgcgtgatcggcagacagggcagcaagatcagcgagatcagacagatgagcggcgcccacatcaagatcggcaaccaggccgagggcgccggcgagagacacgtgaccatcaccggcagccccgtgagcatcgccctggcccagtacctgatcaccgcctgcctggagaccgccaagagcaccagcggcggcacccccagcagcgcccccgccgacctgcccgcccccttcagcccccccctgaccgccctgcccaccgccccccccggcctgctgggcaccccctacgccatcagcctgagcaacttcatcggcctgaagcccatgcccttcctggccctgccccccgccagccccggccccccccccggcctggccgcctacaccgccaagatggccgccgccaacggcagcaagaaggccgagagacagaagttcagcccctactag

SEQ ID NO: 279506 - DNA, 1134 bp, Artificial Sequence
  derived and/or modified sequence
atgagcggcagcgacggcggcctggaggaggagcccgagctgagcatcaccctgaccctgagaatgctgatgcacggcaaggaggtgggcagcatcatcggcaagaagggcgagaccgtgaagagaatcagagagcagagcagcgccagaatcaccatcagcgagggcagctgccccgagagaatcaccaccatcaccggcagcaccgccgccgtgttccacgccgtgagcatgatcgccttcaagctggacgaggacctgtgcgccgcccccgccaacggcggcaacgtgagcagaccccccgtgaccctgagactggtgatccccgccagccagtgcggcagcctgatcggcaaggccggcaccaagatcaaggagatcagagagaccaccggcgcccaggtgcaggtggccggcgacctgctgcccaacagcaccgagagagccgtgaccgtgagcggcgtgcccgacgccatcatcctgtgcgtgagacagatctgcgccgtgatcctggagagcccccccaagggcgccaccatcccctaccaccccagcctgagcctgggcaccgtgctgctgagcgccaaccagggcttcagcgtgcagggccagtacggcgccgtgacccccgccgaggtgaccaagctgcagcagctgagcagccacgccgtgcccttcgccacccccagcgtggtgcccggcctggaccccggcacccagaccagcagccaggagttcctggtgcccaacgacctgatcggctgcgtgatcggcagacagggcagcaagatcagcgagatcagacagatgagcggcgcccacatcaagatcggcaaccaggccgagggcgccggcgagagacacgtgaccatcaccggcagccccgtgagcatcgccctggcccagtacctgatcaccgcctgcctggagaccgccaagagcaccagcggcggcacccccagcagcgcccccgccgacctgcccgcccccttcagcccccccctgaccgccccccagctgcccctggcctgctgggcccaccccatgcccagccccagccccaccagcagcgcccaggcccacgccctgctgggcttcaccacctgcttccccagagccgccgccggcctgtag

SEQ ID NO: 279507 - DNA, 1275 bp, Artificial Sequence
  derived and/or modified sequence
atgcccagatgccccgccctgatcctgtacctgcagagcagcgccagaatcaccatcagcgagggcagctgccccgagagaatcaccaccatcaccggcagcaccgccgccgtgttccacgccgtgagcatgatcgccttcaagctggacgaggacctgtgcgccgcccccgccaacggcggcaacgtgagcagaccccccgtgaccctgagactggtgatccccgccagccagtgcggcagcctgatcggcaaggccggcaccaagatcaaggagatcagagaggtgagaggcgagatctaccacccccagggcatcagaggcaagggcgccgtggtgagaggcgtgctgggcctgtggagacccccccacctggagagcagcgagcccggccagcccttcagcggcctgtgggagcagcccgaggtggcccccgtgctgtgcctgcagaccaccggcgcccaggtgcaggtggccggcgacctgctgcccaacagcaccgagagagccgtgaccgtgagcggcgtgcccgacgccatcatcctgtgcgtgagacagatctgcgccgtgatcctggagagcccccccaagggcgccaccatcccctaccaccccagcctgagcctgggcaccgtgctgctgagcgccaaccagggcttcagcgtgcagggccagtacggcgccgtgacccccgccgaggtgaccaagctgcagcagctgagcagccacgccgtgcccttcgccacccccagcgtggtgcccggcctggaccccggcacccagaccagcagccaggagttcctggtgcccaacgacctgatcggctgcgtgatcggcagacagggcagcaagatcagcgagatcagacagatgagcggcgcccacatcaagatcggcaaccaggccgagggcgccggcgagagacacgtgaccatcaccggcagccccgtgagcatcgccctggcccagtacctgatcaccgcctgcctggagaccgccaagagcaccagcggcggcacccccagcagcgcccccgccgacctgcccgcccccttcagcccccccctgaccgccctgcccaccgccccccccggcctgctgggcaccccctacgccatcagcctgagcaacttcatcggcctgaagcccatgcccttcctggccctgccccccgccagccccggccccccccccggcctggccgcctacaccgccaagatggccgccgccaacggcagcaagaaggccgagagacagaagttcagcccctactag

SEQ ID NO: 279508 - DNA, 1134 bp, Artificial Sequence
  derived and/or modified sequence
atgtccggcagcgatgggggcctagaggaagaaccagaactgtctatcactctaactctccggatgctgatgcatgggaaggaagtaggttcaattatcggtaagaagggggagactgtcaagaggatcagagagcagagcagtgcccgcataactatctcagagggttcatgcccagaaagaatcaccaccatcacaggctcaacagctgctgtgtttcatgcagtttccatgatagcattcaagctggatgaagacctgtgcgccgcccctgctaatggcggtaatgtttccaggccgccagtcacactgagactagttattccggcgtctcagtgtggatccctgattggaaaagcgggtactaaaatcaaggagattcgggagaccaccggcgcccaagtccaagtcgcaggcgatttactgcccaacagcacagagcgggcagtcaccgtctcaggagtgcccgacgcgattatcttgtgtgtgaggcagatatgcgcagtgattttagagtcaccccccaaaggagctacaatcccctatcacccgtccttgtcattagggacggtcttgctttctgccaaccaaggcttcagcgtacaagggcagtatggagcagtgacacctgcagaggtgaccaaacttcaacaattatcttcacatgcggttcccttcgcgaccccttccgttgtccctggcttagatccgggaacacagacttcctcccaagagttcctggtgccaaatgatctgatcgggtgcgtcatagggcgccaggggagcaagataagtgaaataagacagatgtccggcgcccacataaagatcggtaatcaggccgagggtgctggagagcgacatgtgacgatcacaggatctccagtttctatagcactggctcaatacctcattactgcttgcctggaaaccgccaagtccacctccggtggaacgccatcaagcgcacccgccgacctcccagctcccttctcaccccccttaaccgctcctcagctgcccctcgcatgttgggctcaccccatgccttctcctagccccacaagttcagctcaagctcatgccctgctggggttcacgacctgttttccaagagctgccgccggtctctag

SEQ ID NO: 279509 - DNA, 1275 bp, Artificial Sequence
  derived and/or modified sequence
atgccgaggtgccccgcactgatcctttatcttcagagcagcgctaggattacaatttccgagggcagttgtcccgagcggatcaccactatcaccggctcaacggctgctgtcttccacgcagttagtatgatcgctttcaaacttgacgaggacctgtgtgctgccccagcgaacggcggaaacgtctcacggccaccagtaacactacgtctcgtgatcccagcctcacagtgcggcagcctcataggaaaagcaggtacgaagattaaggagatacgggaagttaggggtgaaatataccaccctcagggcatccgcggcaaaggggcggtcgtgagaggggttttggggttgtggagaccaccacatctcgagagcagcgagcccggacagcctttttctgggctttgggagcagcctgaagttgcccccgtgctgtgtctccaaaccaccggggcccaggtgcaggtggccggggacctcttgccgaacagcactgagcgcgcagtcacggtgtcgggcgtccccgacgcgatcatcctttgtgtgaggcagatctgtgcagtcatattggaatcaccccctaagggagctactattccttaccatccttcactgtccctggggacggtgctgctgagtgctaatcaggggttcagtgtccagggacaatacggcgcggtgacccctgccgaagtcacaaagctgcagcaactgtctagccacgccgtaccctttgcaaccccctccgtagtacctggcttagacccaggaactcagacatcttcacaggaatttctcgtaccaaatgatctcataggatgtgtgatagggcgccagggaagcaagatttcagagataaggcagatgagtggagctcacatcaagatcgggaatcaagctgagggagccggtgaacgccacgtgactattactggctctcccgtgtctatcgcgctagcccagtatctgataaccgcctgcctggagactgcgaagagcacgtctggcggtaccccttccagtgctcctgccgatttgccagccccgttctcgccgccgcttaccgcactgccgactgctccgccgggcctattgggaaccccatacgccatcagtttgtccaatttcatcggcctcaaacctatgccttttctcgctctgccacctgcctctcctgggcctcctccggggcttgcggcttatacggcaaagatggccgccgccaatggatctaaaaaagccgagcggcagaagttctcaccctactag

SEQ ID NO: 279510 - DNA, 1134 bp, Artificial Sequence
  derived and/or modified sequence
atgagcggcagtgatggcggcctggaggaggagcctgagctgagcatcaccctgaccctgaggatgctgatgcacggcaaggaggtgggcagcatcatcggcaagaagggggagaccgtgaagaggatccgggagcagagcagcgcccgcatcaccatcagcgagggcagctgcccagagcgcatcaccaccatcaccggcagcacagctgctgtgttccacgctgtgtccatgattgccttcaagctggatgaggacctgtgtgccgccccagccaatggaggaaatgtgtcccggccccctgtgaccctgcggctggtgatcccagccagccagtgtggcagcctgattggcaaggccggcaccaagatcaaggagatccgggagaccactggagcccaggtgcaggtggccggggacctgctgcccaacagcacagaaagagctgtgacagtgtctggagtgcctgatgccatcatcctgtgtgtgcggcagatctgtgccgtcatcctggagagcccccccaagggggccaccatcccctaccaccccagcctgagcctgggcaccgtgctgctgagcgccaaccagggcttctctgtgcagggccagtatggagctgtgaccccagctgaggtgaccaagctgcagcagctgagcagccatgctgtgccctttgccacccccagcgtggtgcccggcctggaccccggcacccagaccagcagccaggagttcctggtgcccaatgacctgattggctgtgtgattggccggcagggcagcaagatcagcgagatccggcagatgtctggggcccacatcaagattggcaaccaggccgagggcgctggggagcggcacgtgaccatcaccggcagccctgtgtccatcgccctggcccagtacctgatcacagcctgcctggagacagccaagagcaccagcggcggcacccccagcagcgccccagctgacctgcctgcccccttcagcccccccctgacagccccccagctgcccctggcctgctgggcccaccccatgcccagccccagccccaccagcagcgcccaggcccacgccctgctgggcttcaccacctgcttccccagggctgctgctggcctgtag

SEQ ID NO: 279511 - DNA, 1275 bp, Artificial Sequence
  derived and/or modified sequence
atgccccgctgcccagccctgatcctgtacctgcagagcagcgcccgcatcaccatcagcgagggcagctgcccagagcgcatcaccaccatcaccggcagcacagctgctgtgttccacgctgtgtccatgattgccttcaagctggatgaggacctgtgtgccgccccagccaatggaggaaatgtgtcccggccccctgtgaccctgcggctggtgatcccagccagccagtgtggcagcctgattggcaaggccggcaccaagatcaaggagatccgggaggtgcggggggagatctaccacccccagggcatccggggcaaaggagctgtggtgcggggcgtgctgggcctgtggaggcctccccacctggagagcagcgagcccggccagcccttcagcggcctgtgggagcagcctgaggtggcccctgtgctgtgcctgcagaccaccggggcccaggtgcaggtggccggggacctgctgcccaacagcacagaaagagctgtgacagtgtctggagtgcctgatgccatcatcctgtgtgtgcggcagatctgtgctgtgatcctggagagcccccccaagggggccaccatcccctaccaccccagcctgagcctgggcaccgtgctgctgagcgccaaccagggcttctctgtgcagggccagtacggggctgtgaccccagctgaggtgaccaagctgcagcagctgagcagccatgctgtgccctttgccaccccatctgtggtgcccggcctggaccccggcacccagaccagcagccaggagttcctggtgcccaatgacctgattggctgcgtcatcggccggcagggcagcaagatcagcgagatccggcagatgtctggggcccacatcaagattggcaaccaggccgagggcgctggggagagacatgtgaccatcaccggcagccctgtgtccatcgccctggcccagtacctgatcacagcctgcctggagacagccaagagcaccagcggcggcacccccagcagcgccccagctgacctgcctgcccccttcagcccccccctgacagccctgcccacagcccctcctggcctgctgggcaccccctatgccatcagcctgagcaacttcatcggcctgaagcccatgcccttcctggccctgcccccagccagccctggccccccacctggcctggccgcctacacagccaagatggctgctgccaacggcagcaagaaggccgagcggcagaagttcagcccctactag

SEQ ID NO: 279512 - DNA, 1134 bp, Artificial Sequence
  derived and/or modified sequence
atgagcggcagcgacggcggcctggaggaggagcccgagctgagcatcactctgacgctgagaatgctgatgcatggaaaggaagtaggcagcataataggtaagaaaggagaaactgtgaagcgcatcagagagcaaagctctgcccggattactatcagtgaagggagttgtcccgaacgcatcactaccattacaggatccacagcagccgtgtttcatgcagtctccatgatcgcgtttaagcttgatgaagatctgtgtgctgctccggctaatggaggaaatgtcagtaggccaccagtgactttgaggctcgttatcccggcatcccaatgcggcagcctcatcggaaaggctggtacaaaaattaaggaaatacgcgaaaccacaggagctcaggtccaggtcgccggcgacctactgcccaacagtaccgagcgagctgtcaccgtttctggtgtgccggatgcaatcattctttgcgttaggcagatctgtgccgtaatccttgagtcccctccaaaaggtgccacaatcccctatcatcccagcctcagcctgggaacggtgcttctctccgccaatcagggatttagcgtgcagggtcagtacggcgccgttacacccgcggaggttacgaaactacagcagctttcttcacacgctgtgccatttgccaccccatctgtggtccctggcctagacccaggcacccagacctccagccaggagttcctcgttcctaatgaccttattggttgcgtgatcggtaggcaagggtctaaaatttcggagattagacaaatgagtggagctcatatcaaaatcggtaaccaagccgaaggggcaggcgagagacatgtaacaattactggtagtcccgtatctatcgctctcgctcaatatttgatcactgcttgtctggagacagccaagtctacatccggtggcaccccgtcgtccgctccagctgacctgccagccccctttagtcctcccttgacagctccgcagctgcctctcgcttgttgggcccaccctatgccttcccccagtcctacctctagcgcacaagcgcacgccttgctcggcttcaccacttgctttcctcgcgccgccgcggggttgtag

SEQ ID NO: 279513 - DNA, 1275 bp, Artificial Sequence
  derived and/or modified sequence
atgccccggtgccccgccctgatcctgtacctgcagagcagcgccagaattacaatctcagaggggagttgcccggaacggatcaccaccatcactgggagcaccgccgccgttttccacgccgttagcatgattgcattcaagctggatgaggacttgtgcgccgcaccggctaacggaggcaatgtcagtcggccacctgtcaccctgaggctggtaatccccgcgtcccagtgcggctcgctgatcgggaaggcaggtactaagatcaaggaaattagggaagtcaggggtgaaatctatcacccacagggtatcagaggcaaaggtgcagtagttcgaggcgtgcttggcctttggcgccccccacatctggagagcagtgaaccaggacagccctttagcggactctgggaacagcctgaggtcgcgccagtgctgtgcttacagaccaccggagcacaggtccaggtagctggagatcttctgccaaactccaccgagagggcagtgaccgtgtcgggggtaccagatgcgattatcctgtgtgtgcgacagatctgtgctgtgatactcgagagccctccgaaaggcgctacaattccctaccacccctctctgtcccttggcacagtgcttctgagcgccaatcagggattttcagtgcaaggccagtatggtgccgtaactccagccgaagtgacaaaactgcaacagctgtcctcccatgctgttcccttcgcaacgcccagcgtggtgccgggtctagaccccggaacacagacgtctagtcaggaattcctcgtgccaaacgacctgataggctgtgtgatagggcggcagggttccaagatttcagagatacggcagatgtccggcgctcacatcaagattggcaaccaggctgaaggtgccggcgagcggcacgtcacaataactgggtctccagtaagtatcgcgctggcccaatacctcatcacggcctgtttggagaccgcaaaaagtaccagtggcgggaccccaagcagtgcccccgccgacctgcctgcccccttttctcctcctctcacggccctccctaccgcccccccaggactacttggcaccccctacgcaatctctctgtcaaattttatcgggctaaagcccatgccttttttggcactccctccagcgagtcctggacccccccctggcctcgccgcctacaccgccaaaatggccgccgccaacggaagcaaaaaggcagagcgacagaaattctccccatactag

SEQ ID NO: 279514 - DNA, 1876 bp, Artificial Sequence
  derived and/or modified sequence
atgccccgctgcccggcgctcattctatatctgcagagcagtgcccggatcaccatctccgagggctcctgccctgaacgcatcaccaccatcaccgggtctacagcagctgtcttccatgcagtctccatgattgctttcaaactggatgaggacctttgtgctgctcctgcaaatggtggaaatgtctccaggcctccagtgaccctgcgccttgtcatccctgccagtcagtgtggctcactgattgggaaggctggcaccaagatcaaggagatccgagaggtgaggggcgagatataccacccacagggaatccggggcaagggagcagttgtaagaggggtgttgggcttatggcgtcctccccacctagagagctctgagcctgggcagcccttttctgggttatgggagcagccagaagtggcccctgttctctgtttgcagactacgggtgcccaggtacaggtggcaggggacctgctccccaactccacagagcgagctgttacggtatctggggtgcctgatgccatcatcctgtgtgtgcgccagatctgcgctgttatcctggagtccccacccaaaggagccactatcccctaccatccgagcctctccctaggtactgttcttctctctgccaaccagggcttctctgtccagggtcagtatggggctgtgaccccagctgaggtcaccaagctccagcagctctcaagccatgcggtcccctttgccacacccagcgtggtgccaggactggatcccggcacacagaccagctcacaggagttcttggttcccaacgatttgattggctgtgtgatcgggcgccagggcagcaagatcagcgagatccggcagatgtcaggggcacatatcaagatcgggaaccaagcagagggcgctggggagcggcatgtcaccatcactggctctccggtctccatcgccctggcccagtacctcatcactgcctgtctagagacggccaagtctacctctggggggacgcccagctcggcccccgcagacctgcctgcccccttctcgccacccctgacggccctgcccacagctccccctggcctgctgggcacaccctatgccatctccctctccaacttcatcggcctcaagcccatgcccttcttggctttaccacctgcttccccagggccgccgccgggcttggcggcctacactgccaagatggcagcagctaatgggagcaagaaggctgagcggcagaaattctccccctactgaggccagctgaggtacaggcaggggcaggcaggaccaccagcagggggctgcctctgcaccctacccgcccaaggagactccaccctggggtcccaaacgccgctaacgcccagacgcatggatgcaccccctaccctgcctccatctatgggagttctttctctcagagtgggggcagtttctggcccaggggtctgagctgcggcagccccagggcagggggccctacctcctcagctctgtgcttggatacagggagcagccaggagactccctagtgcccccaccatggcgggtgtcactcacgcactccccatcccttagggcttcctggcctactgcatccttgtgggagtcagggaggagggcccgttgggtagctggggccaggcttctctccccaccacctgcagatttcttgctgcttccactgatacccttttgactggaatgaactggctgggcttgtcagggggcaccccaaagagggggcactgccaggtagctgggggagtggcatggggcaggggcccagttctcagcagcagacactctgtacagttttttcaatccctgtttttgaataaatattctcagcgac

SEQ ID NO: 279515 - DNA, 1134 bp, Artificial Sequence
  derived and/or modified sequence
atgtctgggtctgacggaggactcgaggaagaaccagagctttctattaccctgaccttacgtatgttgatgcacgggaaagaagtagggtctataattgggaagaagggcgagacagtgaagcgtatccgcgaacaaagttctgccaggataaccatcagtgaggggtcatgccccgaacgcataaccaccattaccggtagcactgctgccgtgttccatgcggtttcaatgattgcgtttaagctcgatgaagacctctgcgccgcaccagccaacgggggtaatgtcagccgaccacctgtgacgctgcggctggttattcccgctagccaatgtggatctctgattgggaaggccggtacaaagatcaaggaaatcagagagaccacaggtgcccaagtgcaagtcgcaggcgacctcttacctaactcaactgagcgtgcagtcaccgtatcaggcgtcccagacgcgataattctgtgcgttaggcagatctgcgctgttatcctggaatctccaccaaagggtgctaccattccctatcacccgtcccttagtctcggcaccgtgctcttgtcagctaaccagggattttccgtgcaggggcagtacggggcagtaaccccagccgaagttactaaactccaacagctgagttcccatgccgtgccattcgccactccctccgtcgtgccaggcttagacccaggcactcaaacgtcatcccaggaatttctggtacccaacgatctcattggttgcgtcattgggcgacagggttctaagatcagcgaaattcgacagatgtccggagcccacattaaaattggtaaccaggctgagggagccggagagcgtcatgttacaattaccgggtcgcctgtctcgatcgcactggcccagtacctgattaccgcatgcctggagactgctaaatccacatcaggcggtactccgagtagcgcgccagccgatctgcccgctcctttttcccccccacttaccgcccctcaactgccccttgcttgctgggcccatccgatgccaagcccctccccaaccagctccgcccaggcacatgcgctgctcggtttcaccacctgtttcccgagagcagctgccggactgtag

SEQ ID NO: 279516 - DNA, 1275 bp, Artificial Sequence
  derived and/or modified sequence
atgccacgctgtcccgctctcatactctaccttcagtcctctgcacggatcactatttctgaggggtcttgtcccgagagaattacaaccattaccggctcaacagcagcggtgttccacgcagtttctatgatcgcatttaagctcgatgaggacctgtgcgccgctcccgcaaatgggggaaatgttagcaggccccctgtgaccctcaggctggtaatccctgctagccagtgtggatccctaatcgggaaggcgggaaccaagatcaaggagataagggaagtgcggggagagatctaccatccacagggtatcaggggcaaaggtgctgtggtgcgaggagttttaggactgtggcgccctcctcacttagagagttccgaacccggtcagcccttctcgggtttgtgggagcagccagaagtggcacccgttctatgtctgcaaacaactggagctcaggtgcaggtggccggagatctcctcccgaattcaactgagcgggctgtgaccgttagtggcgtccccgacgcgataatactctgcgtccgccagatatgcgctgtaattcttgagtcccctcctaagggagccaccatcccataccatccaagcctgtcactcggtacagtgcttttgagtgccaaccagggtttctccgtacaggggcagtatggagcagtcaccccggctgaggtgaccaagctgcagcaattaagtagccatgctgttccattcgcaaccccatcagtggtgcctggcctcgacccaggcacccaaacatccagtcaagagttcctggtgcctaatgatttgataggctgcgtcatcggcagacaaggttccaagatttcggagatcaggcaaatgtccggggcacatatcaagatcggaaatcaggcagagggtgctggggagcgccatgtgacaataaccggcagccctgtcagcatagcacttgctcagtatctaatcacggcctgtctcgaaacggcaaagagtacaagcggaggaacgccctcatctgcgcctgctgacttacctgcaccattctcccctcccctgactgctctccctacagcaccacccggactcctcggtaccccatacgctatctcgctctctaacttcattggtttgaaacctatgccattcttggccctcccccctgcctcccccggtcctcctcctgggctcgccgcttataccgctaaaatggcggctgctaacggctccaaaaaagctgagagacagaaattttcaccctactag

SEQ ID NO: 279517 - protein, 243 aa, Artificial Sequence
  derived and/or modified sequence
MIAFKLDEDLCAAPANGGNVSRPPVTLRLVIPASQCGSLIGKAGTKIKEIREVTKLQQLSSHAVPFATPSVVPGLDPGTQTSSQEFLVPNDLIGCVIGRQGSKISEIRQMSGAHIKIGNQAEGAGERHVTITGSPVSIALAQYLITACLETAKSTSGGTPSSAPADLPAPFSPPLTALPTAPPGLLGTPYAISLSNFIGLKPMPFLALPPASPGPPPGLAAYTAKMAAANGSKKAERQKFSPY

SEQ ID NO: 279518 - protein, 360 aa, Artificial Sequence
  derived and/or modified sequence
MSGSDGGLEEEPELSITLTLRMLMHGKEVGSIIGKKGETVKRIREQSSARITISEGSCPERITTITGSTAAVFHAVSMIAFKLDEDLCAAPANGGNVSRPPVTLRLVIPASQCGSLIGKAGTKIKEIRESPPKGATIPYHPSLSLGTVLLSANQGFSVQGQYGAVTPAEVTKLQQLSSHAVPFATPSVVPGLDPGTQTSSQEFLVPNDLIGCVIGRQGSKISEIRQMSGAHIKIGNQAEGAGERHVTITGSPVSIALAQYLITACLETAKSTSGGTPSSAPADLPAPFSPPLTALPTAPPGLLGTPYAISLSNFIGLKPMPFLALPPASPGPPPGLAAYTAKMAAANGSKKAERQKFSPY

SEQ ID NO: 279519 - protein, 124 aa, Artificial Sequence
  derived and/or modified sequence
MSGSDGGLEEEPELSITLTLRMLMHGKEVGSIIGKKGETVKRIREQSSARITISEGSCPERITTITGSTAAVFHAVSMIAFKLDEDLCAAPANGGNVSRPPVTLRLVIPASQCGSLIGKAGTKI

SEQ ID NO: 279520 - protein, 92 aa, Artificial Sequence
  derived and/or modified sequence
MSGSDGGLEEEPELSITLTLRMLMHGKEVGSIIGKKGETVKRIREQSSARITISEGSCPERITTITGSTAAVFHAVSMIAFKLDEDLCAAPA

SEQ ID NO: 279521 - protein, 107 aa, Artificial Sequence
  derived and/or modified sequence
MSGSDGGLEEEPELSITLTLRMLMHGKEVGSIIGKKGETVKRIREQSSARITISEGSCPERITTITGSTAAVFHAVSMIAFKLDEDLCAAPANGGNVSRPPVTLRLV

SEQ ID NO: 279522 - DNA, 2087 bp, Artificial Sequence
  derived and/or modified sequence
ctcattgttcgcagctgatgtcactcgcagttgtgagcggccgcctctcccggggacaatgtgggactgagcggcccagccgccgtgccgccgccgccgccgccgcaggacagccccagcgaggccatttccagcacatagaagagagattggaaaccaacgtgcagaactgccagtcccctgacacgctgtgccccacccactgcagcccagtgctgaatgaaccctgcccagaggtgtctgtagtgagcttctgccctagtgacttttggtaggtgggagtgtgcctcaattcccccctcaacccctgcctcaagcctttaccaggcagtggcaagacctgaccacacccgaggcctccctgccttcaaggcttcccatggctgctccagcttcctccccagctgctcttctgtgctccatccaccatctggctgctggacgaaagtgcctctcatatggaagccggccaggttgcagcgcggacacactcgcaggtcgctgtggccccagcctcgcctgacagaatgagcggctcggacgggggactggaggaggagccagagctcagcatcaccctcacgctgcggatgctgatgcacgggaaggaagtgggcagcatcatcgggaagaagggcgagactgtaaagcgaatccgggagcagtgcccggatcaccatctccgagggctcctgccctgaacgcatcaccaccatcaccgggtctacagcagctgtcttccatgcagtctccatgattgctttcaaactggatgaggacctttgtgctgctcctgcaaatggtggaaatgtctccaggcctccagtgaccctgcgccttgtcatccctgccagtcagtgtggctcactgattgggaaggctggcaccaagatcaaggagatccgagaggtcaccaagctccagcagctctcaagccatgcggtcccctttgccacacccagcgtggtgccaggactggatcccggcacacagaccagctcacaggagttcttggttcccaacgatttgattggctgtgtgatcgggcgccagggcagcaagatcagcgagatccggcagatgtcaggggcacatatcaagatcgggaaccaagcagagggcgctggggagcggcatgtcaccatcactggctctccggtctccatcgccctggcccagtacctcatcactgcctgtctagagacggccaagtctacctctggggggacgcccagctcggcccccgcagacctgcctgcccccttctcgccacccctgacggccctgcccacagctccccctggcctgctgggcacaccctatgccatctccctctccaacttcatcggcctcaagcccatgcccttcttggctttaccacctgcttccccagggccgccgccgggcttggcggcctacactgccaagatggcagcagctaatgggagcaagaaggctgagcggcagaaattctccccctactgaggccagctgaggtacaggcaggggcaggcaggaccaccagcagggggctgcctctgcaccctacccgcccaaggagactccaccctggggtcccaaacgccgctaacgcccagacgcatggatgcaccccctaccctgcctccatctatgggagttctttctctcagagtgggggcagtttctggcccaggggtctgagctgcggcagccccagggcagggggccctacctcctcagctctgtgcttggatacagggagcagccaggagactccctagtgcccccaccatggcgggtgtcactcacgcactccccatcccttagggcttcctggcctactgcatccttgtgggagtcagggaggagggcccgttgggtagctggggccaggcttctctccccaccacctgcagatttcttgctgcttccactgatacccttttgactggaatgaactggctgggcttgtcagggggcaccccaaagagggggcactgccaggtagctgggggagtggcatggggcaggggcccagttctcagcagcagacactctgtacagttttttcaatccctgtttttgaataaatattctcagcgacc

SEQ ID NO: 279523 - DNA, 1876 bp, Artificial Sequence
  derived and/or modified sequence
aacccctcattgttcgcagctgatgtcactcgcagttgtgagcggccgcctctcccggggacaatgtgggactgagcggcccagccgccgtgccgccgccgccgccgccgcaggacagccccagcgagagccggccaggttgcagcgcggacacactcgcaggtcgctgtggccccagcctcgcctgacagaatgagcggctcggacgggggactggaggaggagccagagctcagcatcaccctcacgctgcggatgctgatgcacgggaaggaagtgggcagcatcatcgggaagaagggcgagactgtaaagcgaatccgggagcagagcagtgcccggatcaccatctccgagggctcctgccctgaacgcatcaccaccatcaccgggtctacagcagctgtcttccatgcagtctccatgattgctttcaaactggatgaggacctttgtgctgctcctgcaaatggtggaaatgtctccaggcctccagtgaccctgcgccttgtcatccctgccagtcagtgtggctcactgattgggaaggctggcaccaagatcaaggagatccgagagtccccacccaaaggagccactatcccctaccatccgagcctctccctaggtactgttcttctctctgccaaccagggcttctctgtccagggtcagtatggggctgtgaccccagctgaggtcaccaagctccagcagctctcaagccatgcggtcccctttgccacacccagcgtggtgccaggactggatcccggcacacagaccagctcacaggagttcttggttcccaacgatttgattggctgtgtgatcgggcgccagggcagcaagatcagcgagatccggcagatgtcaggggcacatatcaagatcgggaaccaagcagagggcgctggggagcggcatgtcaccatcactggctctccggtctccatcgccctggcccagtacctcatcactgcctgtctagagacggccaagtctacctctggggggacgcccagctcggcccccgcagacctgcctgcccccttctcgccacccctgacggccctgcccacagctccccctggcctgctgggcacaccctatgccatctccctctccaacttcatcggcctcaagcccatgcccttcttggctttaccacctgcttccccagggccgccgccgggcttggcggcctacactgccaagatggcagcagctaatgggagcaagaaggctgagcggcagaaattctccccctactgaggccagctgaggtacaggcaggggcaggcaggaccaccagcagggggctgcctctgcaccctacccgcccaaggagactccaccctggggtcccaaacgccgctaacgcccagacgcatggatgcaccccctaccctgcctccatctatgggagttctttctctcagagtgggggcagtttctggcccaggggtctgagctgcggcagccccagggcagggggccctacctcctcagctctgtgcttggatacagggagcagccaggagactccctagtgcccccaccatggcgggtgtcactcacgcactccccatcccttagggcttcctggcctactgcatccttgtgggagtcagggaggagggcccgttgggtagctggggccaggcttctctccccaccacctgcagatttcttgctgcttccactgatacccttttgactggaatgaactggctgggcttgtcagggggcaccccaaagagggggcactgccaggtagctgggggagtggcatggggcaggggcccagttctcagcagcagacactctgtacagttttttcaatccctgtttttgaataaatattctcagcgac

SEQ ID NO: 279524 - DNA, 2009 bp, Artificial Sequence
  derived and/or modified sequence
ctttgtccaccaggccagatggagaggaagggagattggattcccctccccacccacacatacccagctgatgtcactcgcagttgtgagcggccgcctctcccggggacaatgtgggactgagcggcccagccgccgtgccgccgccgccgccgccgcaggacagccccagcgagcctctggagtccctgtggcagaactcaaatggaaggaggagcagctgcacccaggggagcagggtgtcacctccgttggatagagccggccaggttgcagcgcggacacactcgcaggtcgctgtggccccagcctcgcctgacagaatgagcggctcggacgggggactggaggaggagccagagctcagcatcaccctcacgctgcggatgctgatgcacgggaaggaagtgggcagcatcatcgggaagaagggcgagactgtaaagcgaatccgggagcagagcagtgcccggatcaccatctccgagggctcctgccctgaacgcatcaccaccatcaccgggtctacagcagctgtcttccatgcagtctccatgattgctttcaaactggatgaggacctttgtgctgctcctgcaaatggtggaaatgtctccaggcctccagtgaccctgcgccttgtcatccctgccagtcagtgtggctcactgattgggaaggctggcaccaagatcaaggagatccgagagtccccacccaaaggagccactatcccctaccatccgagcctctccctaggtactgttcttctctctgccaaccagggcttctctgtccagggtcagtatggggctgtgaccccagctgaggtcaccaagctccagcagctctcaagccatgcggtcccctttgccacacccagcgtggtgccaggactggatcccggcacacagaccagctcacaggagttcttggttcccaacgatttgattggctgtgtgatcgggcgccagggcagcaagatcagcgagatccggcagatgtcaggggcacatatcaagatcgggaaccaagcagagggcgctggggagcggcatgtcaccatcactggctctccggtctccatcgccctggcccagtacctcatcactgcctgtctagagacggccaagtctacctctggggggacgcccagctcggcccccgcagacctgcctgcccccttctcgccacccctgacggccctgcccacagctccccctggcctgctgggcacaccctatgccatctccctctccaacttcatcggcctcaagcccatgcccttcttggctttaccacctgcttccccagggccgccgccgggcttggcggcctacactgccaagatggcagcagctaatgggagcaagaaggctgagcggcagaaattctccccctactgaggccagctgaggtacaggcaggggcaggcaggaccaccagcagggggctgcctctgcaccctacccgcccaaggagactccaccctggggtcccaaacgccgctaacgcccagacgcatggatgcaccccctaccctgcctccatctatgggagttctttctctcagagtgggggcagtttctggcccaggggtctgagctgcggcagccccagggcagggggccctacctcctcagctctgtgcttggatacagggagcagccaggagactccctagtgcccccaccatggcgggtgtcactcacgcactccccatcccttagggcttcctggcctactgcatccttgtgggagtcagggaggagggcccgttgggtagctggggccaggcttctctccccaccacctgcagatttcttgctgcttccactgatacccttttgactggaatgaactggctgggcttgtcagggggcaccccaaagagggggcactgccaggtagctgggggagtggcatggggcaggggcccagttctcagcagcagacactctgtacagttttttcaatccctgtttttgaataaatattctcagcgacca

SEQ ID NO: 279525 - protein, 225 aa, Artificial Sequence
  derived and/or modified sequence
MDLDVVNMFVIAGGTLAIPILAFVASFLLWPSALIRIYYWYWRRTLGMQVRYVHHEDYQFCYSFRGRPGHKPSILMLHGFSAHKDMWLSVVKFLPKNLHLVCVDMPGHEGTTRSSLDDLSIDGQVKRIHQFVECLKLNKKPFHLVGTSMGGQVAGVYAAYYPSDVSSLCLVCPAGLQYSTDNQFVQRLKELQGSAAVEKIPLIPSTPEEMSEMLQLCSYVRFKVP

SEQ ID NO: 279526 - protein, 173 aa, Artificial Sequence
  derived and/or modified sequence
MDLDVVNMFVIAGGTLAIPILAFVASFLLWPSALIRIYYWYWRRTLGMQVRYVHHEDYQFCYSFRGRPGHKPSILMLHGFSAHKDMWLSVVKFLPKNLHLVCVDMPGHEGTTRSSLDDLSIDGQVKRIHQFVECLKLNKKPFHLVGTSMGGQVAGVYAAYYPSDVSSLCLVCP

SEQ ID NO: 279527 - protein, 102 aa, Artificial Sequence
  derived and/or modified sequence
MRRLLEPCWWILFLKITSSVLHYVVCFPALTEGYVGALHENRHGSAVQIRRRKASGDPYWAYSGKSSCSNGDHTGQLTSHSTHLKAHFESLLCLSSVCSNLS

SEQ ID NO: 279528 - DNA, 309 bp, Artificial Sequence
  derived and/or modified sequence
atgcgccgcttgttggagccgtgctggtggattcttttccttaagatcacatcgtcagtcctgcattacgtcgtatgcttccctgcattaacagaaggctacgtgggtgccctccacgaaaaccgacacggcagcgccgtgcaaatccggcgccgcaaagcctcaggagacccatactgggcttactcaggcaagagtagctgcagtaatggcgaccataccggccaactgacctcccattccacacatttaaaggcccacttcgagagcctcctgtgtctatcctctgtctgtagtaatctcagttag

SEQ ID NO: 279529 - DNA, 309 bp, Artificial Sequence
  derived and/or modified sequence
atgaggcggctgctggagccctgctggtggatcctcttcctgaagatcaccagctctgtgctgcactacgtggtgtgcttccctgccctgacagagggctacgtgggcgccctgcacgagaacagacatggcagcgctgtgcagatcagaagaaggaaggccagcggggacccctactgggcctacagcggcaagagcagctgcagcaatggagaccacacaggccagctgaccagccacagcacccacctgaaggcccactttgagagcctgctgtgcctgagctctgtgtgcagcaacctgtcctag

SEQ ID NO: 279530 - DNA, 309 bp, Artificial Sequence
  derived and/or modified sequence
atgcggcggctgctggagccctgctggtggatcctgttcctgaagatcacaagcagcgttcttcactatgtcgtgtgttttcctgcactgactgaagggtatgtaggcgctttgcacgaaaacaggcacggcagcgctgtgcagatcaggaggcgcaaagcaagcggagatccatattgggcttactccgggaagtccagttgctcaaatggagaccataccggacagctgacctcacattctactcatctgaaggctcactttgagtccttgttgtgtttaagctctgtgtgcagcaatttatcctag

SEQ ID NO: 279531 - DNA, 309 bp, Artificial Sequence
  derived and/or modified sequence
atgcggcgactcttggaaccctgctggtggatcttatttttgaagattacctcttccgtactacactacgtggtgtgctttccagcgttgaccgagggttatgtgggggctctccatgaaaaccgccacggctctgcagtccagatccgccgtagaaaagcaagtggtgatccctactgggcttacagtggcaagtcttcatgcagcaacggggaccacaccgggcagctgactagccactctacacatctgaaagcccactttgaatctctgctctgtctatccagtgtgtgcagcaacttgtcttag

SEQ ID NO: 279532 - DNA, 2677 bp, Artificial Sequence
  derived and/or modified sequence
ccagtttccagccccgcgctcttcgttccttcccagcctgcgccggctctcgggctgtgctgcgctgccgactcaagttggggatcctcggctgctcgccgccgccgcccgcggtccctgcctgccccaggcccggggcatcgccgccggccgccgactccgcgccctgcccgatcggctctctcctttttaaacggaaagcagcctttctccgccgagaggatcgtccccagcgtggctctgcgttcccggtcactttttgagattttccggggggcgctcggcggcttcccggattccaaggggactcgggccgccgagcgcggggggcccgtggagcgggcgagccggggaagcgccccggcttagcggaggctcgcacggaggcaagaacttattcaacaagtttacctccctgctttcctcttttcgatgtgcgttttcggacatgcggaggttactggaaccgtgttggtggattttgttcctgaaaatcaccagttccgtgctccattatgtcgtgtgcttccccgcgttgacagaaggctacgttggggccctgcacgagaatagacacggcagcgcagtgcagatccgcaggcgcaaggcttcaggcgacccgtactgggcctactctggtaagtccagttgttctaatggagatcacacaggccagttaacatcccattcaactcacttgaaagcacactttgaatcacttttatgcctgagttctgtttgctcaaatctttcgtagttcactaaaagttgaaatattcgagcctgtttttcctcaaggttataagcaccttaatttatctctaccacctgtttcctcaacctgttttcccctcaatttgcgtttatttctgaactttactgttaatgagttattgtaccaaacttgtaattttctgaaagacgtagtcttgtcttttctgttttttcaggggctgtgatttcagagagcagaaaatatatggctagtcttgagctgctaaatgtctgctaaacattacaaacatcacatatcagaatgctctattaggctctaagccaagaaatgcaactttatttttaaatcacatcttgttctttgaatatattttagctgtctactcgatggtaatctgcagtccttttcatttttatttttacttttacccttttgagctaatgaagggagagagcattgttctaactatgttgaatgttacattgcaaataattttcttacattttaaggggacaaaaatgaagaccgaaaactagggatagacttttctggattaggcttcccaaaactcccaaaatatgagaggtggattgttatttctagaagagatttttgatgctcaaaaatatatggaaaatgtattaaagctaattaaggaatgcttgagtaagatagaccactttggaaattactttggcactgaataattcaaactccttctatgaaagagcttggaggcatggagtattagtcttaataataaatctatgtattatgcaatgttgttgcatatagaactgaaagtattcttttcataatgatgctcgggtttaaatcctgaatttctcccagcaaatcctgttaaatttatgccagtgtaaaatttataggtctgatctttaattataccttatctattggctttttgcatccttttgtctattgataaatctgctgcccctgcagggagaatatcctatctgttttgttttgcagtgaacagatagtgattctgaagttttccatcacacccagtaccttgtgattagaattatctaattagaggctttttgtcaccatttctgataaatgaaggaaattggcagatgaaagccaaaattacatatatatagcatcttgccaagaaacccaaagaaaatttatcattttgtactctgtggctctgacatcagtcaggaggaggcacaaagtggcttgctatttacagttcatcagtttagaataataatgctgttagtcaggaaattggaagttatatcccattagcatgtccaattgcaaatggcagtgaagagatgaaagcccttaaacttttcccattatgtagttaagaatgaccataagtggtgccatctttgtgatggagtgattgttgatgtctttaactttggtagagttcagaagtctccattttgtatttctggaatgcattgtgtctgaatttgggtattgcctccagtagtagaaggactaatggttcaaattcaagagttggcacactttttctgaaaagatccaggtaacaaacatcaaaagccatgtcgtctttgttgcaactgcccaactctgccattgtagcttaaaagtacccactgacaattctggacagactggctgtgctctgataaaaatttacttatgaatactggaatttgaattttataattttcatgtgtcaggaaatattcttcttttgatttttttctcattcattaaaaaatatacaaaccattcttgctttgcaggctgtgcaaaaacaggtggctggttggatagggtccacaggttatatagtttgtgaacccttgttccagttgatttttttcctagaaatcagataggagagtcatttgaggaattgcttggaaggatgtggactggtttggaagactgaatgaagtcatttgttaggcataatgg

SEQ ID NO: 279533 - DNA, 309 bp, Artificial Sequence
  derived and/or modified sequence
atgagaagactgctggagccctgctggtggatcctgttcctgaagatcaccagcagcgtgctgcactacgtggtgtgcttccccgccctgaccgagggctacgtgggcgccctgcacgagaacagacacggcagcgccgtgcagatcagaagaagaaaggccagcggcgacccctactgggcctacagcggcaagagcagctgcagcaacggcgaccacaccggccagctgaccagccacagcacccacctgaaggcccacttcgagagcctgctgtgcctgagcagcgtgtgcagcaacctgagctag

SEQ ID NO: 279534 - protein, 433 aa, Artificial Sequence
  derived and/or modified sequence
MCVDWSNIRQLFSQHRYSTPHAFTFNTSSPSSEGSLSQRQRSTSTPNVHMVSTTLPVDSRMIEDAIRSHSESASPSALSSSPNNLSPTGWSQPKTPVPAQRERAPVSGTQEKNKIRPRGQRDSSYYWEIEASEVMLSTRIGSGSFGTVYKGKWHGDVAVKILKVVDPTPEQFQAFRNEVAVLRKTRHVNILLFMGYMTKDNLAIVTQWCEGSSLYKHLHVQETKFQMFQLIDIARQTAQGMDYLHAKNIIHRDMKSNNIFLHEGLTVKIGDFGLATVKSRWSGSQQVEQPTGSVLWMAPEVIRMQDNNPFSFQSDVYSYGIVLYELMTGELPYSHINNRDQIIFMVGRGYASPDLSKLYKNCPKAMKRLVADCVKKVKEERPLFPQILSSIELLQHSLPKINRSASEPSLHRAAHTEDINACTLTTSPRLPVF

SEQ ID NO: 279535 - DNA, 1302 bp, Artificial Sequence
  derived and/or modified sequence
atgtgcgtggactggagcaacatcagacagctgttcagccagcacagatacagcaccccccacgccttcaccttcaacaccagcagccccagcagcgagggcagcctgagccagagacagagaagcaccagcacccccaacgtgcacatggtgagcaccaccctgcccgtggacagcagaatgatcgaggacgccatcagaagccacagcgagagcgccagccccagcgccctgagcagcagccccaacaacctgagccccaccggctggagccagcccaagacccccgtgcccgcccagagagagagagcccccgtgagcggcacccaggagaagaacaagatcagacccagaggccagagagacagcagctactactgggagatcgaggccagcgaggtgatgctgagcaccagaatcggcagcggcagcttcggcaccgtgtacaagggcaagtggcacggcgacgtggccgtgaagatcctgaaggtggtggaccccacccccgagcagttccaggccttcagaaacgaggtggccgtgctgagaaagaccagacacgtgaacatcctgctgttcatgggctacatgaccaaggacaacctggccatcgtgacccagtggtgcgagggcagcagcctgtacaagcacctgcacgtgcaggagaccaagttccagatgttccagctgatcgacatcgccagacagaccgcccagggcatggactacctgcacgccaagaacatcatccacagagacatgaagagcaacaacatcttcctgcacgagggcctgaccgtgaagatcggcgacttcggcctggccaccgtgaagagcagatggagcggcagccagcaggtggagcagcccaccggcagcgtgctgtggatggcccccgaggtgatcagaatgcaggacaacaaccccttcagcttccagagcgacgtgtacagctacggcatcgtgctgtacgagctgatgaccggcgagctgccctacagccacatcaacaacagagaccagatcatcttcatggtgggcagaggctacgccagccccgacctgagcaagctgtacaagaactgccccaaggccatgaagagactggtggccgactgcgtgaagaaggtgaaggaggagagacccctgttcccccagatcctgagcagcatcgagctgctgcagcacagcctgcccaagatcaacagaagcgccagcgagcccagcctgcacagagccgcccacaccgaggacatcaacgcctgcaccctgaccaccagccccagactgcccgtgttctag

SEQ ID NO: 279536 - DNA, 1302 bp, Artificial Sequence
  derived and/or modified sequence
atgtgtgtcgattggtccaacatacgacaattgttctcccaacacagatacagcacacctcacgcattcactttcaacacttccagcccctcctctgaagggtcattgagccagcgccaaaggtcaacttctacaccaaacgtccacatggtctctactaccctcccagtggattctaggatgatagaggacgccattcgaagtcactccgagagcgccagtccctcagccctgtcgagtagcccaaataatttatctcctaccggctggtcacagcctaaaaccccagtccccgcccagcgcgagcgcgcgccagttagcggtacccaagagaaaaataaaatccggcctagggggcaacgggactcctcttactactgggagatcgaggcaagcgaggtgatgctgtccacgcgcatcggcagcgggtcatttgggacagtttacaaaggcaagtggcatggggacgttgcagtgaagattcttaaggtggttgaccccactccagagcagttccaggcgttccggaacgaagttgcagttctccgcaagacccgtcatgtgaacattctcctgttcatgggctacatgacgaaagacaatctggcaattgtgacacagtggtgtgaggggagtagtttgtataagcacctgcacgttcaggaaacgaagttccagatgtttcaattaatcgacatagctcggcagacagcgcaaggaatggactatctgcacgctaagaatatcattcaccgagacatgaagtccaacaatattttcctgcatgagggcctgaccgtgaagatcggcgactttggacttgctacggtaaagtcgagatggagcgggtcacagcaggtggaacagcctactggctctgtgctgtggatggccccagaagtaattaggatgcaggacaataacccattctcattccaatccgacgtctactcctatgggatcgttctgtacgaactgatgactggagaacttccatatagccatattaacaacagggaccagatcattttcatggttggcagggggtatgccagccctgatctctccaaactgtacaagaattgccccaaagcaatgaaaaggctggtggcagactgcgtgaaaaaggtcaaagaagagcgccccctgttcccccaaatactatcttctatagaactcttacagcactcattaccgaagatcaatcggtctgccagtgaaccctcgctccatagagccgcccacaccgaagacatcaatgcatgcaccctgactacttctcccagacttcccgtcttctag

SEQ ID NO: 279537 - DNA, 1302 bp, Artificial Sequence
  derived and/or modified sequence
atgtgtgtggactggagcaacatccggcagctgttcagccagcaccgctacagcacccctcatgccttcaccttcaacaccagcagccccagcagcgagggcagcctgagccagaggcagaggagcaccagcaccccaaatgtgcacatggtgtccaccaccctgcctgtggacagcaggatgattgaagatgccatccgcagccacagcgagagcgccagccccagcgccctgagcagcagccccaacaacctgagccccaccggctggagccagcccaagacccctgtgcctgcccagcgggagcgggcccctgtgtctggcacccaggagaagaacaagatccggccccggggccagagggacagcagctactactgggagattgaggccagcgaggtgatgctgagcacccgcatcggcagcggcagctttggaacagtgtacaagggcaagtggcatggagatgtggccgtgaagatcctgaaggtggtggaccccaccccagagcagttccaggccttcagaaatgaggtggccgtgctgaggaagaccaggcatgtgaacatcctgctcttcatgggctacatgaccaaggacaacctggccatcgtgacccagtggtgtgagggcagcagcctgtacaagcacctgcacgtgcaggagaccaagttccagatgttccagctgattgatattgcccggcagacagcccagggcatggactacctgcacgccaagaacatcatccaccgggacatgaagagcaacaacatcttcctgcacgagggcctgactgtgaagattggagactttggcctggccaccgtgaagagccgctggagcggcagccagcaggtggagcagcccactggatctgtgctgtggatggcccctgaggtgatccgcatgcaggacaacaaccccttctccttccagagtgatgtgtacagctatggaattgtgctgtatgagctgatgaccggggagctgccctacagccacatcaacaacagagaccagatcatcttcatggtgggccggggctacgccagcccagacctgagcaagctgtacaagaactgccccaaggccatgaagaggctggtggccgactgtgtgaagaaggtgaaggaggagcggcccctcttcccccagatcctgagcagcattgagctgctgcagcacagcctgcccaagatcaacagaagtgccagcgagcccagcctgcacagagctgcccacacagaggacatcaatgcctgcaccctgaccaccagcccccggctgcctgtgttctag

SEQ ID NO: 279538 - DNA, 1302 bp, Artificial Sequence
  derived and/or modified sequence
atgtgcgtggactggagcaacatccggcagctgttcagccagcaccgttactctacgccccacgcatttacctttaacacatcaagccctagcagtgaagggagtctgtcccagcggcagcggtccactagtacgccgaacgtgcacatggtgtccacaaccctgcctgtggattccagaatgatagaggacgctattagaagccactccgaaagtgcttcaccttctgcccttagcagcagcccgaacaatctgagccccacgggttggagccagccgaagacaccggttcctgcccaacgcgaacgcgctcccgtttctgggactcaggagaagaacaagattcgcccacgtgggcagcgggacagctcttactattgggagatagaagctagcgaggtgatgctgtcaacccgcattggctccggctcattcgggacagtctacaagggaaaatggcatggagatgtggctgtaaaaattctgaaagtagtggacccaaccccagaacaattccaggcctttaggaacgaggtggctgtcctgaggaagactagacacgttaatatcctgctgtttatgggctatatgaccaaagacaacctcgccatcgtaacacagtggtgtgagggctcttcgctgtacaagcacctccatgtgcaggagacaaagttccagatgtttcaactcatcgacattgcccgacagaccgctcagggtatggattatttgcatgccaaaaatattatccaccgcgacatgaagagcaataatatctttctccacgaaggactgacagtgaaaattggcgacttcggccttgcaactgtcaagtctagatggagtggtagccagcaggttgagcagccaacgggcagtgtactgtggatggcgccagaagtgataagaatgcaagacaacaatcccttcagctttcagtcagatgtctactcttatgggattgtgttgtatgaactgatgacgggagagctgccctactctcacatcaacaaccgcgaccagatcattttcatggtgggccgtggttatgcatccccggatttatccaagctttataaaaattgcccaaaagctatgaagaggctcgtcgccgattgcgttaaaaaagtgaaagaagagcgtccactgtttccccagattctgtctagcattgagcttctccagcattcactgccgaaaataaatcgcagtgcttctgaacccagcctgcacagagccgcccatacagaggatatcaatgcatgtacgctcaccacctccccacggttgcccgtcttctag

SEQ ID NO: 279539 - DNA, 1302 bp, Artificial Sequence
  derived and/or modified sequence
atgtgcgtggattggagtaacattagacaattattcagtcagcaccgatacagcacccctcatgcttttacgttcaacacttcctcaccaagtagcgaaggtagtttgtcacagagacaacggtcaaccagcactcctaacgtgcatatggtgtcaactacattacccgtggactcacggatgatcgaggacgcaatacgctctcattcagagagcgcatccccctctgctctgtcctcctcccctaataatctgtcccctacggggtggagtcagccaaagacccctgttccagcacagagggaacgcgctccagtgtctggcacgcaggaaaaaaataagatccgaccccgtggacagagggacagctcttattattgggagatcgaggcatctgaagtgatgctcagcacccgaattgggtctggcagttttgggactgtctataagggaaaatggcacggggacgttgccgtcaagattttaaaggtcgtggaccccactccagaacaatttcaggcctttcgaaacgaggtggccgttcttcgcaagactaggcatgtaaatatactcctgtttatgggctacatgactaaagataatctggctatcgtgactcagtggtgtgaaggatcaagtctctataagcaccttcacgtgcaggagaccaagttccagatgtttcaactgatcgatattgcacgccagactgctcaaggaatggattaccttcatgctaagaacatcattcaccgcgacatgaagagcaataatattttcctccacgagggtctgaccgtcaagatcggagacttcgggttggctacggttaaatcaagatggtctgggagtcagcaagtcgagcaaccgacaggttctgtactctggatggcccctgaggtgatacgaatgcaggataacaatcccttttcctttcagtcagacgtgtacagttatgggatcgtactgtatgagctcatgaccggcgaactcccctacagccacatcaacaaccgagaccaaatcatctttatggttggcagaggatacgcctctcctgacttgagtaaactgtacaaaaactgcccaaaagccatgaagcggctcgtggccgattgtgtcaagaaggtcaaggaagaacgccctttgtttccccaaattctttccagtattgagcttctgcagcactctctgccaaagatcaatcggagtgccagcgagccatctctacacagagccgcacacacagaagatatcaatgcctgcaccctcacgacctctcctcgactgcccgttttttag

SEQ ID NO: 279540 - DNA, 1686 bp, Artificial Sequence
  derived and/or modified sequence
caacacacaactttgctcggaagacgttcctgaagcttgccttctgtgacatctgtcagaaattcctgctcaatggatttcgatgtcagacttgtggctacaaatttcatgagcactgtagcaccaaagtacctactatgtgtgtggactggagtaacatcagacaactcttttctcagcacagatattctacacctcacgccttcacctttaacacctccagtccctcatctgaaggttccctctcccagaggcagaggtcgacatccacacctaatgtccacatggtcagcaccaccctgcctgtggacagcaggatgattgaggatgcaattcgaagtcacagcgaatcagcctcaccttcagccctgtccagtagccccaacaatctgagcccaacaggctggtcacagccgaaaacccccgtgccagcacaaagagagcgggcaccagtatctgggacccaggagaaaaacaaaattaggcctcgtggacagagagattcaagctattattgggaaatagaagccagtgaagtgatgctgtccactcggattgggtcaggctcttttggaactgtttataagggtaaatggcacggagatgttgcagtaaagatcctaaaggttgtcgacccaaccccagagcaattccaggccttcaggaatgaggtggctgttctgcgcaaaacacggcatgtgaacattctgcttttcatggggtacatgacaaaggacaacctggcaattgtgacccagtggtgcgagggcagcagcctctacaaacacctgcatgtccaggagaccaagtttcagatgttccagctaattgacattgcccggcagacggctcagggaatggactatttgcatgcaaagaacatcatccatagagacatgaaatccaacaatatatttctccatgaaggcttaacagtgaaaattggagattttggtttggcaacagtaaagtcacgctggagtggttctcagcaggttgaacaacctactggctctgtcctctggatggccccagaggtgatccgaatgcaggataacaacccattcagtttccagtcggatgtctactcctatggcatcgtattgtatgaactgatgacgggggagcttccttattctcacatcaacaaccgagatcagatcatcttcatggtgggccgaggatatgcctccccagatcttagtaagctatataagaactgccccaaagcaatgaagaggctggtagctgactgtgtgaagaaagtaaaggaagagaggcctctttttccccagatcctgtcttccattgagctgctccaacactctctaccgaagatcaaccggagcgcttccgagccatccttgcatcgggcagcccacactgaggatatcaatgcttgcacgctgaccacgtccccgaggctgcctgtcttctagttgactttgcacctgtcttcaggctgccaggggaggaggagaagccagcaggcaccacttttctgctccctttctccagaggcagaacacatgttttcagagaagctgctgctaaggaccttctagactgctcacagggccttaacttcatgttgccttcttttctatccctttgggccctgggagaaggaagccatttgcagtgctggtgtgtcctgctccctccccacattccccatgctcaagg

SEQ ID NO: 279541 - DNA, 495 bp, Artificial Sequence
  derived and/or modified sequence
atgctggccgacaagcccttcttcctggtgctggaggaggacggcaccaccgtggagaccgaggagtacttccaggccctggccggcgacaccgtgttcatggtgctgcagaagggccagaagtggcagccccccagcgagcagggcaccagacaccccctgagcctgagccacaagcccgccaagaagatcgacgtggccagagtgaccttcgacctgtacaagctgaacccccaggacttcatcggctgcctgaacgtgaaggccaccttctacgacacctacagcctgagctacgacctgcactgctgcggcgccaagagaatcatgaaggaggccttcagatgggccctgttcagcatgcaggccaccggccacgtgctgctgggcaccagctgctacctgcagcagctgctggacgccaccgaggagggccagccccccaagggcaaggccagcagcctgatccccacctgcctgaagatcctgcagtag

SEQ ID NO: 279542 - DNA, 495 bp, Artificial Sequence
  derived and/or modified sequence
atgctcgcagacaagcctttcttccttgtccttgaggaggatgggactactgtagagaccgaagaatactttcaagctttggcgggcgacaccgtcttcatggtgcttcagaaagggcagaagtggcagcccccctccgagcaaggcacgcgacaccccttgtcactcagccacaaacccgcaaagaagatagacgtcgcacgagtgacttttgatctgtacaagctgaatccacaagacttcatcggatgcctaaatgtgaaagctaccttctacgatacttactcattgtcctacgacttacactgctgcggcgccaagcgaatcatgaaggaggcgtttaggtgggcactcttcagcatgcaggcaactggtcatgtgctcttgggcaccagctgctacttacagcagttgctggatgcaaccgaagaaggacagcctcccaaaggaaaggcgagttctctgatccctacatgcctgaagatcttacagtag

SEQ ID NO: 279543 - DNA, 495 bp, Artificial Sequence
  derived and/or modified sequence
atgcttgccgacaagcccttctttttagtgcttgaggaagatgggacaacagtggagaccgaagaatacttccaggcattagctggcgatacagtgttcatggtgctgcagaaaggccagaaatggcagcctccctctgagcagggcactaggcacccattaagcctcagccataagcccgcaaagaagatcgatgtggcgcgggtgacgttcgacctgtataagcttaacccacaggacttcattgggtgtctaaatgtaaaggctaccttttatgacacttattccttgtcctacgacctgcattgttgcggggcaaaacgtatcatgaaagaggcctttcgctgggccctattcagcatgcaagccactggacatgtcctcctgggaacttcatgttacctgcagcagcttctggacgccacagaggaaggccagcctccaaaagggaaggcttcatcattgattcctacctgcctgaaaattcttcaatag

SEQ ID NO: 279544 - DNA, 495 bp, Artificial Sequence
  derived and/or modified sequence
atgctggccgacaagcccttcttcctggtgctggaggaggatggcaccaccgtggagacagaggagtacttccaggccctggccggggacacagtgttcatggtgctgcagaagggccagaagtggcagccccccagcgagcagggcaccaggcaccccctgagcctgagccacaagccagccaagaagattgatgtggcccgggtgacctttgacctgtacaagctgaacccccaggacttcatcggctgcctgaatgtgaaggccaccttctatgacacctacagcctgtcctatgacctgcactgctgcggggccaagaggatcatgaaggaggccttccgctgggccctcttctccatgcaggccaccggccacgtgctgctgggcaccagctgctacctgcagcagctgctggatgccacagaggagggccagccccccaagggcaaggccagcagcctcatccccacctgcctgaagatcctgcagtag

SEQ ID NO: 279545 - DNA, 495 bp, Artificial Sequence
  derived and/or modified sequence
atgctggccgacaagcccttcttcctggtgctggaggaggacggcacgaccgtggagacagaggagtattttcaggccctcgctggcgacacagtgttcatggtgctccagaagggccagaaatggcagcctccatctgaacaggggacccgccaccctctgagcctgtcccacaagcccgccaagaaaatcgacgtggccagagtcaccttcgatctttataagcttaatccacaggatttcatcgggtgtctaaatgtgaaggccacgttttacgacacttacagcctcagctacgatctccactgttgcggtgccaaacggattatgaaggaagcttttcgctgggcccttttttccatgcaggccacggggcacgtgctgcttggaacaagttgctacctccagcagctcttggatgcaactgaggagggacaaccaccgaaaggtaaagcatccagcctcattcccacatgcctgaagatcttgcagtag

SEQ ID NO: 279546 - DNA, 495 bp, Artificial Sequence
  derived and/or modified sequence
atgctggccgacaagcccttcttcctggtgctggaggaggacggcaccacggtggaaacggaggagtacttccaggcgcttgccggagataccgtttttatggtgctgcagaaaggccagaaatggcagcctcccagcgagcaaggtacccgccatcctttatccctgtcacataagccggcgaagaaaattgacgtcgcacgggttactttcgatttatacaaactaaatcctcaggattttattggttgtctcaatgtcaaagctaccttctatgatacgtactccttatcttacgacttgcactgctgtggtgcaaagcggatcatgaaagaggcatttagatgggccctgttctccatgcaggcaacagggcacgtgttgcttggtacttcctgctatctgcagcagctgctagatgctactgaagaggggcagccgcccaagggtaaggcaagcagtctgattccaacctgcctgaaaatcttgcaatag

SEQ ID NO: 279547 - DNA, 495 bp, Artificial Sequence
  derived and/or modified sequence
atgttagccgacaaaccctttttcctggtactagaggaggacggtactaccgtcgaaactgaagagtattttcaggccctggcaggcgacacagtcttcatggtgcttcagaaaggccaaaagtggcagcctcctagcgaacaagggacacggcatcctctgagcctgagccataagccggctaagaaaatagacgtggctcgtgtgacctttgacctttacaaactcaacccacaggacttcataggttgcctcaatgtgaaggcaactttctatgatacctattcactgagttatgacctgcactgttgcggcgcaaagcgtataatgaaggaagcctttcgatgggcactgttcagcatgcaggccacaggacacgtgctgctcggtacgtcatgctacctgcagcagctgcttgacgcaactgaggaagggcagcctccaaagggcaaagcctcaagcctcattcccacttgcctaaagattctacagtag

SEQ ID NO: 279548 - DNA, 495 bp, Artificial Sequence
  derived and/or modified sequence
atgctggctgataaacccttttttcttgtgctggaggaagacggtacaaccgtggaaacagaggagtacttccaggctctggcaggcgacacagtcttcatggtgctgcagaagggtcaaaagtggcagcctccttctgaacaggggactagacaccctctgagtttgagccacaaaccagcaaaaaagatcgacgtggcaagagtgacattcgatctgtataaacttaatccgcaggattttatagggtgcttgaatgtgaaagcgactttctatgacacttacagtcttagctacgaccttcactgttgcggtgccaagaggatcatgaaagaagctttccgctgggcactctttagcatgcaggccactggtcacgtgctgctcggcacttcttgctacctgcaacaactgctagatgccaccgaggagggacagccacctaaaggcaaggcctcttccctgatccctacttgtctcaaaatactccagtag

SEQ ID NO: 279549 - DNA, 929 bp, Artificial Sequence
  derived and/or modified sequence
agaatgttcttttggccactgtgaagcctcaggaaggggctcggattgctcaaggacccatgggagagaggaggctttgactgggctgcctgcctgtgaggtctctggactagaggtccaacgcagtccagctgacaaggatggaatacgccatgaagtcccttagccttctctaccccaagtccctctccaggcatgtgtcagtgcgtacctctgtggtgacccagcagctgctgtcggagcccagccccaaggcccccagggcccggccctgccgcgtaagcacggcggatcgaagcgtgaggaagggcatcatggcttacagtcttgaggacctcctcctcaagggaagctttccgctgggccctcttcagcatgcaggccacaggccacgtactgcttggcacctcctgttacctgcagcagctcctcgatgctacggaggaagggcagccccccaagggcaaggcctcatcccttatcccgacctgtctgaagatactgcagtgaaagcccaagtccttggaagctttccccagtgaaggactgactgggggcctcacgcttaactggtagtgcccacaagcctggcagctgtagagccgcgaacctccccacacctccctcaccgcgcaggaccctgagtgaggaggaggagctggaaacctggggtgggttggccaaaggagaacctcaagctcctggcctgatccagctccttcctgcccaaggcagcttagcccatccagactggtcctgaagtctgtccctccattggcatgaagtctgccccttagcaatctggcctcgcaggctgtactttcatggtgctctctaccttctggcccccatcccggaacattcctgagtgaattcgcaagcgcactagcatgtgatattagggagtttgcaataaattattgaggctg

SEQ ID NO: 279550 - DNA, 1363 bp, Artificial Sequence
  derived and/or modified sequence
ccgagacctggagcagccaccgccgcaatcatgggcttgtgctggaaaagatgaaatggggaaaatggtgtcagtaattaacactgtggatacctcccatgaggacatgattcacgacgcccagatggactactatggcacccgcctggcaacctgctcatcagacaggtccgtcaaaatctttgatgtgcgcaatggagggcagatccttatcgccgacctcaggggtcatgagggtcctgtgtggcaagtggcctgggctcaccccatgtacggcaacatcctggcatcgtgctcctatgaccggaaagtcattatctggagagaggaaaacggcacctgggagaagagccacgagcatgcgggacacgactcctcagtgaactcggtgtgctgggccccccatgactacggcctgatcctggcctgtgggagctcggatggggccatctccctgctgacttacaccggggaaggccaatgggaagtaaagaagatcaacaacgctcacaccattggctgcaatgccgtcagctgggcccctgctgttgtacctggaagcctcatagaccacccatcggggcagaaacccaattacatcaagaggtttgcatcaggtggctgtgacaacctcatcaagctgtggaaggaggaggaggacggccagtggaaggaggagcagaagctagaagcgcacagtgactgggttcgagatgtggcctgggccccctccatcggcctgcccaccagcaccatcgccagctgctcccaggatggtcgtgtgttcatttggacctgtgatgatgcctcaagcaatacgtggtcccctaaattgttgcacaagttcaacgatgtggtgtggcatgtgagctggtccatcacagccaacatcctggctgtctctggtggagacaataaggtgaccctgtggaaggagtcagttgatgggcagtgggtgtgcatcagtgatgtcaacaagggccagggctccgtatcagcatcagtgacagagggccagcagaacgagcagtgacaagacaggtggggcctggctccccacccgccagctccaggactgccccttcctgggccaactaaccagacaactgggaagagcccccaactccaacaggattattttcccaggaggagttacagatgcagccacagattgatcatctgccttaacgtgatcggagatgctttgtaatctactgtccagctgaaagcactcatgttacgaggaagaaactacaagtgatgttcaaatctattttgggtcatttttatgtacctttgggttcaggcattatttggggggttttgtttccaaaggaactaaataaagtcatattgcttataa

SEQ ID NO: 279551 - DNA, 1467 bp, Artificial Sequence
  derived and/or modified sequence
tggtactgaggaggcctagcagggtgaaggccacggtcgcggccttcacgggttcctcggccgtcctgagtcccaaatcccaagctggagccgttcagctcccctccaccgcttagagatttggggggctctggccccgtccttgcggaccattccgaggggagtccagaggtgtcagtaattaacactgtggatacctcccatgaggacatgattcacgacgcccagatggactactatggcacccgcctggcaacctgctcatcagacaggtccgtcaaaatctttgatgtgcgcaatggagggcagatccttatcgccgacctcaggggtcatgagggtcctgtgtggcaagtggcctgggctcaccccatgtacggcaacatcctggcatcgtgctcctatgaccggaaagtcattatctggagagaggaaaacggcacctgggagaagagccacgagcatgcgggacacgactcctcagtgaactcggtgtgctgggccccccatgactacggcctgatcctggcctgtgggagctcggatggggccatctccctgctgacttacaccggggaaggccaatgggaagtaaagaagatcaacaacgctcacaccattggctgcaatgccgtcagctgggcccctgctgttgtacctggaagcctcatagaccacccatcggggcagaaacccaattacatcaagaggtttgcatcaggtggctgtgacaacctcatcaagctgtggaaggaggaggaggacggccagtggaaggaggagcagaagctagaagcgcacagtgactgggttcgagatgtggcctgggccccctccatcggcctgcccaccagcaccatcgccagctgctcccaggatggtcgtgtgttcatttggacctgtgatgatgcctcaagcaatacgtggtcccctaaattgttgcacaagttcaacgatgtggtgtggcatgtgagctggtccatcacagccaacatcctggctgtctctggtggagacaataaggtgaccctgtggaaggagtcagttgatgggcagtgggtgtgcatcagtgatgtcaacaagggccagggctccgtatcagcatcagtgacagagggccagcagaacgagcagtgacaagacaggtggggcctggctccccacccgccagctccaggactgccccttcctgggccaactaaccagacaactgggaagagcccccaactccaacaggattattttcccaggaggagttacagatgcagccacagattgatcatctgccttaacgtgatcggagatgctttgtaatctactgtccagctgaaagcactcatgttacgaggaagaaactacaagtgatgttcaaatctattttgggtcatttttatgtacctttgggttcaggcattatttggggggttttgtttccaaaggaactaaataaagtcatattgcttataa

SEQ ID NO: 279552 - DNA, 3357 bp, Artificial Sequence
  derived and/or modified sequence
gcggccgccgtagttgaatctcctcggcgccggaagccccgccactccgcttcctggttcatgtgcggccttcgttccctcgctatctcgaccttgacttcgcatgtgcatccgccgaagtctttctagatcaatcggccccatctctcgtcttcccgattcggccatgacctcacccgtatcctcgacgtaggacctcggacttcatttccgccaccccgacacttccggaatccccggaagcgacccgttgccatggcgactatgtacacagccaggcagccccgcgtggggagtgcaggtggtttcggttgcggcagtcgcgtcccgggagcgtcgctgcctggtgaacgctagaatgggtactaggaaaaaagttcatgcatttgtccgtgtcaaacccaccgatgactttgctcatgaaatgatcagatacggagatgacaaaagaagcattgatattcacttaaaaaaagacattcggagaggagttgtcaataaccaacagacagactggtcgtttaagttggatggagttcttcacgatgcctcccaggacttggtttatgagacagttgcaaaggatgtggtttctcaggccctcgatggctataatggcaccatcatgtgttatgggcagacgggagctggcaagacatacaccatgatgggggcaactgagaattacaagcaccgggggatcctccctcgtgccctgcagcaggtttttaggatgatcgaagaacgccccacacatgccatcactgtgcgtgtttcctacttggaaatctataatgagagcctgtttgatctcctgtccactctgccctatgttggaccctcagtcacaccaatgaccatcgtggaaaaccctcaaggagtcttcattaagggcttgtcagttcacctcacaagtcaggaggaggatgcattcagcctcctttttgagggtgagaccaacaggattatagcctcccacactatgaacaaaaactcttccagatcacactgcattttcaccatctacttagaggcccattcccggaccttatcagaggaaaagtacatcacttccaaaattaacttggtggatctggcaggctcagagaggctggggaagtctgggtctgagggccaagtcctgaaggaagccacctacatcaacaaatcgctctcattcctggagcaggccatcattgcccttggggaccagaagcgggaccacatcccctttcggcagtgcaagctcacccacgctctgaaggactcgttagggggaaactgcaatatggtcctcgtgacaaacatctatggagaagctgcccagttagaagaaacgctatcttcactgagatttgccagcaggatgaagctagtcaccactgagcctgccatcaatgaaaagtatgatgctgagagaatggtcaagaacctggagaaggaactagcactactcaagcaggagctggctatccatgacagcctgaccaaccgcacctttgtgacctatgaccccatggatgaaatccagattgctgagatcaactcccaggtgcggaggtacctggaggggacactggacgagatcgacataatcagccttagacagatcaaggaggtgttcaaccagttccgggtggttctgagccaacaggaacaggaagtggagtccactttgcgcaggaagtacaccctcattgacaggaatgactttgcagccatttctgctatccagaaggcggggcttgtggatgttgatggccacctagtgggtgagcctgaaggacaaaactttggactcggagtcgcccctttctctaccaaacctgggaagaaagccaagtccaagaagacattcaaagagccactcagctccttggcaagaaaggaaggtgccagcagccctgtgaatgggaaggacttggattacgtttccacctccaagacccagctggtcccatcctccaaagatggggatgtcaaagacatgctttcgcgggaccgggaaacttccagcattgagccccttccctcagactccccgaaggaggaattacgcccaattaggcccgacaccccaccctccaaaccagtggcctttgaggagtttaagaatgagcaaggtagtgagatcaaccgaattttcaaagaaaacaaatccatcttgaatgaacggaggaaaagggccagcgagaccacacagcacatcaatgccatcaagcgggagattgatgtgaccaaggaggccctgaatttccagaagtcactacgggagaagcaaggcaagtacgaaaacaaggggctgatgatcatcgatgaggaagaattcctgctgatcctcaagctcaaagacctcaagaagcagtaccgcagcgagtaccaggacctgcgtgacctcagggctgagatccagtattgccagcacctagtggatcagtgtcgccaccgcctgctcatggaatttgacatctggtacaatgagtcctttgtcatccctgaggacatgcagatggcactgaagccaggcggcagcatccggccaggcatggtccctgtgaacaggattgtgtctctgggagaagatgaccaggacaaattcagccagctgcagcagagggtgcttcctgagggccctgattccatctccttctacaatgccaaagtcaagatagagcagaagcataattacttgaaaaccatgatgggcctccagcaggcacatagaaaatagaacctcatcgccagtaccttaaaggacaagaccagcaactcccacctactgtagtggagctgctcaaccacctgcccagagctgcagccccctctactccaatgctgggacccagcacagagaacacatttggcctgcatgttgggaggagcatcctccaaggacaaccttgctcatctccacagagcactttgggttttaattcactgtcttatatgcagggacaggataaaataactttctagtttggactttcagtgctcatctgagaactttgtcttatttcctgtctgaaaggacatattctctatgtatgtgtgaggtcagaactgagtctcaagtaggaaggcagaaaagtagctcagccaggctcctcctggcaggcctttgtcacactggtcagcccctttcctggatagacatcctagggtgggggtggtgagctcggtctgaggagctctgcttctcacagctccctcagaccctaagttctctcaagacatcttttctgtgtttctgagccagtgaagaagacaggaggaggccctccttcatttggcaaccaggggaggataaggtctagccacagagaccagaaagggatgaggcagagctggctccatgta

SEQ ID NO: 279553 - DNA, 2707 bp, Artificial Sequence
  derived and/or modified sequence
acagccaggcagccccgcgtggggagtgcaggtggtttcggttgcggcagtcgcgtcccgggagcgtcgctgcctggtgaacgctgggtcgctcatctctgaaacccaggcgaaggagggctcgacgtcgcgggagtcctttcaacctgaccgcggcttacggtcttcggagctaatgttcattggtcccacaaaggggtcccacgtcgcgtccaggacatagaggccgtgaggcagggagccagaggtcgtctggactcttccgtactagtcagttttcgaactagagggggctttgggatcaccagtcggagcccttcgtgttacagctagaatgggtactaggaaaaaagttcatgcatttgtccgtgtcaaacccaccgatgactttgctcatgaaatgatcagatacggagatgacaaaagaagcattgatattcacttaaaaaaagacattcggagaggagttgtcaataaccaacagacagactggtcgtttaagttggatggagttcttcacgatgcctcccaggacttggtttatgagacagttgcaaaggatgtggtttctcaggccctcgatggctataatggcaccatcatgtgttatgggcagacgggagctggcaagacatacaccatgatgggggcaactgagaattacaagcaccgggggatcctccctcgtgccctgcagcaggtttttaggatgatcgaagaacgccccacacatgccatcactgtgcgtgtttcctacttggaaatctataatgagagcctgtttgatctcctgtccactctgccctatgttggaccctcagtcacaccaatgaccatcgtggaaaaccctcaaggagtcttcattaagggcttgtcagttcacctcacaagtcaggaggaggatgcattcagcctcctttttgagggtgagaccaacaggattatagcctcccacactatgaacaaaaactcttccagatcacactgcattttcaccatctacttagaggcccattcccggaccttatcagaggaaaagtacatcacttccaaaattaacttggtggatctggcaggctcagagaggctggggaagtctgggtctgagggccaagtcctgaaggaagccacctacatcaacaaatcgctctcattcctggagcaggccatcattgcccttggggaccagaagcgggaccacatcccctttcggcagtgcaagctcacccacgctctgaaggactcgttagggggaaactgcaatatggtcctcgtgacaaacatctatggagaagctgcccagttagaagaaacgctatcttcactgagatttgccagcaggatgaagctagtcaccactgagcctgccatcaatgaaaagtatgatgctgagagaatggtcaagaacctggagaaggaactagcactactcaagcaggagctggctatccatgacagcctgaccaaccgcacctttgtgacctatgaccccatggatgaaatccagattgctgagatcaactcccaggtgcggaggtacctggaggggacactggacgagatcgacataatcagccttagacagatcaaggaggtgttcaaccagttccgggtggttctgagccaacaggaacaggaagtggagtccactttgcgcaggaagtacaccctcattgacaggaatgactttgcagccatttctgctatccagaaggcggggcttgtggatgttgatggccacctagtgggtgagcctgaaggacaaaactttggactcggagtcgcccctttctctaccaaacctgggaagaaagccaagtccaagaagacattcaaagagccactcagctccttggcaagaaaggaaggtgccagcagccctgtgaatgggaaggacttggattacgtttccacctccaagacccagctggtcccatcctccaaagatggggatgtcaaagacatgctttcgcgggaccgggaaacttccagcattgagccccttccctcagactccccgaaggaggaattacgcccaattaggcccgacaccccaccctccaaaccagtggcctttgaggagtttaagaatgagcaaggtagtgagatcaaccgaattttcaaagaaaacaaatccatcttgaatgaacggaggaaaagggccagcgagaccacacagcacatcaatgccatcaagcgggagattgatgtgaccaaggaggccctgaatttccagaagtcactacgggagaagcaaggcaagtacgaaaacaaggggctgatgatcatcgatgaggaagaattcctgctgatcctcaagctcaaagacctcaagaagcagtaccgcagcgagtaccaggacctgcgtgacctcagggctgagatccagtattgccagcacctagtggatcagtgtcgccaccgcctgctcatggaatttgacatctggtacaatgagtcctttgtcatccctgaggacatgcagatggcactgaagccaggcggcagcatccggccaggcatggtccctgtgaacaggattgtgtctctgggagaagatgaccaggacaaattcagccagctgcagcagagggtgcttcctgagggccctgattccatctccttctacaatgccaaagtcaagatagagcagaagcataattacttgaaaaccatgatgggcctccagcaggcacatagaaaatag

SEQ ID NO: 279554 - DNA, 3311 bp, Artificial Sequence
  derived and/or modified sequence
gtggtgcccatcagcatgtggagccggccaccgcccctgcctccatagaagcccgctgccgcccagtccgcggtaccttgagggtcacgtcgcacagcttgccctgccgccggatctcctccatgacgccgtagccgcgactaggcaactcagacacggagaagtgcaccagatcctccagctcctccgcgccgtcctccaccatcttccccggccgctgcaactgcgcaggcctcgccggccggctagacactaaccagggcggggcgatagcgcacgccgacagccgctcggagcgcggagcagcaatcggacgggcctccgcggccgccgtagttgaatctcctcggcgccggaagccccgccactccgcttcctggttcatgtgcggccttcgttccctcgctatctcgaccttgacttcgcatgtgcatccgccgaagtctttctagatcaatcggccccatctctcgtcttcccgattcggccatgacctcacccgtatcctcgacgtaggacctcggacttcatttccgccaccccgacacttccggaatccccggaagcgacccgttgccatggcgactatgtacacagccaggcagccccgcgtggggagtgcaggtggtttcggttgcggcagtcgcgtcccgggagcgtcgctgcctggtgaacgctagaatgggtactaggaaaaaagttcatgcatttgtccgtgtcaaacccaccgatgactttgctcatgaaatgatcagatacggagatgacaaaagaagcattgatattcacttaaaaaaagacattcggagaggagttgtcaataaccaacagacagactggtcgtttaagttggatggagttcttcacgatgcctcccaggacttggtttatgagacagttgcaaaggatgtggtttctcaggccctcgatggctataatggcaccatcatgtgttatgggcagacgggagctggcaagacatacaccatgatgggggcaactgagaattacaagcaccgggggatcctccctcgtgccctgcagcaggtttttaggatgatcgaagaacgccccacacatgccatcactgtgcgtgtttcctacttggaaatctataatgagagcctgtttgatctcctgtccactctgccctatgttggaccctcagtcacaccaatgaccatcgtggaaaaccctcaaggagtcttcattaagggcttgtcagttcacctcacaagtcaggaggaggatgcattcagcctcctttttgagggtgagaccaacaggattatagcctcccacactatgaacaaaaactcttccagatcacactgcattttcaccatctacttagaggcccattcccggaccttatcagaggaaaagtacatcacttccaaaattaacttggtggatctggcaggctcagagaggctggggaagtctgggtctgagggccaagtcctgaaggaagccacctacatcaacaaatcgctctcattcctggagcaggccatcattgcccttggggaccagaagcgggaccacatcccctttcggcagtgcaagctcacccacgctctgaaggactcgttagggggaaactgcaatatggtcctcgtgacaaacatctatggagaagctgcccagttagaagaaacgctatcttcactgagatttgccagcaggatgaagctagtcaccactgagcctgccatcaatgaaaagtatgatgctgagagaatggtcaagaacctggagaaggaactagcactactcaagcaggagctggctatccatgacagcctgaccaaccgcacctttgtgacctatgaccccatggatgaaatccagattgctgagatcaactcccaggtgcggaggtacctggaggggacactggacgagatcgacataatcagccttagacagatcaaggaggtgttcaaccagttccgggtggttctgagccaacaggaacaggaagtggagtccactttgcgcaggaagtacaccctcattgacaggaatgactttgcagccatttctgctatccagaaggcggggcttgtggatgttgatggccacctagtgggtgagcctgaaggacaaaactttggactcggagtcgcccctttctctaccaaacctgggaagaaagccaagtccaagaagacattcaaagagccactcagctccttggcaagaaaggaaggtgccagcagccctgtgaatgggaaggacttggattacgtttccacctccaagacccagctggtcccatcctccaaagatggggatgtcaaagacatgctttcgcgggaccgggaaacttccagcattgagccccttccctcagactccccgaaggaggaattacgcccaattaggcccgacaccccaccctccaaaccagtggcctttgaggagtttaagaatgagcaaggtagtgagatcaaccgaattttcaaagaaaacaaatccatcttgaatgaacggaggaaaagggccagcgagaccacacagcacatcaatgccatcaagcgggagattgatgtgaccaaggaggccctgaatttccagaagtcactacgggagaagcaaggcaagtacgaaaacaaggggctgatgatcatcgatgaggaagaattcctgctgatcctcaagctcaaagacctcaagaagcagtaccgcagcgagtaccaggacctgcgtgacctcagggctgagatccagtattgccagcacctagtggatcagtgtcgccaccgcctgctcatggaatttgacatctggtacaatgagtcctttgtcatccctgaggacatgcagatggcactgaagccaggcggcagcatccggccaggcatggtccctgtgaacaggattgtgtctctgggagaagatgaccaggacaaattcagccagctgcagcagagggtgcttcctgagggccctgattccatctccttctacaatgccaaagtcaagatagagcagaagcataattacttgaaaaccatgatgggcctccagcaggcacatagaaaatagaacctcatcgccagtaccttaaaggacaagaccagcaactcccacctactgtagtggagctgctcaaccacctgcccagagctgcagccccctctactccaatgctgggacccagcacagagaacacatttggcctgcatgttgggaggagcatcctccaaggacaaccttgctcatctccacagagcactttgggttttaattcactgtcttatatgcagggacaggataaaataactttctagtttggactttca

SEQ ID NO: 279555 - DNA, 1521 bp, Artificial Sequence
  derived and/or modified sequence
gttgcggcagtcgcgtcccgggagcgtcgctgcctggtgaacgctagaatgggtactaggaaaaaagttcatgcatttgtccgtgtcaaacccaccgatgactttgctcatgaaatgatcagatacggagatgacaaaagaagcattgatattcacttaaaaaaagacattcggagaggagttgtcaataaccaacagacagactggtcgtttaagttggatggagttcttcacgatgcctcccaggacttggtttatgagacagttgcaaaggatgtggtttctcaggccctcgatggctataatggcaccatcatgtgttatgggcagacgggagctggcaagacatacaccatgatgggggcaactgagaattacaagcaccgggggatcctccctcgtgccctgcagcaggtttttaggatgatcgaagaacgccccacacatgccatcactgtgcgtgtttcctacttggaaatctataatgagagcctgtttgatctcctgtccactctgccctatgttggaccctcagtcacaccaatgaccatcgtggaaaaccctcaaggagtcttcattaagggcttgtcagttcacctcacaagtcaggaggaggatgcattcagcctcctttttgagggtgagaccaacaggattatagcctcccacactatgaacaaaaactcttccagatcacactgcattttcaccatctacttagaggcccattcccggaccttatcagaggaaaagtacatcacttccaaaattaacttggtggatctggcaggctcagagaggctggggaagtctgggtctgagggccaagtcctgaaggaagccacctacatcaacaaatcgctctcattcctggagcaggccatcattgcccttggggaccagaagcgggaccacatcccctttcggcagtgcaagctcacccacgctctgaaggactcgttagggggaaactgcaatatggtcctcgtgacaaacatctatggagaagctgcccagttagaagaaacgggttccaggctgtggttataaggccagtatgagcagatggtattaagcacctgccatgtgcaccatgctatcttcactgagatttgccagcaggatgaagctagtcaccactgagcctgccatcaatgaaaagtatgatgctgaggaatggccaggatgtctgggcacagaatgaggaattgtacttttgctgtggaagagacagggtagcttctctgatgatccttcctgtcggcccccaccctaccatgtttcccggcagagaatggtcaagaacctggagaaggaactagcactactcaagcaggagctggctatccatgacagcctgaccaaccgcacctttgtgacctatgaccccatggatgaaatccagattgctgagatcaactcccaggtgcggaggtacctggaggggacactggacgagatcgacataatcagccttagacagatcaaggaggtgttcaaccagttccgggtggttctgag

SEQ ID NO: 279556 - DNA, 2791 bp, Artificial Sequence
  derived and/or modified sequence
gcggccgccgtagttgaatctcctcggcgccggaagccccgccactccgcttcctggttcatgtgcggccttcgttccctcgctatctcgaccttgacttcgcatgtgcatccgccgaagtctttctagatcaatcggccccatctctcgtcttcccgattcggccatgacctcacccgtatcctcgacgtaggacctcggacttcatttccgccaccccgacacttccggaatccccggaagcgacccgttgccatggcgactatgtacacagccaggcagccccgcgtggggagtgcaggtggtttcggttgcggcagtcgcgtcccgggagcgtcgctgcctggtgaacgctagaatgggtactaggaaaaaagttcatgcatttgtccgtgtcaaacccaccgatgactttgctcatgaaatgatcagatacggagatgacaaaagaagcattgatattcacttaaaaaaagacattcggagaggagttgtcaataaccaacagacagactggtcgtttaagttggatggagttcttcacgatgcctcccaggacttggtttatgagacagttgcaaaggatgtggtttctcaggccctcgatggctataatggcaccatcatgtgttatgggcagacgggagctggcaagacatacaccatgatgggggcaactgagaattacaagcaccgggggatcctccctcgtgccctgcagcaggtttttaggatgatcgaagaacgccccacacatgccatcactgtgcgtgtttcctacttggaaatctataatgagagcctgtttgatctcctgtccactctgccctatgttggaccctcagtcacaccaatgaccatcgtggaaaaccctcaaggagtcttcattaagggcttgtcagttcacctcacaagtcaggaggaggatgcattcagcctcctttttgagggtgagaccaacaggattatagcctcccacactatgaacaaaaactcttccagatcacactgcattttcaccatctacttagaggcccattcccggaccttatcagaggaaaagtacatcacttccaaaattaacttggtggatctggcaggctcagagaggctggggaagtctgggtctgagggccaagtcctgaaggaagccacctacatcaacaaatcgctctcattcctggagcaggccatcattgcccttggggaccagaagcgggaccacatcccctttcggcagtgcaagctcacccacgctctgaaggactcgttagggggaaactgcaatatggtcctcgtgacaaacatctatggagaagctgcccagttagaagaaacgctatcttcactgagatttgccagcaggatgaagctagtcaccactgagcctgccatcaatgaaaagtatgatgctgagagaatggtcaagaacctggagaaggaactagcactactcaagcaggagctggctatccatgacagcctgaccaaccgcacctttgtgacctatgaccccatggatgaaatccagattgctgagatcaactcccaggtgcggaggtacctggaggggacactggacgagatcgacataatcagccttagacagatcaaggaggtgttcaaccagttccgggtggttctgagccaacaggaacaggaagtggagtccactttgcgcaggaagtacaccctcattgacaggaatgactttgcagccatttctgctatccagaaggcggggcttgtggatgttgatggccacctagtgggtgagcctgaaggacaaaactttggactcggagtcgcccctttctctaccaaacctgggaagaaagccaagtccaagaagacattcaaagagccactcaggcccgacaccccaccctccaaaccagtggcctttgaggagtttaagaatgagcaaggtagtgagatcaaccgaattttcaaagaaaacaaatccatcttgaatgaacggaggaaaagggccagcgagaccacacagcacatcaatgccatcaagcgggagattgatgtgaccaaggaggccctgaatttccagaagtcactacgggagaagcaaggcaagtacgaaaacaaggggctgatgatcatcgatgaggaagaattcctgctgatcctcaagctcaaagacctcaagaagcagtaccgcagcgagtaccaggacctgcgtgacctcagggctgagatccagtattgccagcacctagtggatcagtgtcgccaccgcctgctcatggaatttgacatctggtacaatgagtcctttgtcatccctgaggacatgcagatggcactgaagccaggcggcagcatccggccaggcatggtccctgtgaacaggattgtgtctctgggagaagatgaccaggacaaattcagccagctgcagcagagggtgcttcctgagggccctgattccatctccttctacaatgccaaagtcaagatagagcagaagcataattacttgaaaaccatgatgggcctccagcaggcacatagaaaatagaacctcatcgccagtaccttaaaggacaagaccagcaactcccacctactgtagtggagctgctcaaccacctgcccagagctgcagccccctctactccaatgctgggacccagcacagagaacacatttggcctgcatgttgggaggagcatcctccaaggacaaccttgctcatctccacagagcactttgggttttaattcactgtcttatatgcagggacaggataaaataactttctagtttggacttt

SEQ ID NO: 279557 - DNA, 6033 bp, Artificial Sequence
  derived and/or modified sequence
ggcgcaacgggcggcggaagtaggagcctgggaaggaagagggaacgggtcctggcggtgctttgcaaagggcccgtgtttctgttgcgggaagctcccgggggtcgcacgtgcgtccgagcccaagcccctcccctccactccccttcctgcgtgccccggagccgccaagcggctacgttcttctcggcccgccgagatggcgctcgaccccgcagaccagcatctcagacatgtcgaaaaagatgttttgatccctaaaataatgagagaaaaggccaaagagaggtgttctgaacaagttcaagattttaccaaatgttgcaagaactctggagttcttatggtagtaaaatgccggaaagaaaattctgcattgaaagaatgtctaactgcttactataatgatccagccttttatgaagaatgcaaaatggaatacctgaaggaaagggaagaattcagaaaaactggaattcctacaaagaaaaggctacagaagcttccaacaagcatgtaggcagatactcaaatgacattcaggaactctaatattcatggaagtcattttatagtccttaaataatggactcaagcatatatgtttgctttaccttaattatggaaatattaactttatctgaaataaatattttatttcaaagttttggtttcttaaatgggaaaggagtagttactgaattgggatatggttttcctggtcattctggaccttttgaaagttttcccacaactatagttctataacagtgatactgattttttagagttcaatatggtccttatattatttttttccagtgtatatgctaatggctaatcatgggagccaaaactaaagaaaagcaggaatggacaaccttcaaaggtgttaataataactaggcagtatagcagaatggctatgaaccagaatccttcctgattctaccacttattagctatacagctgtggaagtaaatctaatacagtttgtgaggatgtactgagtattgcatatagcaggtacacgtacagtgtataagacagtgcttcagacctggtacatgctcttatattggtagttactgttagtagtagtagaggcttatttggaaactatcttagtccattttctgttgctatgggagaatacccaagaccaggtaatttataagaaaagtttgtttggctcacagttctggagtttatttgccagcagcttctggcaagggttttcatactgcatcaaaacataatagggtgtaaaaaatagaaggacaaacaagtgtgggcaaacttttataacagcccgctctcttgagaactaatacctgtaataatggcataaatccattcacgagggctccagcctcatcaccctattacctcttaaaggctccatttcttagtcctgttaaattagcaactaagtttccaacacatgaactcttgggggacacatcaaaccatagcagaaccatagataaggagatacctacttatatgaattaattttacttacatctttgatgtagaattttctaaaacataatgttcttaacctgataacttgttagtcctttaatctttcattttgaaaagttatatttctaagtgaattaccattctgtaacatagtaatggactcaggaagtagtataaaaaatttatgtcccaatttaataatttgagcttttatattaaaagttattttttccccatgagctgttaactcttccacagccattgtaactagtttcaagataagtaaattttacgtatattttcacagtcctcattaaaatcacaaatagaaattactacccactaagacaaggtttaactttccctaatcccatgcaatagatctgagagatttttttttaagaaagaatttaaataggacactaaagaatcaattcaagttccacactttactcttgagtgaaccactcaaaaaactattttacttttatttgaaatacaaagaaaccacattttcccaggccacagatcaaaaggagggagattactagagcagacaaaagcaaagcaaatatagaaatctagagaccacacagcataggggcaaacatgcccatatttccacattgacctttggtattggtgcatttcctagagcacaggaagttaactgtttttagagataaatgaaaatggaagagttactttaagaagctagtgaaatatacaatctattttatagctttgattaaaatcagaagtagcccacttcatgtagaaaattcacttatgtacatgttgctttccccatagaagccagattagattacacagtataaataatatgttcatcctccttatgtcaaagactaaaccattcattgtagccttcagaatacccatgtgtatccatactgaagatttttttcacctggtacatctgtctcagttgtgtcttgcttgcttatgggtgcctctgttgatattattccctgttaatatgtggtaacccacaggttttttaccccttaagatacaccttctccaagtagcctttctgaattaagatcagtactttgttgtcacatgattcagctcttcaagtctgaattttcccatttattttggttttctaatgtttcacataggcatgttcctgcttttaagaattcagttccattttggcagcaactcagtaagtcttacagatgtaaattttactttagctaataagggagcaagaggaaggaataggtggctttttgttatgttttcttcattctgtcgatttatggatgtactgaattgaaccttataaaaagaaatctaaagattccaaaggaagctctttagagcaagtttcagctagtatgaaagaagtcaacataaaatattcaattttaaatagattcataagctacagatgggccactgttttttggttgtttgaattttacctagaacagagatatcaagtgtagatttaaaagcttctagctgggtaaaaaatttttggctaatctttccttactaaagaaccttatacatcatttgtctaacactttaaactgtcacagtcactgactttttagtatacctgtttgatagctatcatcactgtactgtttaaatggaaaataattttctccactcaaaagctggtttaacaaatgtctattgtatgaatcatattaacaaccaacaattagtactagattttgagatctataggcaaggacaatatttcacatccacttcaatttcaaacaaaaatatttattttaattaaacaatttcttggtattgttcaaaacattaatcaagcaattatctcataagactttttttctttacaaaggaaaatttccaattttggttttaaaaaaggcaaaccagtaagctacattagagatcagatataatatacagcctatgcagccacatgagaaatagtttttgctgctttgttattacacaggtagttgcttccttcagctaaagcctggagtattgtatttcttttatgcatattgggtttggttctattacttggcaggagattgtactcccctgagtcagctgtgttcattggtcagaataaattccagcatctgacaccaattccattaatcacagacaagcttgaataagtgtaagataatagaaaaaaatatctagtgaatggcgaacattgtctatgtatgtatgctattcagtaatacagtagaagagatctgagatattgagttcaagatatatgaaactgtctatcaaaaaggataaaagtcctcctacatgaaatactttaattcaggcaaaaggtgtatgaaccaagtaaatctccaccctgaaagaacttaaatttccatgtgaagccatctttatttccttctttatttccaaataattggccacttagaataagtgtggacatttcatgatcgacaatatcaatacagcccaaaccctgatttctatgattaaaaataataattttaaatcactttctcaataaatagaatattacatttcaacacaaagtctaacaatttagaagctgctctacacaatgtgcagctagctgtagtctctttgaagaaaatgactttttatcattacacacatttatgtttatattatggcccacagaagggcagattagactgaaatctgtgtgatgctccttctactacttattgaatagtgtgtagggttacaatcatttgtttacaccccagagtttttcaactatttcatttttttttttttttttcccaattaggacttaaggaatgtgctgggacaaagttggcttcagtgatcaggttgtttcaagtcttagaattcaaacttcaattctaaaaaaattttatcaacaaaacactgtgaccaaaaaatcactttaaatcttaaatattgaaacgcaatagcatataaagatggtataacctaagatgcttttatttcattatattttcaatatctttacgcattataacaacagaaatgtaacctactcacattgccatttgttccattatgcaatttgaagaaacatgttttccttttatttttatgaacagatatttagacatttcacattttgtaaaaccacgtctacaatctccaattccattcttctgagaggcaaaattttacaattaatatagaaggcagagttttttaaacaccttaagtttacttattaattagtatagtagcatatttcagattcttagaatatggagctagagggtgctctttcatactagaaaaccaactatgttggtttttgtactattgtacagtgtgttcaaatatagatactgaagacctctgcaaaattttaatcaaaatctcctttcagtttgttaaataatttcttgggaggaccactgaaagagataagtgtcctcatggtgaaatcgtgaatctcttccaaattaattcttataaaggcagttctgattatgttgatccaagtaatgcagtggtggaaggttgggtaaaggcaaagttttagttttagtttccccaaatgctgtctcacttgatttaggaggacttggaaatacccaggaattgtcttccagagaatttctgccataagaactgtgttcctgaaagcatgtaccatcattaggaatggatctctcattgtctgtccatgattggaggattgctttctctgataaaacctttacatctcctggtaaaggggaagatgtggtatgacaaagagctttgccatttggtaagagagggggatgtcttgtgtatgttgcagtaaaattcatcaagtgcagttttgtgctgtctcttccaaggtcttcactgcatcctacaggggcacaggctaaaaagaaaacacagactaaatgtcagttttcattacatttgtgatcataaaattcgataacacttcaccaatttgaattctagaactggtgatgaaattaagatttccaagttagtgtgatcattgaggcactgtgactaggagataaatgacagatgatctgagttttaatcctggatcagcaatttactgtgactttagatatttgtctcttagctgctcctgatgtctctttccttgtctgcagaatggatatagaattcctgtcccaactatgtcatagagcttttaaaagatgaagaactacatatttttaaaagttggaaactaatacagttaaaatacaaataaagatcctgttcttggctcttattgtggctggagaaggattgcagactgttcacatgtcagtggggactgagacagttcttaagttttagcattttttagttaaatataatattcctttgctcaaactctttgtccacaggcagtccaaaagcaaattttttagaaataattgcatttttaattggtgagacccaaatgaagtttttatatatcaaaggcttttatggataaagcagtttaaataaaatttgtgaaatcttgtttcttgtaaaacacagcaaatgttaatgctactgtggtcacaatgtaggtaaagtaaaaaaaaaaaaaaaaa

SEQ ID NO: 279558 - protein, 1626 aa, Artificial Sequence
  derived and/or modified sequence
MAKSGGCGAGAGVGGGNGALTWVTLFDQNNAAKKEESETANKNDSSKKLSVERVYQKKTQLEHILLRPDTYIGSVEPLTQFMWVYDEDVGMNCREVTFVPGLYKIFDEILVNAADNKQRDKNMTCIKVSIDPESNIISIWNNGKGIPVVEHKVEKVYVPALIFGQLLTSSNYDDDEKKVTGGRNGYGAKLCNIFSTKFTVETACKEYKHSFKQTWMNNMMKTSEAKIKHFDGEDYTCITFQPDLSKFKMEKLDKDIVALMTRRAYDLAGSCRGVKVMFNGKKLPVNGFRSYVDLYVKDKLDETGVALKVIHELANERWDVCLTLSEKGFQQISFVNSIATTKGGRHVDYVVDQVVGKLIEVVKKKNKAGVSVKPFQVKNHIWVFINCLIENPTFDSQTKENMTLQPKSFGSKCQLSEKFFKAASNCGIVESILNWVKFKAQTQLNKKCSSVKYSKIKGIPKLDDANDAGGKHSLECTLILTEGDSAKSLAVSGLGVIGRDRYGVFPLRGKILNVREASHKQIMENAEINNIIKIVGLQYKKSYDDAESLKTLRYGKIMIMTDQDQDGSHIKGLLINFIHHNWPSLLKHGFLEEFITPIVKASKNKQELSFYSIPEFDEWKKHIENQKAWKIKYYKGLGTSTAKEAKEYFADMERHRILFRYAGPEDDAAITLAFSKKKIDDRKEWLTNFMEDRRQRRLHGLPEQFLYGTATKHLTYNDFINKELILFSNSDNERSIPSLVDGFKPGQRKVLFTCFKRNDKREVKVAQLAGSVAEMSAYHHGEQALMMTIVNLAQNFVGSNNINLLQPIGQFGTRLHGGKDAASPRYIFTMLSTLARLLFPAVDDNLLKFLYDDNQRVEPEWYIPIIPMVLINGAEGIGTGWACKLPNYDAREIVNNVRRMLDGLDPHPMLPNYKNFKGTIQELGQNQYAVSGEIFVVDRNTVEITELPVRTWTQVYKEQVLEPMLNGTDKTPALISDYKEYHTDTTVKFVVKMTEEKLAQAEAAGLHKVFKLQTTLTCNSMVLFDHMGCLKKYETVQDILKEFFDLRLSYYGLRKEWLVGMLGAESTKLNNQARFILEKIQGKITIENRSKKDLIQMLVQRGYESDPVKAWKEAQEKAAEEDETQNQHDDSSSDSGTPSGPDFNYILNMSLWSLTKEKVEELIKQRDAKGREVNDLKRKSPSDLWKEDLAAFVEELDKVESQEREDVLAGMSGKAIKGKVGKPKVKKLQLEETMPSPYGRRIIPEITAMKADASKKLLKKKKGDLDTAAVKVEFDEEFSGAPVEGAGEEALTPSVPINKGPKPKREKKEPGTRVRKTPTSSGKPSAKKVKKRNPWSDDESKSESDLEETEPVVIPRDSLLRRAAAERPKYTFDFSEEEDDDADDDDDDNNDLEELKVKASPITNDGEDEFVPSDGLDKDEYTFSPGKSKATPEKSLHDKKSQDFGNLFSFPSYSQKSEDDSAKFDSNEEDSASVFSPSFGLKQTDKVPSKTVAAKKGKPSSDTVPKPKRAPKQKKVVEAVNSDSDSEFGIPKKTTTPKGKGRGAKKRKASGSENEGDYNPGRKTSKTTSKKPKKTSFDQDSDVDIFPSDFPTEPPSLPRTGRARKEVKYFAESDEEEDDVDFAMFN

SEQ ID NO: 279559 - protein, 57 aa, Artificial Sequence
  derived and/or modified sequence
TLFDQNNAAKKEESETANKNDSSKKLSVERVYQKKTQLEHILLRPDTYIGSVEPLTQ

SEQ ID NO: 279560 - DNA, 4881 bp, Artificial Sequence
  derived and/or modified sequence
atggccaagagcggcggctgcggcgccggcgccggcgtgggcggcggcaacggcgccctgacctgggtgaccctgttcgaccagaacaacgccgccaagaaggaggagagcgagaccgccaacaagaacgacagcagcaagaagctgagcgtggagagagtgtaccagaagaagacccagctggagcacatcctgctgagacccgacacctacatcggcagcgtggagcccctgacccagttcatgtgggtgtacgacgaggacgtgggcatgaactgcagagaggtgaccttcgtgcccggcctgtacaagatcttcgacgagatcctggtgaacgccgccgacaacaagcagagagacaagaacatgacctgcatcaaggtgagcatcgaccccgagagcaacatcatcagcatctggaacaacggcaagggcatccccgtggtggagcacaaggtggagaaggtgtacgtgcccgccctgatcttcggccagctgctgaccagcagcaactacgacgacgacgagaagaaggtgaccggcggcagaaacggctacggcgccaagctgtgcaacatcttcagcaccaagttcaccgtggagaccgcctgcaaggagtacaagcacagcttcaagcagacctggatgaacaacatgatgaagaccagcgaggccaagatcaagcacttcgacggcgaggactacacctgcatcaccttccagcccgacctgagcaagttcaagatggagaagctggacaaggacatcgtggccctgatgaccagaagagcctacgacctggccggcagctgcagaggcgtgaaggtgatgttcaacggcaagaagctgcccgtgaacggcttcagaagctacgtggacctgtacgtgaaggacaagctggacgagaccggcgtggccctgaaggtgatccacgagctggccaacgagagatgggacgtgtgcctgaccctgagcgagaagggcttccagcagatcagcttcgtgaacagcatcgccaccaccaagggcggcagacacgtggactacgtggtggaccaggtggtgggcaagctgatcgaggtggtgaagaagaagaacaaggccggcgtgagcgtgaagcccttccaggtgaagaaccacatctgggtgttcatcaactgcctgatcgagaaccccaccttcgacagccagaccaaggagaacatgaccctgcagcccaagagcttcggcagcaagtgccagctgagcgagaagttcttcaaggccgccagcaactgcggcatcgtggagagcatcctgaactgggtgaagttcaaggcccagacccagctgaacaagaagtgcagcagcgtgaagtacagcaagatcaagggcatccccaagctggacgacgccaacgacgccggcggcaagcacagcctggagtgcaccctgatcctgaccgagggcgacagcgccaagagcctggccgtgagcggcctgggcgtgatcggcagagacagatacggcgtgttccccctgagaggcaagatcctgaacgtgagagaggccagccacaagcagatcatggagaacgccgagatcaacaacatcatcaagatcgtgggcctgcagtacaagaagagctacgacgacgccgagagcctgaagaccctgagatacggcaagatcatgatcatgaccgaccaggaccaggacggcagccacatcaagggcctgctgatcaacttcatccaccacaactggcccagcctgctgaagcacggcttcctggaggagttcatcacccccatcgtgaaggccagcaagaacaagcaggagctgagcttctacagcatccccgagttcgacgagtggaagaagcacatcgagaaccagaaggcctggaagatcaagtactacaagggcctgggcaccagcaccgccaaggaggccaaggagtacttcgccgacatggagagacacagaatcctgttcagatacgccggccccgaggacgacgccgccatcaccctggccttcagcaagaagaagatcgacgacagaaaggagtggctgaccaacttcatggaggacagaagacagagaagactgcacggcctgcccgagcagttcctgtacggcaccgccaccaagcacctgacctacaacgacttcatcaacaaggagctgatcctgttcagcaacagcgacaacgagagaagcatccccagcctggtggacggcttcaagcccggccagagaaaggtgctgttcacctgcttcaagagaaacgacaagagagaggtgaaggtggcccagctggccggcagcgtggccgagatgagcgcctaccaccacggcgagcaggccctgatgatgaccatcgtgaacctggcccagaacttcgtgggcagcaacaacatcaacctgctgcagcccatcggccagttcggcaccagactgcacggcggcaaggacgccgccagccccagatacatcttcaccatgctgagcaccctggccagactgctgttccccgccgtggacgacaacctgctgaagttcctgtacgacgacaaccagagagtggagcccgagtggtacatccccatcatccccatggtgctgatcaacggcgccgagggcatcggcaccggctgggcctgcaagctgcccaactacgacgccagagagatcgtgaacaacgtgagaagaatgctggacggcctggacccccaccccatgctgcccaactacaagaacttcaagggcaccatccaggagctgggccagaaccagtacgccgtgagcggcgagatcttcgtggtggacagaaacaccgtggagatcaccgagctgcccgtgagaacctggacccaggtgtacaaggagcaggtgctggagcccatgctgaacggcaccgacaagacccccgccctgatcagcgactacaaggagtaccacaccgacaccaccgtgaagttcgtggtgaagatgaccgaggagaagctggcccaggccgaggccgccggcctgcacaaggtgttcaagctgcagaccaccctgacctgcaacagcatggtgctgttcgaccacatgggctgcctgaagaagtacgagaccgtgcaggacatcctgaaggagttcttcgacctgagactgagctactacggcctgagaaaggagtggctggtgggcatgctgggcgccgagagcaccaagctgaacaaccaggccagattcatcctggagaagatccagggcaagatcaccatcgagaacagaagcaagaaggacctgatccagatgctggtgcagagaggctacgagagcgaccccgtgaaggcctggaaggaggcccaggagaaggccgccgaggaggacgagacccagaaccagcacgacgacagcagcagcgacagcggcacccccagcggccccgacttcaactacatcctgaacatgagcctgtggagcctgaccaaggagaaggtggaggagctgatcaagcagagagacgccaagggcagagaggtgaacgacctgaagagaaagagccccagcgacctgtggaaggaggacctggccgccttcgtggaggagctggacaaggtggagagccaggagagagaggacgtgctggccggcatgagcggcaaggccatcaagggcaaggtgggcaagcccaaggtgaagaagctgcagctggaggagaccatgcccagcccctacggcagaagaatcatccccgagatcaccgccatgaaggccgacgccagcaagaagctgctgaagaagaagaagggcgacctggacaccgccgccgtgaaggtggagttcgacgaggagttcagcggcgcccccgtggagggcgccggcgaggaggccctgacccccagcgtgcccatcaacaagggccccaagcccaagagagagaagaaggagcccggcaccagagtgagaaagacccccaccagcagcggcaagcccagcgccaagaaggtgaagaagagaaacccctggagcgacgacgagagcaagagcgagagcgacctggaggagaccgagcccgtggtgatccccagagacagcctgctgagaagagccgccgccgagagacccaagtacaccttcgacttcagcgaggaggaggacgacgacgccgacgacgacgacgacgacaacaacgacctggaggagctgaaggtgaaggccagccccatcaccaacgacggcgaggacgagttcgtgcccagcgacggcctggacaaggacgagtacaccttcagccccggcaagagcaaggccacccccgagaagagcctgcacgacaagaagagccaggacttcggcaacctgttcagcttccccagctacagccagaagagcgaggacgacagcgccaagttcgacagcaacgaggaggacagcgccagcgtgttcagccccagcttcggcctgaagcagaccgacaaggtgcccagcaagaccgtggccgccaagaagggcaagcccagcagcgacaccgtgcccaagcccaagagagcccccaagcagaagaaggtggtggaggccgtgaacagcgacagcgacagcgagttcggcatccccaagaagaccaccacccccaagggcaagggcagaggcgccaagaagagaaaggccagcggcagcgagaacgagggcgactacaaccccggcagaaagaccagcaagaccaccagcaagaagcccaagaagaccagcttcgaccaggacagcgacgtggacatcttccccagcgacttccccaccgagccccccagcctgcccagaaccggcagagccagaaaggaggtgaagtacttcgccgagagcgacgaggaggaggacgacgtggacttcgccatgttcaactag

SEQ ID NO: 279561 - DNA, 4881 bp, Artificial Sequence
  derived and/or modified sequence
atggcgaagagcggagggtgcggcgcaggggcgggggtgggaggcgggaacggcgcactcacgtgggttacactgttcgatcagaacaacgccgctaagaaggaagagtctgaaaccgccaataagaacgacagcagtaagaagctgagcgtcgaacgggtgtatcaaaaaaaaacacagctggaacacattcttttgagaccagacacctacattggctctgttgagccgctgacacagttcatgtgggtttacgatgaagatgtcgggatgaactgtagggaagttaccttcgtaccaggactgtacaaaatcttcgacgagattttagtgaacgctgctgataacaagcagagggacaaaaatatgacatgcataaaggtttcaattgatcctgaatctaatatcattagcatttggaataacggaaaaggtatccccgtggttgagcataaagtagagaaagtttatgttcctgctctcatattcgggcagctgctgaccagttccaactacgatgacgacgagaagaaagttacgggagggcgaaacggctatggggctaagctgtgcaatattttctctacaaagtttaccgtggaaacagcctgcaaggagtacaaacactcctttaaacagacttggatgaataacatgatgaagacaagcgaggcaaagattaagcactttgacggggaagattacacatgtatcacttttcagcccgacttgtctaagttcaagatggaaaagctggacaaagatatagttgccctgatgaccaggagagcctatgaccttgccggatcctgcaggggagtgaaggtaatgtttaatggcaaaaagctgcccgtcaacggattccgctcttatgtggatctgtacgtcaaagacaagctggacgagactggggtggctctcaaggtgatccacgagctagcaaatgaaagatgggatgtgtgcttgacgctctccgaaaaaggctttcagcagatctctttcgtcaattctatcgccacaacaaagggcggtcggcacgtcgattacgtcgtggatcaggtggtggggaaattaatcgaggttgtaaagaagaagaacaaggctggcgtctcggtcaaaccgttccaggtgaaaaaccatatctgggtgttcatcaattgtctgatcgaaaacccgacgtttgattctcagactaaagagaatatgacactccagcctaagtcctttggcagcaagtgccagctatctgagaaattttttaaggcagcctcaaactgtggcatcgtcgagtcaattctcaattgggtgaagttcaaggctcagacacagctgaataaaaaatgctcctccgtgaaatactctaagatcaaaggaattcccaaactggacgatgcaaatgacgccggcggcaaacactctctggagtgtactctgattctgactgaaggagatagcgccaaaagtctggcagtaagcggtctgggagtcattgggcgtgataggtatggcgttttccccctgcgtggaaagattctaaacgtccgggaagcgtcacataagcaaataatggaaaacgcggagatcaataatatcattaaaatagtcggattgcaatacaagaaaagctacgatgatgccgagtcattgaaaacattgcgctatggtaagatcatgatcatgacggatcaggaccaggatggctcgcatattaagggcctgctgatcaatttcatccaccataactggccttccctgcttaagcatggattcctggaggaattcatcactcccatcgtgaaagccagcaagaataaacaagagttatcattttactccataccagagtttgacgagtggaaaaaacacatcgaaaaccagaaggcctggaagattaaatactataagggtctgggaacgagcaccgctaaagaagctaaggagtacttcgcagatatggaacgccatcgtatcctctttcgatacgctgggccagaggatgacgccgcaattactcttgccttcagtaagaagaaaatcgacgacagaaaggagtggctcactaacttcatggaggatcgtcgacagcgaagactgcacggactaccagagcagtttctgtacggcactgctacgaagcacctaacttacaatgatttcattaataaggagctgatcctcttctccaacagcgacaatgaacgcagcatcccgagtctggtggatggatttaagcctgggcaaaggaaggtgttgttcacatgcttcaaaaggaacgataagagagaagttaaggtggcccaattggctgggtcagttgctgaaatgagcgcctatcatcatggggagcaggcactcatgatgacaatcgttaatcttgcccaaaactttgtggggtcaaataacattaatttgctgcagccgattggccagttcggtaccagactgcacggcggcaaggacgccgcctcacctaggtatatctttacgatgctgtcgaccttggccagattgctcttcccagcggttgacgataacctgctcaaatttctgtatgatgacaatcaaagggtggaacctgagtggtacatacccattatccccatggtgttgatcaacggggcagaaggaatcggaaccggctgggcatgtaagctccctaattatgatgcccgggagatagtgaacaatgtcaggcggatgctagacggattagacccacaccccatgctgcccaactacaaaaatttcaaaggaaccatccaggaactcggacagaatcagtatgctgtgtctggcgaaatttttgtggtagacagaaatacagttgaaataactgagcttcctgtgaggacatggacacaggtgtacaaggagcaggtacttgagcccatgctgaatgggactgacaagactccagccctgattagcgactacaaagagtatcataccgataccaccgtgaaatttgtcgtcaagatgacagaggagaagctagctcaggctgaagctgcagggctgcataaggtgttcaagcttcagacgactttgacctgcaattctatggtgctgtttgatcatatgggctgcctgaaaaagtatgaaactgttcaggatatacttaaggaattcttcgatctgaggctcagctactatgggcttcgcaaagagtggctggtaggcatgctcggtgctgaaagcaccaaacttaacaatcaggctcggttcattcttgaaaagattcagggaaagataaccatcgaaaatcgatctaagaaagacctgatacagatgctagtgcagcgaggatacgagtccgaccctgtaaaggcctggaaagaggcccaggagaaggctgctgaggaagacgagactcaaaaccagcatgatgacagctcctctgactccggcactccatccggacccgacttcaattatatcctgaacatgagtctctggtcactgacgaaagagaaagttgaggaactgattaaacagagagatgcgaaggggagggaggtaaatgatctgaaaaggaagagccctagcgatctttggaaggaagacctggcagcattcgtcgaagaattggacaaggtcgaatcccaggagcgggaagacgtcctcgctggtatgtcaggaaaggctatcaaagggaaggtggggaagcccaaggttaaaaaactccagttagaggaaacgatgcctagcccatacggccgaagaataatcccagaaattaccgctatgaaggccgacgcttctaagaagttgctaaagaagaaaaagggtgatttggacaccgcagcagtgaaagttgagttcgacgaggaattttcgggggcacctgttgaaggagccggggaggaagctcttacaccctccgtgcctattaacaaaggacctaagcccaagcgcgagaaaaaagagcctggcacccgcgtacggaaaacacctacatcctctggtaaacccagcgctaagaaggtgaaaaagcggaacccctggtctgacgatgagtctaagagtgaatctgatctcgaggagactgagccagtggtcatcccgagggactccctgcttaggcgggccgcagccgagcgcccaaagtacacgtttgatttttccgaggaagaggacgatgacgccgatgatgacgacgatgacaacaacgatctcgaggaactcaaagtcaaggcgagccccattacaaacgacggtgaggacgagttcgtcccatctgacggactggacaaagacgaatacactttttccccaggcaaaagcaaggccactcccgagaagagtctgcatgacaaaaaatcacaagattttggcaacttgttctccttcccaagttactcacagaaatcagaggatgacagcgccaagttcgattcaaacgaagaggattctgcctctgtattttccccctcgttcggactaaagcagactgataaagttcctagcaagacagtggcggccaaaaagggaaagccttcctccgatacggtacctaaacctaaaagagctcctaaacagaagaaggtcgtggaggccgtgaacagcgatagtgatagcgaattcgggattcctaaaaaaacgacaacacccaaggggaaaggccggggcgccaaaaagcgcaaggcaagcggaagcgaaaacgagggtgactacaatccaggacgcaaaacctcaaagacgacctccaagaaaccgaagaagacatcattcgatcaggattctgacgtcgatatctttccttccgactttccaactgaaccaccttctctcccacgaaccgggcgggcgcgtaaagaagtgaaatactttgccgaatcagacgaggaagaagatgatgtggatttcgcgatgtttaattag

SEQ ID NO: 279562 - DNA, 4881 bp, Artificial Sequence
  derived and/or modified sequence
atggccaagagcggcggctgtggggccggggccggcgtgggcggcggcaatggagccctgacctgggtgaccctgtttgaccagaacaatgctgccaagaaggaggagagcgagacagccaacaagaatgacagcagcaagaagctgtctgtggagcgggtgtaccagaagaagacccagctggagcacatcctgctgcggccagacacctacatcggctctgtggagcccctgacccagttcatgtgggtgtatgatgaagatgtgggcatgaactgccgggaggtgacctttgtgcccggcctgtacaagatctttgatgagatcctggtgaatgctgctgacaacaagcagagggacaagaacatgacctgcatcaaggtgtccattgatcctgagagcaacatcatcagcatctggaacaacgggaagggcatccctgtggtggagcacaaggtggagaaggtgtatgtgcctgccctgatcttcggccagctgctgaccagcagcaactatgatgatgatgagaagaaggtgactggaggaagaaatggctacggggccaagctgtgcaacatcttcagcaccaagttcaccgtggagacagcctgcaaggagtacaagcacagcttcaagcagacctggatgaacaacatgatgaagaccagcgaggccaagatcaagcactttgatggagaggactacacctgcatcaccttccagcctgacctgagcaagttcaagatggagaagctggacaaggacatcgtggccctgatgacccggcgggcctatgacctggccggcagctgccggggcgtgaaggtgatgtttaatggcaagaagctgcctgtgaatggcttccgctcctatgtggacctgtatgtgaaggacaagctggatgaaacaggagtggccctgaaggtgattcatgagctggccaatgaacgctgggatgtgtgcctgaccctgtctgagaagggcttccagcagatcagctttgtgaacagcatcgccaccaccaagggcggccgccacgtggactatgtggtggaccaggtggtgggcaagctgattgaggtggtgaagaagaagaacaaggccggcgtgtctgtgaagcccttccaggtgaagaaccacatctgggtgttcatcaactgcctgattgagaaccccacctttgacagccagaccaaggagaacatgaccctgcagcccaagagctttggcagcaagtgccagctgtctgagaagttcttcaaggccgccagcaactgtggcatcgtggagagcatcctgaactgggtgaagttcaaggcccagacccagctgaacaagaagtgcagctctgtgaagtacagcaagatcaagggcatccccaagctggatgatgccaatgatgctgggggcaagcacagcctggagtgcaccctcatcctgacagaaggagacagcgccaagagcctggccgtgtctggcctgggcgtgattggccgggacagatatggagtcttccccctgcggggcaagatcctgaatgtgcgggaggccagccacaagcagatcatggagaatgctgagatcaacaacatcatcaagatcgtgggcctgcagtacaagaagagctatgatgatgctgagagcctgaagaccctgcgctatggcaagatcatgatcatgacagaccaggaccaggacggcagccacatcaagggcctgctgatcaacttcatccaccacaactggcccagcctgctgaagcacggcttcctggaggagttcatcacccccatcgtgaaggccagcaagaacaagcaggagctgtccttctacagcatccctgagtttgatgagtggaagaagcacatcgagaaccagaaggcctggaagatcaagtactacaagggcctgggcaccagcacagccaaggaggccaaggagtactttgctgacatggagcggcaccgcatcctcttccgctatgccggcccagaagatgatgctgccatcaccctggccttcagcaagaagaagattgatgacaggaaggagtggctgaccaacttcatggaggaccggcggcagaggcggctgcacggcctgcctgagcagttcctgtatggaacagccaccaagcacctgacctacaatgacttcatcaacaaggagctgatcctcttcagcaacagcgacaatgaaagaagcatccccagcctggtggatggcttcaagccaggccagaggaaggtgctcttcacctgcttcaagagaaatgacaagcgggaggtgaaggtggcccagctggccggctctgtggccgagatgtctgcctaccaccacggggagcaggccctgatgatgaccatcgtgaacctggcccagaactttgtgggcagcaacaacatcaacctgctgcagcccatcggccagtttggcacccggctgcacggcggcaaggatgctgccagcccccgctacatcttcaccatgctgagcaccctggcccggctgctcttccctgctgtggatgacaacctgctgaagttcctgtatgatgacaaccagagggtggagcctgagtggtacatccccatcatccccatggtgctgatcaacggggctgagggcattggaacaggctgggcctgcaagctgcccaactatgatgcccgggagatcgtgaacaacgtgcggaggatgctggatggcctggacccccaccccatgctgcccaactacaagaacttcaagggcaccatccaggagctgggccagaaccagtatgctgtgtctggagagatctttgtggtggacaggaacacagtggagatcacagagctgcctgtgaggacctggacccaggtgtacaaggagcaggtgctggagcccatgctgaatggaacagacaagaccccagccctgatcagtgactacaaggagtaccacacagacaccaccgtgaagtttgtggtgaagatgacagaggagaagctggcccaggccgaggccgccggcctgcacaaggtgttcaagctgcagaccaccctgacctgcaacagcatggtgctgtttgaccacatgggctgcctgaagaagtatgaaacagtgcaggacatcctgaaggagttctttgacctgcggctgagctactacggcctgaggaaggagtggctggtgggcatgctgggcgctgagagcaccaagctgaacaaccaggcccgcttcatcctggagaagatccagggcaagatcaccattgaaaatagaagcaagaaggacctgatccagatgctggtgcagaggggctatgaaagtgaccctgtgaaggcctggaaggaggcccaggagaaggctgctgaagaagatgagacccagaaccagcatgatgacagcagcagtgacagcggcaccccatctggccctgacttcaactacatcctgaacatgagcctgtggagcctgaccaaggagaaggtggaggagctgatcaagcagagagatgccaagggccgggaggtgaatgacctgaagaggaagagccccagcgacctgtggaaggaggacctggccgcctttgtggaggagctggacaaggtggagagccaggagagagaagatgtgctggccggcatgtctgggaaggccatcaagggcaaggtgggcaagcccaaggtgaagaagctgcagctggaggagaccatgcccagcccctacggccgccgcatcatccctgagatcacagccatgaaggcagatgccagcaagaagctgctgaagaagaagaagggggacctggacacagctgctgtgaaggtggagtttgatgaggagttcagcggggcccctgtggagggcgctggggaggaggccctgacccccagcgtgcccatcaacaagggccccaagcccaagcgggagaagaaggagcccggcaccagggtgaggaagacccccaccagcagcggcaagcccagcgccaagaaggtgaagaagaggaacccctggagcgatgatgagagcaagtctgagagtgacctggaggagacagagcctgtggtgatcccccgggacagcctgctgcggcgggctgctgctgagcggcccaagtacacctttgacttcagcgaggaggaggatgatgatgctgatgatgatgatgatgacaacaatgacctggaggagctgaaggtgaaggccagccccatcaccaatgatggagaagatgaatttgtgcccagtgatggcctggacaaggatgagtacaccttcagccctgggaagagcaaggccaccccagagaagagcctgcatgacaagaagagccaggactttggaaacctcttctccttccccagctacagccagaagtcagaagatgattctgccaagtttgacagcaatgaagaagattctgcctctgtgttcagccccagctttggcctgaagcagacagacaaggtgcccagcaagacagtggccgccaagaagggcaagcccagcagtgacacagtgcccaagcccaagagggcccccaagcagaagaaggtggtggaggccgtgaacagcgacagcgacagcgagtttggcatccccaagaagaccaccacccccaagggcaagggccgcggggccaagaagaggaaggccagcggctctgaaaatgaaggagactacaaccctggcaggaagaccagcaagaccaccagcaagaagcccaagaagaccagctttgaccaggacagtgatgtggacatcttccccagcgacttccccacagagccccccagcctgcccaggacaggccgggccaggaaggaggtgaagtactttgctgagagtgatgaggaggaggatgatgtggactttgccatgttcaactag

SEQ ID NO: 279563 - DNA, 4881 bp, Artificial Sequence
  derived and/or modified sequence
atggccaagagcggcggctgcggcgccggcgccggcgtgggcggcgggaatggagcactgacttgggttaccctcttcgaccagaataacgcagctaaaaaagaggagagcgagaccgccaacaaaaatgattccagcaaaaagttgtctgtggaacgtgtataccaaaagaaaacacagctcgaacatatcttgctcagacccgacacctacattggaagcgtagagccattgacccagttcatgtgggtgtacgacgaagatgtcggtatgaattgtcgagaggtcacctttgtgccaggcctgtataagatctttgacgagattctagttaatgccgctgacaacaagcaacgtgacaagaatatgacctgtattaaggtgtccatcgacccggagtcaaacatcatcagtatatggaataatggtaagggtattcctgtggttgaacacaaggtggaaaaggtttacgtccctgccctgatttttgggcagttacttacatcaagcaattatgatgacgacgaaaagaaggttacaggcgggcggaatggctacggagccaagctctgcaatattttttcaaccaagttcacagttgaaaccgcatgtaaagagtacaaacatagttttaaacagacctggatgaacaacatgatgaaaacatctgaagccaaaattaaacacttcgacggcgaggattatacctgtattaccttccagcctgacctgtctaagttcaagatggagaagctcgacaaggatatcgttgccctgatgacacgtcgtgcctatgatctggccggatcctgtagaggcgttaaggtgatgttcaacggtaaaaagctgccggtgaatggattcagatcctacgttgacctctacgttaaggacaagttggatgaaactggagtcgcattgaaggtgatacacgaactagcaaacgagcgatgggatgtttgtctcacgctgtcagagaagggttttcagcaaatatcctttgttaactccatcgccaccacaaagggaggcaggcacgtggattacgtggtggatcaggttgtcggtaaacttattgaggtcgtcaaaaagaagaataaagctggggtgtctgtgaaaccctttcaggtcaagaaccacatctgggtgttcatcaattgcctgattgagaacccaaccttcgacagtcagaccaaagagaatatgaccctgcagccaaagagctttggctctaagtgccaactgtctgagaagtttttcaaagccgcaagtaactgtggaattgtggaaagcattctgaattgggtgaaattcaaggcgcaaactcagctcaacaagaagtgtagttccgtcaagtattcaaaaataaagggaattcccaagcttgacgatgccaacgatgcagggggaaagcatagcctcgagtgtacgttgatcctcaccgagggagacagcgccaagtcactggctgttagcggcctgggcgttattggaagggatagatatggcgtgttcccacttcgagggaaaatcttgaacgtgagagaggctagccataagcagataatggagaacgcggagattaacaatatcatcaaaatcgtggggctgcagtacaagaaatcctatgacgacgccgaaagtctgaagactctccgttacggtaagattatgattatgactgatcaggaccaggatggatcccatatcaagggcctgctcatcaactttattcaccacaattggccatcactcctcaagcacgggtttcttgaggagtttatcactccaatcgttaaagcatcaaaaaataagcaggagctgagcttctactctatccctgagtttgacgaatggaagaagcacattgagaatcagaaggcctggaagattaaatactacaaaggactcggaaccagcacagctaaagaggccaaggagtatttcgccgacatggaaaggcatcgcattctcttccggtatgctggccctgaggacgatgcggctattacactggctttcagtaagaagaagattgatgataggaaggagtggctgaccaactttatggaggatagacgtcagcgtcgcctgcatggtctccctgaacagtttctctacggcacggccactaagcatctgacatacaatgacttcattaacaaggagcttatcctattttccaacagtgacaacgagagaagtattccttctcttgtggatggattcaaaccaggccaacggaaggttctgttcacctgcttcaagcggaacgataaaagggaggtcaaggtggcccaactcgcaggctcggtggctgaaatgagtgcgtaccaccatggcgaacaggccttgatgatgacgatagttaaccttgcccagaacttcgtcggctccaataatattaacctactccaacccataggtcagttcggtacgcggctccatggtggcaaagacgccgccagtccgcgatatatttttaccatgctctcgaccctggctcgtctgctgtttcctgctgttgatgacaacctgctgaagtttttgtatgacgacaatcagcgggttgaacctgagtggtacatcccaatcatccctatggtgctgatcaacggcgccgaaggcatcgggaccggctgggcctgcaaacttccaaactacgacgctagggaaatcgtcaataatgttcgtcggatgctggatggattggatccgcatcccatgctgcctaactataaaaattttaagggcaccattcaggaacttgggcagaaccagtatgccgtgtccggcgagatttttgtagtcgaccgcaatacagttgagatcacagaactaccggttcgcacttggacccaagtctataaagagcaggttttagagcccatgctgaacggaacagacaagacccctgcactgatctccgattataaagagtaccacactgacaccactgtgaaatttgtggtgaagatgactgaggaaaaattagcgcaggctgaagctgcgggacttcacaaggtctttaaactgcagacgactctgacatgcaattctatggtcctcttcgatcatatgggttgtcttaaaaagtatgagacggtgcaggacatccttaaagagttcttcgacttgcggttaagctactacggtttacgcaaggaatggctcgtgggaatgctgggcgccgagtctacaaaattaaacaatcaggctcgattcatcctggaaaaaattcagggcaaaatcaccattgaaaaccggtcaaagaaggacctgattcaaatgctggtgcagcgcggttatgagtccgatcccgtcaaagcatggaaggaggcacaggagaaagccgccgaggaggatgagacacagaatcagcatgatgattcttcttcagattcagggacccccagcggccctgactttaactatattctaaatatgagcctgtggtcgctaactaaggagaaagtcgaggaactcattaagcagcgcgacgccaagggtcgcgaagtcaatgacctaaaacgtaagtctccttctgacctctggaaggaggatctcgctgcgttcgtggaagagttggacaaggtcgaaagccaggaaagagaagacgtgctggcgggcatgagtggaaaagccataaaaggaaaggtaggaaaacctaaagtcaaaaagttacagcttgaggaaaccatgccaagtccatatggtaggcggattattcctgaaatcactgcaatgaaagctgacgcgagtaagaagctgcttaaaaaaaaaaagggtgatctcgacaccgctgcagtgaaagtggaattcgatgaggagttcagtggagctcctgtggagggggccggggaggaggctctcacacccagcgttccaataaacaaaggtccaaagccaaaaagagagaagaaagagcctgggacgagggttagaaaaacaccaaccagcagcggcaagccctcagccaagaaagtaaagaaaagaaatccctggtcagatgacgagtcgaagtccgaaagtgatctggaagaaaccgaacctgtcgtgatcccccgagactctttgttgcgcagggctgctgctgaaagacccaaatacactttcgacttcagcgaggaagaggacgatgatgcagatgatgacgacgatgataacaatgacttggaagagctgaaggtgaaagctagtcccattactaacgacggtgaggacgagtttgtaccctccgatggactcgataaggacgagtataccttctcccctgggaaatctaaagcgacccccgagaaaagcctgcatgataagaagagtcaggatttcggaaacttgttttcctttccgtcctactcacaaaaatctgaagatgatagtgcgaagtttgatagcaatgaggaggacagcgccagcgtgttcagtccgtcctttggattaaagcaaacagacaaggtgccatcaaaaacagtcgccgctaaaaaaggcaagccttcctcagatacagtgcctaaacctaagagagcacctaagcagaaaaaggtcgttgaagcagttaatagcgacagcgatagtgaattcgggatccccaaaaaaaccacgacccctaagggcaagggtcgaggggccaagaaaagaaaggcatcaggcagtgaaaacgaaggcgattacaaccccgggagaaaaacatccaagacgacatctaagaagcccaagaaaacttctttcgatcaggactcagacgtggatattttcccctctgactttcctactgaacccccgtctctcccaagaacaggccgggctcgtaaagaagttaaatatttcgctgagtccgatgaggaggaagacgacgtagacttcgctatgtttaactag

SEQ ID NO: 279564 - DNA, 4881 bp, Artificial Sequence
  derived and/or modified sequence
atggcgaagtccggaggttgcggcgctggagcaggagtgggcggtggaaacggcgcactcacttgggtcaccctttttgatcagaataatgccgctaagaaggaagaatctgaaacagcgaataaaaatgacagtagcaagaagttgtccgttgaacgggtgtatcagaagaagactcagttggaacatatcctcctgagaccagatacttacatcgggtccgtggagcccctgacccagtttatgtgggtctatgatgaggatgtcggcatgaactgccgcgaggtcacattcgtgcccggactgtataagatattcgatgaaattcttgtcaacgcagctgataacaagcagagggacaagaatatgacttgcattaaggtgagcatagaccctgagagcaacattatctccatatggaacaacggtaaggggatcccagttgtggagcacaaagtggaaaaagtgtacgttccagccttaatcttcggtcagctactgacctcctctaactacgacgatgatgagaaaaaggtgactggagggagaaatggatacggcgcaaaactgtgtaacattttttcaaccaaattcaccgttgagacggcttgcaaggaatacaagcacagctttaaacagacctggatgaataatatgatgaagacctctgaggccaagattaaacacttcgacggtgaagactacacttgcattacctttcagcccgacctcagcaaattcaagatggaaaagttggataaggatatcgtggccctgatgaccagacgtgcatatgacctggcagggagctgccgcggagtgaaggtgatgtttaacggcaagaagttgccggtcaatggctttaggagctatgtggatctctatgtcaaagacaagctggatgagactggcgtcgctcttaaggtcatacacgagcttgccaacgagagatgggacgtctgccttacactgagcgaaaaaggcttccaacagatatcctttgtgaattctatcgcaactacaaagggaggccgtcacgtggattacgtcgtagatcaggtagtaggcaaactcatcgaagtagtcaagaaaaagaataaagctggtgttagtgttaagccctttcaagtgaagaatcatatctgggtgtttataaactgcctcatcgagaatccaacattcgacagccagaccaaagagaacatgacccttcagccaaagagttttggaagcaaatgccagctgagtgagaagttcttcaaagccgctagcaactgtgggatagtggaatccatcctgaactgggtgaagtttaaggcccaaactcagctcaacaaaaaatgttcttccgtgaaatactccaagataaaaggtattcctaagctcgacgatgccaatgacgccggaggaaaacatagtctggagtgtactctcatcttgactgaaggggatagtgctaaaagccttgcagtttccggcctcggagtgattgggcgtgaccgctatggagtgttccccctccggggaaagattctgaatgttcgtgaggcgtcccacaagcagatcatggaaaatgcggagatcaacaacattataaaaatcgttggactgcagtataagaagtcctatgatgacgcagaaagccttaagacactccgctatgggaaaattatgataatgaccgatcaggaccaggatggctcccacattaagggacttctgatcaacttcatacaccacaattggccatccctgctgaaacatggttttctggaagagttcattactcccattgtgaaggcaagcaagaataagcaagaactgtccttttactccattcccgagtttgatgagtggaaaaagcacatcgagaaccagaaagcttggaagattaagtactacaaaggactgggcacctcaaccgccaaggaggccaaagagtactttgctgacatggaaagacaccgcatcctgttccggtacgcaggacccgaagatgatgctgctattacgcttgctttctccaagaaaaagatcgatgacagaaaggaatggctgacgaactttatggaggacaggcgccagagacgcctgcacggactgccggagcaatttctctacggaacggcaacgaagcacctgacctataatgattttattaacaaagagttgattctgtttagcaactctgacaatgagagaagtatcccctcactagttgatgggttcaaacctggccaaagaaaagtcctctttacgtgctttaagcgtaatgataagcgagaagtgaaagtcgcccagctggcagggtccgtggccgaaatgagtgcatatcatcacggggaacaggccctgatgatgactattgttaaccttgcccagaattttgtgggttctaacaatatcaaccttctgcagccaattggtcagttcggcacacggctacacggaggcaaggacgccgcttctcccaggtacatctttaccatgctgtccacactggctaggctgctctttcccgctgtggacgataatttactgaagttcctgtatgacgataatcaacgcgtcgaacctgaatggtatattcctatcatccccatggtcctgattaacggcgctgaaggaatcggcacaggatgggcttgcaagcttccaaattatgatgccagagaaatagttaacaatgtgagaagaatgcttgatgggctggatcctcacccaatgctgcctaattataaaaacttcaagggcacgatccaggagctgggacaaaatcagtacgccgtatcgggcgaaatcttcgtggtcgataggaacacggtggaaattacagagctccccgtgcgaacgtggacacaagtgtataaagaacaggtcctggagcctatgctcaacggcaccgacaagacacctgctttgataagtgactacaaagagtaccacacagacacgacggtgaagtttgttgttaaaatgacagaggaaaagctggcgcaggcggaggccgcaggcctgcacaaggtgttcaaacttcaaactacgctcacatgtaacagtatggtcttgttcgaccacatgggttgcctgaagaaatatgaaactgtgcaggatattctcaaggaattttttgaccttcgcctgtcttactacggtctccggaaggagtggctggtgggaatgctgggcgctgaaagcaccaaactcaacaaccaggccaggtttatactggagaaaatacagggcaagatcacaattgaaaacaggtcaaagaaagatcttattcagatgctggtccagagggggtacgaatctgatcccgtgaaagcttggaaagaggcccaagagaaggccgctgaagaggatgaaactcaaaaccagcatgatgactccagcagtgatagcggaaccccttccggtcctgattttaattacatcctaaatatgagtctgtggagtctaacaaaagagaaggtggaggagctgatcaagcagagagatgccaaggggagggaggtgaacgatcttaaaaggaagtctcctagtgatctgtggaaagaggacctggcggcattcgtggaggaactggataaggtcgagagccaggagcgggaagatgtgttagccggaatgtctggcaaagccatcaaagggaaggtgggcaagcccaaggtgaaaaagctgcagctggaagagacaatgccctcgccctacggccgaagaatcattcccgagatcacagccatgaaagccgacgcttctaagaaactgctgaaaaagaaaaagggcgatctagacaccgccgcagtgaaggtggagttcgacgaggagttctctggggcacctgtggagggtgctggtgaagaagctctgaccccctctgttcctatcaataaggggcctaagccaaagcgggagaaaaaagaacccggtacccgggtgagaaagactcccacatcatccggtaagccaagtgctaagaaagtcaagaagaggaacccctggtcagacgacgaatccaaatccgaatctgacctggaagaaactgaaccagtcgtcattccgagagactccctattgcgcagagccgctgctgaacggcctaagtacaccttcgatttcagcgaagaagaagacgatgatgccgacgatgacgatgacgataataacgatttggaagagctaaaagtcaaggcttcacctataactaacgatggcgaagatgagtttgtaccctcagatggattggacaaagacgagtacacattcagtccaggaaaaagcaaagccaccccagaaaaatctctacatgataaaaaatctcaggatttcggaaacctgttttcgtttcctagttattcccagaaatccgaagacgactccgctaagttcgatagcaacgaagaggacagcgccagcgtgttcagcccctctttcggcctaaaacagactgacaaggtgcccagtaagaccgttgctgcgaagaagggcaaaccgagcagtgatacagtgccaaagcctaaacgcgcacccaagcagaagaaagtggttgaagctgtcaattccgactccgattccgaattcggtattcccaagaaaaccactactccgaaaggaaaaggccgtggtgcgaaaaaacgcaaagcctccggctcagagaacgagggcgattacaatcctggacgcaagacctcgaagaccacgagtaagaagcctaaaaagaccagtttcgatcaggattctgatgtggatatcttcccatcagatttccccacagaacctccaagtctgccccgtactgggagggccagaaaggaagttaagtacttcgcggaaagcgacgaagaagaggacgatgtggactttgctatgtttaactag

SEQ ID NO: 279565 - DNA, 5189 bp, Artificial Sequence
  derived and/or modified sequence
atggccaagtcgggtggctgcggcgcgggagccggcgtgggcggcggcaacggggcactgacctgggtgactctttttgatcagaacaatgctgcaaaaaaagaagagtcagaaactgccaacaaaaatgattcttcaaagaagttgtctgttgagagagtgtatcagaagaagacacaacttgaacacattcttcttcgtcctgatacatatattgggtcagtggagccattgacgcagttcatgtgggtgtatgatgaagatgtaggaatgaattgcagggaggttacctttgtgccaggtttatacaagatctttgatgaaattttggttaatgctgctgacaataaacagagggataagaacatgacttgtattaaagtttctattgatcctgaatctaacattataagcatttggaataatgggaaaggcattccagtagtagaacacaaggtagagaaagtttatgttcctgctttaatttttggacagcttttaacatccagtaactatgatgatgatgagaaaaaagttacaggtggtcgtaatggttatggtgcaaaactttgtaatattttcagtacaaagtttacagtagaaacagcttgcaaagaatacaaacacagttttaagcagacatggatgaataatatgatgaagacttctgaagccaaaattaaacattttgatggtgaagattacacatgcataacattccaaccagatctgtccaaatttaagatggaaaaacttgacaaggatattgtggccctcatgactagaagggcatatgatttggctggttcgtgtagaggggtcaaggtcatgtttaatggaaagaaattgcctgtaaatggatttcgcagttatgtagatctttatgtgaaagacaaattggatgaaactggggtggccctgaaagttattcatgagcttgcaaatgaaagatgggatgtttgtctcacattgagtgaaaaaggattccagcaaatcagctttgtaaatagtattgcaactacaaaaggtggacggcacgtggattatgtggtagatcaagttgttggtaaactgattgaagtagttaagaaaaagaacaaagctggtgtatcagtgaaaccatttcaagtaaaaaaccatatatgggtttttattaattgccttattgaaaatccaacttttgattctcagactaaggaaaacatgactctgcagcccaaaagttttgggtctaaatgccagctgtcagaaaaattttttaaagcagcctctaattgtggcattgtagaaagtatcctgaactgggtgaaatttaaggctcagactcagctgaataagaagtgttcatcagtaaaatacagtaaaatcaaaggtattcccaaactggatgatgctaatgatgctggtggtaaacattccctggagtgtacactgatattaacagagggagactctgccaaatcactggctgtgtctggattaggtgtgattggacgagacagatacggagtttttccactcaggggcaaaattcttaatgtacgggaagcttctcataaacagatcatggaaaatgctgaaataaataatattattaaaatagttggtctacaatataagaaaagttacgatgatgcagaatctctgaaaaccttacgctatggaaagattatgattatgaccgatcaggatcaagatggttctcacataaaaggcctgcttattaatttcatccatcacaattggccatcacttttgaagcatggttttcttgaagagttcattactcctattgtaaaggcaagcaaaaataagcaggaactttccttctacagtattcctgaatttgacgaatggaaaaaacatatagaaaaccagaaagcctggaaaataaagtactataaaggattgggtactagtacagctaaagaagcaaaggaatattttgctgatatggaaaggcatcgcatcttgtttagatatgctggtcctgaagatgatgctgccattaccttggcatttagtaagaagaagattgatgacagaaaagaatggttaacaaattttatggaagaccggagacagcgtaggctacatggcttaccagagcaatttttatatggtactgcaacaaagcatttgacttataatgatttcatcaacaaggaattgattctcttctcaaactcagacaatgaaagatctataccatctcttgttgatggctttaaacctggccagcggaaagttttatttacctgtttcaagaggaatgataaacgtgaagtaaaagttgcccagttggctggctctgttgctgagatgtcggcttatcatcatggagaacaagcattgatgatgactattgtgaatttggctcagaactttgtgggaagtaacaacattaacttgcttcagcctattggtcagtttggaactcggcttcatggtggcaaagatgctgcaagccctcgttatattttcacaatgttaagcactttagcaaggctactttttcctgctgtggatgacaacctccttaagttcctttatgatgataatcaacgtgtagagcctgagtggtatattcctataattcccatggttttaataaatggtgctgagggcattggtactggatgggcttgtaaactacccaactatgatgctagggaaattgtgaacaatgtcagacgaatgctagatggcctggatcctcatcccatgcttccaaactacaaaaactttaaaggcacgattcaagaacttggtcaaaaccagtatgcagtcagtggtgaaatatttgtagtggacagaaacacagtagaaattacagagcttccagttagaacttggacacaggtatataaagaacaggttttagaacctatgctaaatggaacagataaaacaccagcattaatttctgattataaagaatatcatactgacacaactgtgaaatttgtggtgaaaatgactgaagagaaactagcacaagcagaagctgctggactgcataaagtttttaaacttcaaactactcttacttgtaattccatggtactttttgatcatatgggatgtctgaagaaatatgaaactgtgcaagacattctgaaagaattctttgatttacgattaagttattacggtttacgtaaggagtggcttgtgggaatgttgggagcagaatctacaaagcttaacaatcaagcccgtttcattttagagaagatacaagggaaaattactatagagaataggtcaaagaaagatttgattcaaatgttagtccagagaggttatgaatctgacccagtgaaagcctggaaagaagcacaagaaaaggcagcagaagaggatgaaacacaaaaccagcatgatgatagttcctccgattcaggaactccttcaggcccagattttaattatattttaaatatgtctctgtggtctcttactaaagaaaaagttgaagaactgattaaacagagagatgcaaaagggcgagaggtcaatgatcttaaaagaaaatctccttcagatctttggaaagaggatttagcggcatttgttgaagaactggataaagtggaatctcaagaacgagaagatgttctggctggaatgtctggaaaagcaattaaaggtaaagttggcaaacctaaggtgaagaaactccagttggaagagacaatgccctcaccttatggcagaagaataattcctgaaattacagctatgaaggcagatgccagcaaaaagttgctgaagaagaagaagggtgatcttgatactgcagcagtaaaagtggaatttgatgaagaattcagtggagcaccagtagaaggtgcaggagaagaggcattgactccatcagttcctataaataaaggtcccaaacctaagagggagaagaaggagcctggtaccagagtgagaaaaacacctacatcatctggtaaacctagtgcaaagaaagtgaagaaacggaatccttggtcagatgatgaatccaagtcagaaagtgatttggaagaaacagaacctgtggttattccaagagattctttgcttaggagagcagcagccgaaagacctaaatacacatttgatttctcagaagaagaggatgatgatgctgatgatgatgatgatgacaataatgatttagaggaattgaaagttaaagcatctcccataacaaatgatggggaagatgaatttgttccttcagatgggttagataaagatgaatatacattttcaccaggcaaatcaaaagccactccagaaaaatctttgcatgacaaaaaaagtcaggattttggaaatctcttctcatttccttcatattctcagaagtcagaagatgattcagctaaatttgacagtaatgaagaagattctgcttctgttttttcaccatcatttggtctgaaacagacagataaagttccaagtaaaacggtagctgctaaaaagggaaaaccgtcttcagatacagtccctaagcccaagagagccccaaaacagaagaaagtagtagaggctgtaaactctgactcggattcagaatttggcattccaaagaagactacaacaccaaaaggtaaaggccgaggggcaaagaaaaggaaagcatctggctctgaaaatgaaggcgattataaccctggcaggaaaacatccaaaacaacaagcaagaaaccgaagaagacatcttttgatcaggattcagatgtggacatcttcccctcagacttccctactgagccaccttctctgccacgaaccggtcgggctaggaaagaagtaaaatattttgcagagtctgatgaagaagaagatgatgttgattttgcaatgtttaattaagtgcccaaagagcacaaacatttttcaacaaatatcttgtgttgtccttttgtcttctctgtctcagacttttgtacatctggcttattttaatgtgatgatgtaattgacggttttttattattgtggtaggccttttaacattttgttcttacacatacagttttatgctcttttttactcattgaaatgtcacgtactgtctgattggcttgtagaattgttatagactgccgtgcattagcacagattttaattgtcatggttacaaactacagacctgctttttgaaatgaaatttaaacatt

SEQ ID NO: 279566 - DNA, 551 bp, Artificial Sequence
  derived and/or modified sequence
gtgtgtgcggtgttatgccggacaagagggaggtgaccgtggcggcggcggcggcggctctgtttattgtccctctcggtgtgtgtgtgtgaggaaatcggggctgcagcgaggctaaggctgcctttgaagcagcggcggcgaccgggacgactactctggcaacggggcactgacctgggtgactctttttgatcagaacaatgctgcaaaaaaagaagagtcagaaactgccaacaaaaatgattcttcaaagaagttgtctgttgagagagtgtatcagaagaagacacaacttgaacacattcttcttcgtcctgatacatatattgggtcagtggagccattgacgcagttcatgtgggtgtatgatgaagatgtaggaatgaattgcagggaggttacctttgtgccaggtttatacaagatctttgatgaaattttggttaatgctgctgacaataaacagagggataagaacatgacttgtattaaagtttctattgatcctgaatctaacattataagcatttggaataatgggaaaggca

SEQ ID NO: 279567 - DNA, 2061 bp, Artificial Sequence
  derived and/or modified sequence
tgtaattccatggtactttttgatcatatgggatgtctgaagaaatatgaaactgtgcaagacattctgaaagaattctttgatttacgattaagttattacggtttacgtaaggagtggcttgtgggaatgttgggagcagaatctacaaagcttaacaatcaagcccgtttcattttagagaagatacaagggaaaattactataggcagcagaagaggatgaaacacaaaaccagcatgatgatagttcctccgattcaggaactccttcaggcccagattttaattatattttaaatatgtctctgtggtctcttactaaagaaaaagttgaagaactgattaaacagagagatgcaaaagggcgagaggtcaatgatcttaaaagaaaatctccttcagatctttggaaagaggatttagcggcatttgttgaagaactggataaagtggaatctcaagaacgagaagatgttctggctggaatgtctggaaaagcaattaaaggtaaagttggcaaacctaaggtgaagaaactccagttggaagagacaatgccctcaccttatggcagaagaataattcctgaaattacagctatgaaggcagatgccagcaaaaagttgctgaagaagaagaagggtgatcttgatactgcagcagtaaaagtggaatttgatgaagaattcagtggagcaccagtagaaggtgcaggagaagaggcattgactccatcagttcctataaataaaggtcccaaacctaagagggagaagaaggagcctggtaccagagtgagaaaaacacctacatcatctggtaaacctagtgcaaagaaagtgaagaaacggaatccttggtcagatgatgaatccaagtcagaaagtgatttggaagaaacagaacctgtggttattccaagagattctttgcttaggagagcagcagccgaaagacctaaatacacatttgatttctcagaagaagaggatgatgatgctgatgatgatgatgatgacaataatgatttagaggaattgaaagttaaagcatctcccataacaaatgatggggaagatgaatttgttccttcagatgggttagataaagatgaatatacattttcaccaggcaaatcaaaagccactccagaaaaatctttgcatgacaaaaaaagtcaggattttggaaatctcttctcatttccttcatattctcagaagtcagaagatgattcagctaaatttgacagtaatgaagaagattctgcttctgttttttcaccatcatttggtctgaaacagacagataaagttccaagtaaaacggtagctgctaaaaagggaaaaccgtcttcagatacagtccctaagcccaagagagccccaaaacagaagaaagtagtagaggctgtaaactctgactcggattcagaatttggcattccaaagaagactacaacaccaaaaggtaaaggccgaggggcaaagaaaaggaaagcatctggctctgaaaatgaaggcgattataaccctggcaggaaaacatccaaaacaacaagcaagaaaccgaagaagacatcttttgatcaggattcagatgtggacatcttcccctcagacttccctactgagccaccttctctgccacgaaccggtcgggctaggaaagaagtaaaatattttgcagagtctgatgaagaagaagatgatgttgattttgcaatgtttaattaagtgcccaaagagcacaaacatttttcaacaaatatcttgtgttgtccttttgtcttctctgtctcagacttttgtacatctggcttattttaatgtgatgatgtaattgacggttttttattattgtggtaggccttttaacattttgttcttacacatacagttttatgctcttttttactcattgaaatgtcacgtactgtctgattggcttgtagaattgttatagactgccgtgcattagcacagattttaattgtcatggttacaaactacagacctgctttttgaaatgaaatttaaacattaaaaatggaactgtg

SEQ ID NO: 279568 - protein, 351 aa, Artificial Sequence
  derived and/or modified sequence
MNGLAQSRLETCISYLHCYSAGLRTLHDIGPEIRRAISCDLQDDEPEETKREEEDDVFKRNGALLGNHVNHVNSDRRDSLQQTNTTHRPLHVQRPSIPPASDTEKPLFPPAGNSVCHNHHNHNSIGKQVPTSTNANLNNANMSKAAHGKRPSIGNLEHVSENGHHSSHKHDREPQRRSSVKRTRYYETYIRSDSGDEQLPTICREDPEIHGYFRDPHCLGEQEYFSSEECYEDDSSPTWSRQNYGYYSRYPGRNIDSERPRGYHHPQGFLEDDDSPVCYDSRRSPRRRLLPPTPASHRRSSFNFECLRRQSSQEEVPSSPIFPHRTALPLHLMQQQSPLSSDHGSCRPRFK

SEQ ID NO: 279569 - protein, 318 aa, Artificial Sequence
  derived and/or modified sequence
MDEQDLNEPLAKVSLLKALLEEERKAYRNQVEESTKQIQVLQAQLQRLHIDTENLREEKDSEITSTRDELLSARDEILLLHQAAAKVASERDTDIASLQEELKKVRAELERWRKAASEYEKEITSLQNSFQLRCQQCEDQQREEATRLQGELEKLRKEWNALETECHSLKRENVLLSSELQRQEKELHNSQKQSLELTSDLSILQMSRKELENQVGSLKEQHLRDSADLKTLLSKAENQAKDVQKEYEKTQTVLSELKLKFEMTEQEKQSITDELKQCKNNLKLLREKGNNPSILQPVPAVFIGLFLAFLFWCFGPLW

SEQ ID NO: 279570 - protein, 362 aa, Artificial Sequence
  derived and/or modified sequence
MDEQDLNEPLAKVSLLKDDLQGAQSEIEAKQEIQHLRKELIEAQELARTSKQKCFELQALLEEERKAYRNQVEESTKQIQVLQAQLQRLHIDTENLREEKDSEITSTRDELLSARDEILLLHQAAAKVASERDTDIASLQEELKKVRAELERWRKAASEYEKEITSLQNSFQLRCQQCEDQQREEATRLQGELEKLRKEWNALETECHSLKRENVLLSSELQRQEKELHNSQKQSLELTSDLSILQMSRKELENQVGSLKEQHLRDSADLKTLLSKAENQAKDVQKEYEKTQTVLSELKLKFEMTEQEKQSITDELKQCKNNLKLLREKGNNKPWPWMPMLAALVAVTAIVLYVPGLARASP

SEQ ID NO: 279571 - protein, 506 aa, Artificial Sequence
  derived and/or modified sequence
MPSALAIFTCRPNSHPFQERHVYLDEPIKIGRSVARCRPAQNNATFDCKVLSRNHALVWFDHKTGKFYLQDTKSSNGTFINSQRLSRGSEESPPCEILSGDIIQFGVDVTENTRKVTHGCIVSTIKLFLPDGMEARLRSDVIHAPLPSPVDKVAANTPSMYSQELFQLSQYLQEALHREQMLEQKLATLQRLLAITQEASDTSWQALIDEDRLLSRLEVMGNQLQACSKNQTEDSLRKELIALQEDKHNYETTAKESLRRVLQEKIEVVRKLSEVERSLSNTEDECTHLKEMNERTQEELRELANKYNGAVNEIKDLSDKLKVAEGKQEEIQQKGQAEKKELQHKIDEMEEKEQELQAKIEALQADNDFTNERLTALQVRLEHLQEKTLKECSSLGIQVDDFLPKINGSTEKEKLIVEGHLTKAVEETKLSKENQTRAKESDFSDTLSPSKEKSSDDTTDAQMDEQDLNEPLAKVSLLKGTLTCFYDIVNQGIKSPFAIKSVLDIM

SEQ ID NO: 279572 - protein, 409 aa, Artificial Sequence
  derived and/or modified sequence
  misc_feature (1)..(1): Xaa can be any naturally occurring amino acid
XKLIVEGHLTKAVEETKLSKENQTRAKESDFSDTLSPSKEKSSDDTTDAQMDEQDLNEPLAKVSLLKDDLQGAQSEIEAKQEIQHLRKELIEAQELARTSKQKCFELQALLEEERKAYRNQVEESTKQIQVLQAQLQRLHIDTENLREEKDSEITSTRDELLSARDEILLLHQAAAKVASERDTDIASLQEELKKVRAELERWRKAASEYEKEITSLQNSFQLRCQQCEDQQREEATRLQGELEKLRKEWNALETECHSLKRENVLLSSELQRQEKELHNSQKQSLELTSDLSILQMSRKELENQVGSLKEQHLRDSADLKTLLSKAENQAKDVQKEYEKTQTVLSELKLKFEMTEQEKQSITDELKQCKNNLKLLREKGNNPSILQPVPAVFIGLFLAFLFWCFGPLW

SEQ ID NO: 279573 - DNA, 1521 bp, Artificial Sequence
  derived and/or modified sequence
atgcccagcgccctggccatcttcacctgcagacccaacagccaccccttccaggagagacacgtgtacctggacgagcccatcaagatcggcagaagcgtggccagatgcagacccgcccagaacaacgccaccttcgactgcaaggtgctgagcagaaaccacgccctggtgtggttcgaccacaagaccggcaagttctacctgcaggacaccaagagcagcaacggcaccttcatcaacagccagagactgagcagaggcagcgaggagagccccccctgcgagatcctgagcggcgacatcatccagttcggcgtggacgtgaccgagaacaccagaaaggtgacccacggctgcatcgtgagcaccatcaagctgttcctgcccgacggcatggaggccagactgagaagcgacgtgatccacgcccccctgcccagccccgtggacaaggtggccgccaacacccccagcatgtacagccaggagctgttccagctgagccagtacctgcaggaggccctgcacagagagcagatgctggagcagaagctggccaccctgcagagactgctggccatcacccaggaggccagcgacaccagctggcaggccctgatcgacgaggacagactgctgagcagactggaggtgatgggcaaccagctgcaggcctgcagcaagaaccagaccgaggacagcctgagaaaggagctgatcgccctgcaggaggacaagcacaactacgagaccaccgccaaggagagcctgagaagagtgctgcaggagaagatcgaggtggtgagaaagctgagcgaggtggagagaagcctgagcaacaccgaggacgagtgcacccacctgaaggagatgaacgagagaacccaggaggagctgagagagctggccaacaagtacaacggcgccgtgaacgagatcaaggacctgagcgacaagctgaaggtggccgagggcaagcaggaggagatccagcagaagggccaggccgagaagaaggagctgcagcacaagatcgacgagatggaggagaaggagcaggagctgcaggccaagatcgaggccctgcaggccgacaacgacttcaccaacgagagactgaccgccctgcaggtgagactggagcacctgcaggagaagaccctgaaggagtgcagcagcctgggcatccaggtggacgacttcctgcccaagatcaacggcagcaccgagaaggagaagctgatcgtggagggccacctgaccaaggccgtggaggagaccaagctgagcaaggagaaccagaccagagccaaggagagcgacttcagcgacaccctgagccccagcaaggagaagagcagcgacgacaccaccgacgcccagatggacgagcaggacctgaacgagcccctggccaaggtgagcctgctgaagggcaccctgacctgcttctacgacatcgtgaaccagggcatcaagagccccttcgccatcaagagcgtgctggacatcatgtag

SEQ ID NO: 279574 - DNA, 1230 bp, Artificial Sequence
  derived and/or modified sequence
tgaaagctgatcgtggagggccacctgaccaaggccgtggaggagaccaagctgagcaaggagaaccagaccagagccaaggagagcgacttcagcgacaccctgagccccagcaaggagaagagcagcgacgacaccaccgacgcccagatggacgagcaggacctgaacgagcccctggccaaggtgagcctgctgaaggacgacctgcagggcgcccagagcgagatcgaggccaagcaggagatccagcacctgagaaaggagctgatcgaggcccaggagctggccagaaccagcaagcagaagtgcttcgagctgcaggccctgctggaggaggagagaaaggcctacagaaaccaggtggaggagagcaccaagcagatccaggtgctgcaggcccagctgcagagactgcacatcgacaccgagaacctgagagaggagaaggacagcgagatcaccagcaccagagacgagctgctgagcgccagagacgagatcctgctgctgcaccaggccgccgccaaggtggccagcgagagagacaccgacatcgccagcctgcaggaggagctgaagaaggtgagagccgagctggagagatggagaaaggccgccagcgagtacgagaaggagatcaccagcctgcagaacagcttccagctgagatgccagcagtgcgaggaccagcagagagaggaggccaccagactgcagggcgagctggagaagctgagaaaggagtggaacgccctggagaccgagtgccacagcctgaagagagagaacgtgctgctgagcagcgagctgcagagacaggagaaggagctgcacaacagccagaagcagagcctggagctgaccagcgacctgagcatcctgcagatgagcagaaaggagctggagaaccaggtgggcagcctgaaggagcagcacctgagagacagcgccgacctgaagaccctgctgagcaaggccgagaaccaggccaaggacgtgcagaaggagtacgagaagacccagaccgtgctgagcgagctgaagctgaagttcgagatgaccgagcaggagaagcagagcatcaccgacgagctgaagcagtgcaagaacaacctgaagctgctgagagagaagggcaacaaccccagcatcctgcagcccgtgcccgccgtgttcatcggcctgttcctggccttcctgttctggtgcttcggccccctgtggtag

SEQ ID NO: 279575 - DNA, 1521 bp, Artificial Sequence
  derived and/or modified sequence
atgccatctgcgctcgccatatttacctgtcgacctaactctcaccctttccaagagaggcatgtctacctggatgaacctattaagattggaaggagtgtcgcacgctgccggccagcccagaacaatgccacctttgactgcaaggttctcagcagaaaccatgcactggtgtggtttgatcacaagaccggaaagttttatcttcaggacactaaaagttcaaacggcacctttataaacagccagaggctcagccggggtagcgaggagtcccccccttgcgagattctgtccggagatataattcagttcggagtcgacgtcaccgaaaatacaaggaaggtgacccacggttgtattgtgagcaccatcaaattatttttgccagacgggatggaggccaggcttcgctctgatgtgatacacgcccccctgccttcacccgtcgataaggtcgccgcgaatacgccatctatgtattcccaagaactattccagctgtcacagtacctccaggaagccttacaccgagaacagatgcttgaacagaagctggctacactgcagaggttactggcgatcactcaggaggcgagtgatacatcttggcaggcgctgatcgacgaggataggttactgtctcggctggaggtcatgggtaaccagctgcaggcttgttcaaaaaatcagacagaagactcattgaggaaggaattaattgcccttcaggaggataaacataactatgagactactgcaaaagaaagccttaggcgggtgctccaggagaagatcgaggtggtgcgaaaactgtcagaagtggagaggagtctctcaaatactgaagacgagtgcacacatttgaaggaaatgaatgagaggacacaggaggaactccgcgagttggctaataaatataatggagcagttaatgaaattaaagatctcagtgacaagctcaaggtggccgagggcaagcaggaagagattcagcagaaaggacaggcggaaaagaaggaactacagcacaagattgatgagatggaagaaaaggaacaggagctgcaggcgaagatcgaggccctccaagccgataatgactttacaaatgaacgactcactgcccttcaggtgaggctggaacacctgcaggagaagaccctgaaggaatgcagctctttagggatacaagtggacgacttcctgccgaagattaacggatccacagagaaggagaagctgattgtggagggacaccttactaaagcagtcgaggagacaaaattatccaaagagaaccaaacgcgcgcaaaggaatccgatttctcagataccctgagccctagcaaggagaaatctagcgacgatacaaccgatgctcagatggatgaacaagatctgaacgagccattggccaaggtgagcctcttgaaaggcacccttacgtgtttttacgacatcgtcaaccagggtataaagtctccattcgcaatcaagtccgtacttgatattatgtag

SEQ ID NO: 279576 - DNA, 1230 bp, Artificial Sequence
  derived and/or modified sequence
tagaaactgatcgtggagggacacctcacaaaggcggtggaagagactaagttgtccaaggagaatcagactcgagccaaagagtccgacttctcggacactctgagtcctagcaaagaaaagtcgtctgacgacacaacagacgcccaaatggacgagcaggatctgaatgagcctctggctaaagtatccctgctcaaggacgacctccagggtgctcagtcggagatcgaagctaagcaggaaatccaacatcttcggaaggagcttatagaagcccaggaattggccagaacaagtaaacagaagtgctttgaacttcaggcgcttttagaggaagaacgaaaggcctaccgcaatcaggttgaagaatctacaaaacagatacaggtgttgcaggctcagctgcagagactccacatcgacacggagaatctccgagaggaaaaagattcagagatcactagtactcgggacgaactgttgagtgctcgtgacgagattctgctcctgcaccaggccgccgcgaaagtcgcgtcagagcgagatactgatatcgcctcccttcaagaagagcttaaaaaggtcagagccgagctcgagcggtggcgcaaggcagcgagcgaatacgagaaagaaatcacgtccttacagaacagttttcaattgcggtgtcagcagtgtgaggaccagcaaagggaggaggcgaccaggctgcaaggcgagctggagaaattgcgaaaagagtggaacgccttggagactgagtgccacagtctgaagcgcgaaaatgtcctcttgagcagcgagctgcaacgtcaggagaaagagcttcacaattcccagaagcaaagcctcgaactgaccagcgacctttccatcctccagatgtctagaaaggagctggaaaatcaagtcggtagcctgaaggagcagcacctgagagatagtgccgaccttaagactttgctgtctaaggccgaaaatcaggcaaaggatgtccagaaagagtacgaaaagacacagaccgtgctttcggagctgaaactgaaatttgaaatgactgaacaggaaaagcagtccattacagatgagctgaagcagtgcaagaacaatcttaagctgcttcgagagaaagggaacaacccgtctatccttcagcctgtgcctgccgtctttattggcttgttcctggcctttcttttttggtgctttggccccctctggtag

SEQ ID NO: 279577 - DNA, 1521 bp, Artificial Sequence
  derived and/or modified sequence
atgcccagcgccctggccatcttcacctgccggcccaacagccaccccttccaggagagacatgtgtacctggatgagcccatcaagattggccgctctgtggcccgctgcaggcctgcccagaacaatgccacctttgactgcaaggtgctgagcagaaatcatgccctggtgtggtttgaccacaagacaggcaagttctacctgcaggacaccaagagcagcaatggcaccttcatcaacagccagaggctgagccggggcagcgaggagagccccccctgtgagatcctgagcggggacatcatccagtttggagtggatgtgacagagaacaccaggaaggtgacccacggctgcatcgtgtccaccatcaagctgttcctgcctgatggcatggaggcccggctgcggagtgatgtgattcatgcccccctgcccagccctgtggacaaggtggccgccaacacccccagcatgtacagccaggagctgttccagctgagccagtacctgcaggaggccctgcaccgggagcagatgctggagcagaagctggccaccctgcagaggctgctggccatcacccaggaggccagtgacacctcctggcaggccctgattgatgaggaccggctgctgagccggctggaggtgatgggcaaccagctgcaggcctgcagcaagaaccagacagaggacagcctgaggaaggagctgattgccctgcaggaggacaagcacaactatgagaccacagccaaggagagcctgcggcgggtgctgcaggagaagattgaggtggtgaggaagctgtctgaggtggagaggagcctgagcaacacagaagatgaatgtacccacctgaaggagatgaatgaaagaacccaggaggagctgcgggagctggccaacaagtacaacggggctgtgaatgagatcaaggacctgagtgacaagctgaaggtggccgagggcaagcaggaggagatccagcagaagggccaggccgagaagaaggagctgcagcacaagattgatgagatggaggagaaggagcaggagctgcaggccaagattgaggccctgcaggccgacaatgacttcaccaatgaaaggctgacagccctgcaggtgcggctggagcacctgcaggagaagaccctgaaggaatgtagcagcctgggcatccaggtggatgacttcctgcccaagatcaatggcagcacagagaaggagaagctgattgtggagggccacctgaccaaggctgtggaggagaccaagctgagcaaagaaaaccagacccgggccaaggagagtgacttcagtgacaccctgagccccagcaaggagaagagcagtgatgacaccacagatgcccagatggatgagcaggacctgaatgagcccctggccaaggtgtccctgctgaagggcaccctgacctgcttctatgacatcgtgaaccagggcatcaagagcccctttgccatcaagtctgtgctggacatcatgtag

SEQ ID NO: 279578 - DNA, 1230 bp, Artificial Sequence
  derived and/or modified sequence
tgaaaactcatcgtggagggccacctgaccaaggctgtggaggagaccaagctgagcaaagaaaaccagacccgggccaaggagagtgacttcagtgacaccctgagccccagcaaggagaagagcagtgatgacaccacagatgcccagatggatgagcaggacctgaatgagcccctggccaaggtgtccctgctgaaggatgacctgcagggcgcccagagcgagattgaggccaagcaggagatccagcacctgaggaaggagctgattgaggcccaggagctggcccggaccagcaagcagaagtgctttgagctgcaggccctgctggaggaggagaggaaggcctacagaaaccaggtggaggagagcaccaagcagatccaggtgctgcaggcccagctgcagaggctgcacatcgacacagagaacctgcgggaggagaaggacagcgagatcaccagcaccagagatgagctgctgagcgccagagatgagatcctgctgctgcaccaggccgccgccaaggtggccagcgagcgggacacagacatcgccagcctgcaggaggagctgaagaaggtgcgggcagagctggagcgctggaggaaggccgcctctgaatatgagaaggagatcaccagcctgcagaacagcttccagctgcgctgccagcagtgtgaggaccagcagcgggaggaggccacccggctgcagggcgagctggagaagctgaggaaggagtggaatgccctggagacagagtgccacagcctgaagagagaaaatgtgctgctgagcagcgagctgcagaggcaggagaaggagctgcacaacagccagaagcagagcctggagctgaccagtgacctgagcatcctgcagatgagcaggaaggagctggagaaccaggtgggcagcctgaaggagcagcacctgcgggacagcgctgacctgaagaccctgctgagcaaggccgagaaccaggccaaggatgtgcagaaggagtatgagaagacccagacagtgctgtctgagctgaagctgaagtttgagatgacagagcaggagaagcagagcatcacagatgagctgaagcagtgcaagaacaacctgaagctgctgcgggagaagggcaacaaccccagcatcctgcagcctgtgcctgctgtgttcatcggcctcttcctggccttcctgttctggtgcttcggccccctgtggtag

SEQ ID NO: 279579 - DNA, 1521 bp, Artificial Sequence
  derived and/or modified sequence
atgcccagcgccctggccatcttcacctgccggcccaacagccaccccttccaggaacgccacgtctatctcgatgagcctattaaaattggaagaagcgtggcccggtgtcgccccgcacagaacaacgcgacctttgattgcaaagtcctcagtagaaatcacgccctggtctggttcgaccataagaccggtaaattttacttgcaagacacaaagtcctctaatggtacctttattaattctcagagattatctagagggtcagaggaaagccctccttgtgagatcctaagcggggatatcatccagttcggagttgatgtgactgagaacacccgaaaggtaacacacggatgtatcgtgagcacaatcaaactcttcctgccggacggtatggaggcgcgactgcgctcggacgtgattcacgcacccctcccgtcccccgtggacaaggtcgccgccaacacaccatccatgtactcacaggaactcttccaactgtcccagtacctccaggaagccttgcaccgcgagcagatgctcgagcaaaaacttgccactctgcagagactcctggccattacacaggaggccagcgatacttcctggcaggcacttattgacgaggaccggctcttgtcgaggctcgaggtaatgggaaatcagcttcaagcttgtagcaagaaccagacagaagacagtttgcgtaaagaactgattgctctgcaagaagacaaacacaactacgaaactactgccaaggaaagcctgaggcgtgtgctccaagagaagattgaggtggtgcgtaaattaagcgaagtggagcgttccctctctaacacggaggatgaatgcactcatttaaaggagatgaacgaacggacacaagaggagttaagggagttggccaataagtataacggtgctgtcaacgagattaaagacttatcagataagctcaaagtggccgagggcaaacaggaagaaatccagcagaaaggacaagctgaaaaaaaggaactgcagcataagattgatgagatggaggagaaggaacaggagctgcaggctaaaatcgaggctctgcaggctgataacgacttcacaaacgagagactgaccgccctgcaggtgcgacttgagcatttacaggagaaaacgctcaaagaatgttccagcctgggcatacaggttgatgacttcctgcccaagattaacggctcaactgaaaaggaaaagcttatcgtcgagggccatctaactaaagctgtggaggagacaaaactctcaaaggagaaccaaacccgggccaaggagtcagacttctctgacacactcagccctagcaaggaaaagtctagcgacgataccacggatgcccagatggacgagcaggacctgaacgagcccttggcaaaagtaagcttgctcaaagggaccctcacttgcttttatgacatagtcaatcagggcataaaaagcccattcgcaattaagagcgttttggacatcatgtag

SEQ ID NO: 279580 - DNA, 1230 bp, Artificial Sequence
  derived and/or modified sequence
tgaaagctgatcgtggagggccacctgaccaaggccgtggaggagaccaagttatcgaaagaaaatcagacacgagcaaaagaaagcgacttcagtgataccctgtctccctccaaggaaaagagcagcgatgacacgacagatgctcagatggacgagcaggacttgaatgagcctcttgccaaagtgagtctcctcaaagacgatcttcagggcgcacaaagtgaaatcgaagccaaacaagaaattcaacacctgaggaaggaattgatcgaagcccaggaactggcacgcacatcgaagcagaagtgttttgagttgcaggccttgctggaggaagagaggaaggcctaccggaatcaggtcgaagagtcaactaagcagatccaggtccttcaggctcagctccagcgactgcatatcgatactgagaatctccgcgaggaaaaagacagcgagattacctccacccgtgatgaactcctcagcgcccgcgacgagatcctgctcttacaccaggcagccgccaaggtggcttccgaacgcgatacagatatcgcctctcttcaagaggagctaaagaaagtgcgtgcagagcttgaacggtggagaaaagcagcttccgaatatgagaaggaaattacgagcttgcagaattcctttcagctccggtgtcaacagtgtgaggaccaacaaagagaggaggctacccgactgcagggggaactggagaaactgagaaaagagtggaacgccttggagactgaatgtcatagtctaaaaagagaaaatgtgttattaagttctgaactccagagacaggaaaaagagcttcataacagccaaaagcagtccctagaacttaccagcgacctgagcatcctccaaatgagcagaaaagagctcgagaatcaggtcggttcccttaaagaacagcatttgagagatagcgcagacctgaagacgctgctcagtaaagctgaaaaccaggcaaaggatgtgcagaaggagtacgagaaaacccagaccgtcctcagtgaactcaaactaaagttcgagatgaccgagcaggagaaacagtcgattaccgatgagttgaagcaatgtaagaataacctgaagttgctgagggagaaagggaacaatcccagtattctgcaaccagtacccgccgtatttattgggctctttctggcctttctgttctggtgcttcggccctctgtggtag

SEQ ID NO: 279581 - DNA, 1521 bp, Artificial Sequence
  derived and/or modified sequence
atgccctctgcattggccatctttacgtgccgcccaaattcgcacccattccaggaaagacacgtctatctggacgagccgattaagattgggcgatccgtcgccagatgcaggcccgcacaaaataacgctacgtttgattgtaaagtcttgtctcgcaaccacgccttagtgtggtttgaccacaagacaggaaaattctacttacaagatacaaagtcgtctaacggtactttcataaattcccagcgactcagtagggggagcgaagagtccccaccatgtgagatccttagtggagacatcatccagtttggcgttgacgtgactgaaaatacgcgaaaggtgacacacgggtgcattgtatcaaccataaagctgttcctgcctgacggtatggaggcccgactcaggagcgatgtcattcatgctcccctgccctctcccgtcgataaagtggccgctaacaccccaagcatgtacagccaggaacttttccagctcagccagtacctccaggaagccctccaccgggagcagatgcttgagcagaagctggctactctgcagagactgctggccattactcaggaggcatccgacactagttggcaggcgctcattgacgaagatagactgctaagccggctggaggtaatggggaatcagcttcaagcttgtagcaaaaatcagacagaggacagcttgagaaaggagcttatagctctccaagaggataagcacaattatgaaaccacggccaaggaaagtcttcgtcgtgtcctgcaagagaaaatcgaagtcgttcgcaagttgtccgaggtcgagagatccttatcaaacacagaggacgagtgcacacacctgaaggaaatgaatgaaaggactcaggaagaactgagggagttagcaaacaaatataatggcgctgtaaacgaaatcaaagacctgagcgataagctgaaggtcgctgagggtaagcaggaggagatccagcagaaagggcaggcagagaagaaggagctccagcataagatcgacgaaatggaagagaaagaacaggagctgcaggccaagatagaggccctgcaggcagataacgattttacaaacgagaggttgaccgcactgcaagtgcgactcgagcacctgcaggagaaaactttgaaggagtgttcctcactggggatccaggtcgacgatttccttcccaaaattaatggatccacggaaaaggagaagttaatcgtcgagggtcatctgaccaaggcagtggaagagacaaaattgtctaaggagaaccagaccagggcgaaggagtcagatttttccgacaccctgtcaccgtctaaagaaaagtcttcagacgatacaacggacgcacagatggacgagcaagacctgaatgagcccctggcaaaagtgtccctactcaagggtaccctgacatgcttctacgatattgttaatcaaggtatcaagtcaccttttgctatcaaatccgtgctcgacataatgtag

SEQ ID NO: 279582 - DNA, 1230 bp, Artificial Sequence
  derived and/or modified sequence
tgaaaactcatcgtcgagggccatcttacgaaggcagtcgaggaaactaagctgagcaaagagaaccaaacgcgggctaaggagagtgacttctctgatactctgagtccgtctaaggaaaagtcttcagatgacactaccgacgctcagatggacgaacaggacttgaatgaaccactcgcaaaggtgtcgctcttgaaggatgatctccagggcgctcagtctgagattgaagccaaacaggagattcaacacctgcgaaaagagttaatagaggcgcaggagttggctcggacttccaagcagaaatgcttcgagcttcaagccctattagaggaagaacgaaaggcatataggaatcaggtggaggagagtaccaaacagatccaggtgctacaggcgcagcttcagcgtctgcatatcgataccgagaatctgcgggaggagaaggattccgagataaccagcactcgtgatgaactgttatccgctagagacgaaattctgctgctccaccaggcagccgctaaagttgcttccgaacgcgacacagatatagcaagtcttcaggaggagctgaaaaaggtacgagccgaacttgaaagatggaggaaagccgctagcgaatatgagaaggagatcacttctttacaaaatagcttccaactcagatgtcagcagtgtgaggaccagcagagggaggaggctacacggctgcagggagagttagagaagcttcgtaaggaatggaatgcgcttgagacagagtgtcactccctcaaacgggagaatgtgctgttgtcatccgaattacagcgccaggagaaagagctccacaactcgcagaaacagtcgctcgagctgacaagcgatctgtctattttgcaaatgtcgcgcaaggagttggagaaccaggtggggagccttaaagagcagcacttaagagacagcgccgacctcaagacacttctgtccaaggccgagaaccaggcgaaggacgtgcaaaaagaatatgagaaaacccagactgttttatctgaattgaagctaaagttcgagatgacggagcaggaaaagcagtctatcaccgacgagttaaagcagtgcaagaataatcttaaattgctcagggagaagggtaataacccatctattctacagcctgtgcccgctgtgtttatcgggctgtttctggccttcctgttctggtgtttcggccctctttggtag

SEQ ID NO: 279583 - DNA, 6749 bp, Artificial Sequence
  derived and/or modified sequence
tttgggtgggataggggcataggcttgtgaagggcagtccggatccggaggaactcctctttgtccctggtaggagagacacccccagtctatcctcgatgccgtcagccttggccatcttcacttgccgcccgaactcgcacccgtttcaggagcgtcatgtctacctggacgagcccatcaaaatcggccgctcagtggcccgctgtcgaccagcgcagaataatgccacttttgattgcaaagtgctatcaaggaaccacgctctcgtctggtttgatcacaagacgggcaagttttatcttcaagacactaaaagtagtaatggtacttttataaatagccagagattgagtcgaggctctgaagaaagtccaccatgtgaaattctttccggtgacattatccagtttggagtagacgtgacagagaatacacggaaagttacccatgggtgtattgtttccacaataaaactttttctaccagatggtatggaagcccggctccgctcagatgtcatccatgcaccattaccaagtcctgttgacaaagttgctgctaacactccaagtatgtactctcaggaactattccagctttctcagtatctacaggaggccttacatcgggaacaaatgttggaacagaagttagccacgcttcagcggctactagccatcacccaagaggcttcagataccagttggcaggctttaatagatgaagatagactcttatcacggttagaagttatgggaaaccaattacaggcatgctccaaaaatcaaacagaagatagtttacgaaaggaacttatagcattacaagaggataaacataactatgagacaacagccaaagagtccctgaggcgggttcttcaggagaaaattgaagtggttagaaaactttcagaagttgagcgaagtctgagtaatactgaagatgaatgtacccatctgaaagaaatgaatgaaaggactcaggaagaattaagagaattagccaacaaatataatggagcagttaatgagattaaagatttatctgataaattaaaggtagcagagggaaaacaagaggaaatccaacagaagggacaggctgagaaaaaagaattacaacataaaatagatgaaatggaagaaaaagaacaggagctccaggcaaaaatagaagctttgcaagctgataatgatttcaccaatgaaaggctaacagctttacaagtacggttagaacatcttcaggagaaaactcttaaagaatgcagcagcttggggatacaagttgatgacttcttacctaaaataaatgggagcacagaaaaagagaagctgatcgtcgaagggcatctaaccaaagcggtagaagaaacaaagctttcaaaagaaaatcagacaagagcaaaagaatctgatttttcagatactctgagtccaagcaaggaaaaaagcagtgacgacactacagacgcccaaatggatgagcaagacctaaatgagcctcttgccaaagtgtcccttttaaaaggtactttaacatgtttttatgacatcgtaaaccagggtatcaaatcaccctttgccataaaatctgttctagatattatgtgaagttttaatttttagttaagagattaagataggttctgtaaagtagcagggactaaaaatttaaagttttggtgtttatacccaatatttcaaactattgttgaataatttggatcagtcaagattacgagggacaaagtgttaagtggtagaatatgaaatgcagctgtgttttttgtttacccttgtgtctctaataggaatttattagcgcttttaacataattagaataaggtgaaaatcttaactttcttgaaagactcaccggtttactctgttatcatatggtagcagttgtaaatttccttattttctggtcttcttcatcttctaataaatatccccaggttcttatgacactcttctagaaattttgggctaagaaactttaggtggatggccaggcatggtggctcacgcctgtaatctcagcactttgggaggctgaggcaggtggatcatctgaggtcaggagtttgagaccagcctgaccaacatggagaaaccctgtctctactaaaagtacaagattagccgggtgtggtggcgcgtgcctgtaatctcagctactcgggaggctgaggcaggagaattgcttgaatgcaggaggcagaggttgtggtaagaggtcatgccattgcactccagcctgggcaataagagcaaaactccatctcaaaaaaaaaaatgaaaaaaagaaagaaattttagatgttgataagataagtaatgcatgtaattaactctttgtctcacctctaaacaggaagtacatttcttgatatttacttgtttagaatgaagtgggtagaaaataaatcagcatttataaaaatgtttttaaaataaagttccttggggatagtttactggaaaattgtcaacattcagtctcttttatgttgccttattgtacacaagaaaaattgacatatgttgtaagttcagcccagtgggtttattaaaaatgttggtagtggtgtactaacaccagacagctctctgggatcagagtgacagtagcagcctgtggaaatttctctttgtggaagtgccgatttttctggctggactaatagggaatctccttgtccagaccccgagctttgggattatataaggaaggagcactcttactgatttgtactcttcttaggtgatctttggtgttgataagacatgctttttttctaatgtcataataataaatataagttaatgttggtatgatccagaactctcatctcagaaatgcaataccattattgtgtaaaatgtagttactgatactgaaagaatgtcagaccctatgggcctttatgggaacgtggagaaaaaagaagggaggtaaatgagtaatgaacacacccatacaaaagtagccctctttatggtcttttgcactacagaactctcttttttctttttctttttttctttttgtaggtacatagtaggtgtatatatttatagggtacatgagctgttttggtacaggcattcagtgttacagaaatcttttcaatagccaacttaagattgagtatagtgtttatgattgtgttaattgtattcaactattattagtgcttttgtgatttttgtcagtctgttttagatttgatttttatcccattgcctaccacaatgcaggtattcagtaaaactcagatatttgatgaattaattgataatggacttcttacattaaaattataaagacacaagagcattaggaaagtaacactagccacaaagctaagagccaaagaactctgggttcagtcataggtttgccatttatttgtaatatgtccttggcaaattgcttaactgctctgtgattcagggttttttcatgtattagactggcgaaaaccaactttataggtttattgtgaagattgaatgaaagggtgtgcatggaccacttaccatggtgttgggaacataaaatgttaaccaccataatgaagacactgatcatgatgatgatggtgattgataaaagcaggcctatctgttgaaggactctgagtaactccatattaattgaataagattgtggagttttaaaattatttcctatagtatttaggaacaaggatttgtttgtaatggattttttctaattagtaatgcatttatttgtttgttacttgccagataatcaggaaaaaatatttttaatccatgagtagcaccaaacagtatctataaaagtactcacaatatagcctgggaagtcagactcaaggaacagggaatgaaaggggaaagatgtaggaaaagattggaaaatacaagatgcatgtggagctggcggcctgtgtgcagatgctattagtaattgcttcaggtgccattgatgaagatgggtcagagtttccctaaccttgctttacgttaaggtgaaagaacttctaaaacttttctttacatttctgtatgattgccaacttttttgttaatgaagtagtatctttataaatacctgctgaaagattttgtggcttgattttatttttatgaatttttttacttattttgttttgttttgtttttagagacaggggtcttgctaagttggtcaggttggtcttgaacttctgagctcaagcgttcctctcacctcagcctcccacctcagcttcccaagtagctgggactacaggcatgcaccaccctacccgacttgtttactctttcactttgtttctctttctctctctgtctctctctctttttgcagcttgattttaagaacagactgtcaagtcagtcagtgattggatgtaaagaaaaatcatctaggtagaaggaggcatattttagaagagtctccaagagataattatcatagccctttatggtcattattatttttcttttgtaaagtttctcttgtaagagttttacaaattcttaaaagtgatgtattactggtactttttagaaacatttatgttatgcttgattatgtgtggttatggtttgtatctgtataattaggttcaatagactgacataattttctcttaaaagtataaattactagacaacagtgttgacctttacagctatataaggcagctacatataagtagcctctttattttcctcattcaaactttgtgcctgacttcccgaaccattattttcaagttttttttccccttttttaaaaaatagccaatctttttctttagatttattgtgtacgacttgtcacatttgtcagctaggacaaggaaaataataataaacattcattatgagataaaatgatgatagcagtagtaccttttccctgatatagtaatcatttctatctatttagttacttttaaatgagaaataagttgatcaaaccatgttttctgtatgcttgaaaccatctcccataaaacgttttttaaaattggaattcacttcaaatcatgtctgttgcaaatttgctctgtttggggaaccttgccagggactgcagtggttttaaagtctaataagactgtcgggccggacgtagtggctcatgcctgtattcccaacactatgggaggctgaggcggcctgatcacttgagcccaggagtttgagaccagcctgggcaacatggcaaaaccccatctctacaaaaattagccaggcatggtggtgcatgcctatagtctcagccactcagaaggctaaggtgggaggatcacttgagcccagacggcagaggttgcagtcagcccagatcgtgccactacactctagcctcggtgacagagcaagactctgtctcaaaaacaaaagcaaaaatctatcctctggatttaaggaatttcaaggcaaattagtgatagtacattttttaaaactttgtattttccttgtgcctcaacatccccacaaacaggccgtgaacactctgccctggcaaccagatgcaccagtatgataaggctggtccctgccacaagttccccttcataaccttccctggcagtgccctagtgaaatttaacgaaatcacctcatgccttttgtttgtgtatcctgacccccaatacaagcatttgcctacaggtcctcactctatcagttatacctatttggctgaacccattctttgggcttctcccatatggttccctgcatggtgtaccttgcctccctctctaggacctttgagtataataaatcctttaatttcatttacctctccaagtataattcccacagctatgttggagtgatccttgaggaccccacagggagacttactccctcccccatttaccacacagagagttatagatgataagctgattattggtggttgttgccatcagcagtcaaagaaaagagaatgcccagggtttttttgtttgtttgtttgtttcagaggatagagaagaaaggcattttgagtttcatgggacaagagtcatttgaaatgactctataaatagtgtgtcttaccatatgtgatatattcagtgattaagaaaaactaaacctaaatctgatcaagactctagctccaactgccagtttgcaggacatacaaagaactaggcacatattctaaatgatgtgatggggatacaaccagcaaaatccagaatgtggaagattctacaggacatacaacccagtttctttagcaattaaattagaaggggaaaaaaaggaaaggggatgggggaaatcctataaattaaaagagatttaagagttatgtcggccaggcgtggtggctcacacctgtaatcctagcattttgggaggccaaagtgggcagatcacttgaggtcaggagttcgaacctagcttggccatcatggtgaaaccctgtctctactaaaaatacaaaaaattagctgggcttggtggtgcacacctgtaatcccagctacttgggaggctgaggcaggaaaatcgcttgaacccgggaggcagaggttgcagtgaaccaagatcatgccaccacactccagcctgggtgacacagcgagactccatctcaaaaagaaaaaaagagagagagatgtcaactaaatataatgtatgaaccttgtatgaatcttcattcaaacaattcaactgtaaaataaatttggaacaatggaaaattttaa

SEQ ID NO: 279584 - DNA, 3066 bp, Artificial Sequence
  derived and/or modified sequence
agaagctgatcgtcgaagggcatctaaccaaagcggtagaagaaacaaagctttcaaaagaaaatcagacaagagcaaaagaatctgatttttcagatactctgagtccaagcaaggaaaaaagcagtgacgacactacagacgcccaaatggatgagcaagacctaaatgagcctcttgccaaagtgtcccttttaaaagatgacttgcagggtgcacagtcagaaattgaggcaaagcaagaaatacagcatcttcgaaaggaattgatcgaagcccaggagctagctagaacaagtaaacaaaaatgctttgaacttcaagctcttttggaagaagaaagaaaagcctatcgaaatcaagttgaggaatccactaaacaaatacaggttcttcaagcccaattgcagaggttacacatcgatactgagaatctccgggaggagaaggacagtgaaatcacaagtactagagatgaattgcttagtgcccgagatgaaattttgctccttcatcaagcagcagcaaaggttgcctctgagcgggacactgacattgcttctttacaagaagagcttaagaaggtgagagctgagcttgagcggtggcggaaagcagcgtctgaatatgagaaagaaatcacaagtctgcaaaacagttttcagcttagatgtcaacagtgtgaggaccagcagagagaagaagcaacaaggttgcaaggtgaactagagaagttgagaaaggaatggaatgcattggaaaccgaatgccattctctaaaaagggaaaatgttttgctatcatcagaactgcaacggcaagaaaaagaattgcacaattctcagaagcagagtttagagcttaccagtgatctcagcatccttcaaatgtctaggaaagaacttgagaatcaagtgggatccttgaaagaacagcatcttcgggattcagctgatttaaaaactcttctcagtaaggcagaaaaccaagcaaaggatgtgcagaaagagtatgaaaagacacagactgtactctcagaactgaagttgaagtttgaaatgactgagcaggaaaagcagtcaatcacagatgagctcaaacagtgtaaaaacaacctgaagctgctccgagagaaaggaaataatccttccatattacaacccgtcccagccgtattcatcggcctattcctggctttcctgttttggtgtttcggtccattgtggtagagaaagaaaccctggccctggatgcccatgttggctgccctggttgcagtaacagccatcgtgctgtacgtgccaggtctggccagagcttctccatgagagcgttccttgagtccgtacaccgtcctccctctagaagctggcatcacactcatgctggggacaaacagaaccattttcttcctctttacctcttaaaacagcagaagtacaagaatacagctgtagggtcattgctttaaattatataaaatgtatctgtctataaagaagatataaaattgtgactttattctactgtaagcaataatttgcttgcaatttttcatgtaatttttaaattagtatgttaagattctgaatattatggtggcctaaagtaggcttcttggtacaccagattatttataacattaaatttatgagtattttactctgaattctgatcaccagataattcatttttctgatttgataactacccaaaccaaacaaccaatacatacatgggaagagaggccctgtgtgctcagtgcctatcagtttgaaatatatacacatatatatattttttacatatttacgccatttttacttgttatgaaaccactgagctattgggaacaagacttagagacaactatttgcgtggatttttttttttttaaggaaaaatacgtttggaaaataaactgttatggtgataatttggggaatatgtgcacgcttgttcagccttaatgtgacttgaagatgtggaggacatcaactttgaaaaactttccatgagagtgtattttcttgagcaaactgaagtatttctgggagcaaaaacatagtaattacacaatttcagtgcagtcaaccaaaatgttgagtcaattggaatgtaatttattaaaccatgtatttaaagagatatttttctttaaaagccaagttactttctcatatacagcattttaggaagcatgattttttttttctatcatctattcctccaagcatgtttaattgaagaaagtattaatatctctttagataagcttgtattgacctaatttggtttatgatgtgtcagagctaattcatgttcagggtgagcgttgtacctaccaacaaatttcctggttgggtatgcaaatggttattttctttttattgttgttaattgggactttctgttaatgaaaagcactattcccaagattaatagtgttctatgcacaatgaagcacctaaaaacactgcttgatattataaatttaaaacacaagtgaaagtttagccatggttttgtgcggcatcatagttatgtcaataaagtttatttaggtcatagaatatcctaaagtatcacatagttaaatttttcagtcagtgaagaccgggagggaatgtcagtgaattggcttgaatgttctgtggcaatccacaggtctagccaaatattgaaataggagtttagggtataatttgccttgtgatgtttggcagtcactgtttatactttaaaggttatattttaagctatttgagattgcttttgggaagatcactagatttatggaggaattagtcacaaatgacttgtagaaaatactgtcatatagttcatttcatcattttctgttgcaggaagccactccaccacagaatgctaatatgccagtggtacccagtacctcttgtatataggttattgcaaatattgttctgaaatgcttaacttcagaattacattttttaaagtaaataattgttttaaatctattttgtaaagatataaagtacaatagaatttctggagtacagattaaactatttgcactaacac

SEQ ID NO: 279585 - DNA, 1305 bp, Artificial Sequence
  derived and/or modified sequence
ataatttaatatgagctacgtgtaataaccagcattccattttggacaagggtggtgaagaaaaaatcagacaagagcaaaagaatctgatttttcagatactctgagtccaagcaaggaaaaaagcagtgacgacactacagacgcccaaatggatgagcaagacctaaatgagcctcttgccaaagtgtcccttttaaaagctcttttggaagaagaaagaaaagcctatcgaaatcaagttgaggaatccactaaacaaatacaggttcttcaagcccaattgcagaggttacacatcgatactgagaatctccgggaggagaaggacagtgaaatcacaagtactagagatgaattgcttagtgcccgagatgaaattttgctccttcatcaagcagcagcaaaggttgcctctgagcgggacactgacattgcttctttacaagaagagcttaagaaggtgagagctgagcttgagcggtggcggaaagcagcgtctgaatatgagaaagaaatcacaagtctgcaaaacagttttcagcttagatgtcaacagtgtgaggaccagcagagagaagaagcaacaaggttgcaaggtgaactagagaagttgagaaaggaatggaatgcattggaaaccgaatgccattctctaaaaagggaaaatgttttgctatcatcagaactgcaacggcaagaaaaagaattgcacaattctcagaagcagagtttagagcttaccagtgatctcagcatccttcaaatgtctaggaaagaacttgagaatcaagtgggatccttgaaagaacagcatcttcgggattcagctgatttaaaaactcttctcagtaaggcagaaaaccaagcaaaggatgtgcagaaagagtatgaaaagacacagactgtactctcagaactgaagttgaagtttgaaatgactgagcaggaaaagcagtcaatcacagatgagctcaaacagtgtaaaaacaacctgaagctgctccgagagaaaggaaataatccttccatattacaacccgtcccagccgtattcatcggcctattcctggctttcctgttttggtgtttcggtccattgtggtagagaaagaaaccctggccctggatgcccatgttggctgccctggttgcagtaacagccatcgtgctgtacgtgccaggtctggccagagcttctccatgagagcgttccttgagtccgtacaccgtcctccctctagaagctggcatcacactcatgctggggacaaacagaaccattttcttcctctttacctctta

SEQ ID NO: 279586 - protein, 316 aa, Artificial Sequence
  derived and/or modified sequence
  misc_feature (1)..(1): Xaa can be any naturally occurring amino acid
XGHLTKAVEETKLSKENQTRAKESDFSDTLSPSKEKSSDDTTDAQMDEQDLNEPLAKVSLLKALLEEERKAYRNQVEESTKQIQVLQAQLQRLHIDTENLREEKDSEITSTRDELLSARDEILLLHQAAAKVASERDTDIASLQEELKKVRAELERWRKAASEYEKEITSLQNSFQLRCQQCEDQQREEATRLQGELEKLRKEWNALETECHSLKRENVLLSSELQRQEKELHNSQKQSLELTSDLSILQMSRKELENQVGSLKEQHLRDSADLKTLLSKAENQAKDVQKEVKRKDIMSPIMVGLKAKSKSDIHAS

SEQ ID NO: 279587 - DNA, 1021 bp, Artificial Sequence
  derived and/or modified sequence
ggtcgcggagctgcggccagctttgggagggccggccccgggatgctacacacaacccagctgtaccagcatgtgccagagacacgctggccaatcgtgtactcgccgcgctacaacatcaccttcatgggcctggagaagctgcatccctttgatgccggaaaatggggcaaagtgatcaatttcctaaaagtttctgtttgagcgtgtggagggcatctccagggctaccatcattgatcttgatgcccatcagggcaatgggcatgagcgagacttcatggacgacaagcgtgtgtacatcatggatgtctacaaccgccacatctacccaggggaccgctttgccaagcaggccatcaggcggaaggtggagctggagtggggcacagaggatgatgagtacctggataaggtggagaggaacatcaagaaatccctccaggagcacctgcccgacgtggtggtatacaatgcaggcaccgacatcctcgagggggaccgccttggggggctgtccatcagcccagcgggcatcgtgaagcgggatgagctggtgttccggatggtccgtggccgccgggtgcccatccttatggtgacctcaggcgggtaccagaagcgcacagcccgcatcattgctgactccatacttaatctgtttggcctggggctcattgggcctgagtcacccagcgtctccgcacagaactcagacacaccgctgcttccccctgcagtgccctgacccttgctgccctgcctgtcacgtggccctgcctatccgccccttagtgctttttgttttctaacctcatggggtggtggaggcagccttcagtgagcatggaggggcagggccatccctggctggggcctggagctggcccttcctctacttttccctgctggaagccagaagggcttgaggcctctatgggtgggggcagaaggcagagcctgtgtcccagggggacccacacgaagtcaccagcccataggtccagggaggcaggcagtt

SEQ ID NO: 279588 - protein, 236 aa, Artificial Sequence
  derived and/or modified sequence
MGLEKLHPFDAGKWGKVINFLKEEKLLSDSMLVEAREASEEDLLVVHTRRYLNELKWSFAVATITEIPPVIFLPNFLVQRKVLRPLRTQTGGTIMGVASTTAPATVAGASVPMRTSRSPSSFCLSVWRASPGLPSLILMPIRAMGMSETSWTTSVCTSWMSTTATSTQGTALPSRPSGGRWSWSGAQRMMSTWIRWRGTSRNPSRSTCPTWWYTMQAPTSSRGTALGGCPSAQRAS

SEQ ID NO: 279589 - DNA, 711 bp, Artificial Sequence
  derived and/or modified sequence
atgggcctggagaagctgcaccccttcgacgccggcaagtggggcaaggtgatcaacttcctgaaggaggagaagctgctgagcgacagcatgctggtggaggccagagaggccagcgaggaggacctgctggtggtgcacaccagaagatacctgaacgagctgaagtggagcttcgccgtggccaccatcaccgagatcccccccgtgatcttcctgcccaacttcctggtgcagagaaaggtgctgagacccctgagaacccagaccggcggcaccatcatgggcgtggccagcaccaccgcccccgccaccgtggccggcgccagcgtgcccatgagaaccagcagaagccccagcagcttctgcctgagcgtgtggagagccagccccggcctgcccagcctgatcctgatgcccatcagagccatgggcatgagcgagaccagctggaccaccagcgtgtgcaccagctggatgagcaccaccgccaccagcacccagggcaccgccctgcccagcagacccagcggcggcagatggagctggagcggcgcccagagaatgatgagcacctggatcagatggagaggcaccagcagaaaccccagcagaagcacctgccccacctggtggtacaccatgcaggcccccaccagcagcagaggcaccgccctgggcggctgccccagcgcccagagagccagctag

SEQ ID NO: 279590 - DNA, 711 bp, Artificial Sequence
  derived and/or modified sequence
atgggtctggagaagttacacccgtttgacgccggcaaatggggcaaagtcatcaactttttgaaagaagagaagctgttgagcgacagtatgcttgtagaggccagagaagcctccgaagaagatctgctagtcgttcatacacgacgctacctgaatgaactgaagtggtcctttgctgtggcaaccatcactgagatccctcccgtgatattcttgcctaattttttggtccagcgcaaggtgctcaggcccctgcggacacagacaggcgggaccattatgggagtggcaagtaccaccgctccggctaccgtggcgggcgcctccgtccccatgcggacctccagaagtcctagtagcttctgtctctctgtgtggcgcgcttctcctggccttccctctctcattctcatgcctattcgagccatgggtatgagtgagacgagctggactactagtgtctgtacatcctggatgagcactacggccacatctacccagggcaccgccttaccatctagaccgtccggggggcggtggagttggtcaggcgcacaacggatgatgagcacttggatcagatggcgagggaccagcagaaacccctctagatcaacctgtcccacatggtggtatactatgcaggctcccacaagttctcgcggaaccgcgctgggtggctgcccatccgcgcagcgcgcctcctag

SEQ ID NO: 279591 - DNA, 711 bp, Artificial Sequence
  derived and/or modified sequence
atgggcctggagaagctgcacccctttgatgctgggaagtggggcaaggtgatcaacttcctgaaggaggagaagctgctgagtgacagcatgctggtggaggcccgggaggccagcgaggaggacctgctggtggtgcacacccggcgctacctgaatgagctgaagtggagctttgctgtggccaccatcacagagatcccccctgtgatcttcctgcccaacttcctggtgcagaggaaggtgctgcggcccctgcggacccagacaggaggcaccatcatgggcgtggccagcaccacagccccagccaccgtggccggggcctctgtgcccatgaggaccagccgcagccccagcagcttctgcctgtctgtgtggagggccagccctggcctgcccagcctcatcctgatgcccatccgggccatgggcatgtctgagacctcctggaccacctctgtgtgcacctcctggatgagcaccacagccaccagcacccagggcacagccctgcccagccggcccagcggcggccgctggagctggagcggggcccagaggatgatgagcacctggatccgctggaggggcaccagcaggaaccccagccgcagcacctgccccacctggtggtacaccatgcaggcccccaccagcagccggggcacagccctgggcggctgccccagcgcccagagggccagctag

SEQ ID NO: 279592 - DNA, 711 bp, Artificial Sequence
  derived and/or modified sequence
atgggcctggagaagctgcaccccttcgacgccggcaagtggggcaaagttatcaatttcctcaaggaagagaagctactgagtgattctatgcttgttgaagctcgggaggctagtgaagaggatctgctcgtggtgcacacccgcagatacctaaacgagctgaagtggagctttgcggtggctacaattactgagattccaccggtgatcttcctccctaactttttggtgcaaaggaaagtacttcggccgctgaggacacaaacaggaggcaccatcatgggtgtcgccagtactacagcgcctgctaccgtcgctggcgctagtgtccccatgcggacctctagatctccttcttccttctgcctgtccgtgtggagagcctcccctggtctcccatctctgattctgatgcccatccgggctatgggaatgtccgaaaccagctggacaacctccgtttgtacttcctggatgtccactacggcaacgagcacccaaggcaccgctctgccctccaggcccagtgggggacgttggtcctggtcgggcgctcagaggatgatgtccacctggattaggtggcgtgggacgtcgcggaatccaagccgctcaacctgtccgacttggtggtacactatgcaggcccctacctcatcacggggcacggcattagggggctgtccaagcgcacagcgggccagttag

SEQ ID NO: 279593 - DNA, 711 bp, Artificial Sequence
  derived and/or modified sequence
atgggccttgagaagctgcatcctttcgacgccggtaaatgggggaaagtaataaacttcttaaaagaggaaaaattgctgagtgactccatgctcgtggaggccagggaggcatccgaggaggacctcctagtggttcacactcgtagatacttaaatgagctaaaatggtcgtttgccgttgcaactattactgaaatcccccctgtcattttcctaccgaacttcctggtccaaagaaaggtcttaagacccctccggacccagactgggggaactattatgggcgtggcatctacaaccgcacccgctacagtggccggtgcctccgtgcccatgcgcacttcccgtagccctagctccttctgtttgagcgtgtggcgggcatcccctggactgccaagtctgatactgatgcccattcgggctatgggcatgtctgagaccagctggaccacaagtgtgtgcacatcttggatgagtactacggctacttctactcagggtacagccttgccgtcccgaccgtctggtggcagatggtcctggtccggagctcagcgcatgatgtctacatggataagatggcggggtacttcccggaacccgagccgctctacatgtcccacttggtggtacacaatgcaggcccctacatcgagcagaggcacagcactaggtggctgtccatcggcccagcgagccagttag

SEQ ID NO: 279594 - protein, 473 aa, Artificial Sequence
  derived and/or modified sequence
MRAGPGPTVTLALVLAVSWAMELKPTAPPIFTGRPFVVAWDVPTQDCGPRLKVPLDLNAFDVQASPNEGFVNQNITIFYRDRLGLYPRFDSAGRSVHGGVPQNVSLWAHRKMLQKRVEHYIRTQESAGLAVIDWEDWRPVWVRNWQDKDVYRRLSRQLVASRHPDWPPDRIVKQAQYEFEFAAQQFMLETLRYVKAVRPRHLWGFYLFPDCYNHDYVQNWESYTGRCPDVEVARNDQLAWLWAESTALFPSVYLDETLASSRHGRNFVSFRVQEALRVARTHHANHALPVYVFTRPTYSRRLTGLSEMDLISTIGESAALGAAGVILWGDAGYTTSTETCQYLKDYLTRLLVPYVVNVSWATQYCSRAQCHGHGRCVRRNPSASTFLHLSTNSFRLVPGHAPGEPQLRPVGELSWADIDHLQTHFRCQCYLGWSGEQCQWDHRQAAGGASEAWAGSHLTSLLALAALAFTWTL

SEQ ID NO: 279595 - protein, 48 aa, Artificial Sequence
  derived and/or modified sequence
MRAGPGPTVTLALVLAVSWAMELKPTAPPIFTGRPFVVAWDVPTQDCG

SEQ ID NO: 279596 - protein, 117 aa, Artificial Sequence
  derived and/or modified sequence
MRAGPGPTVTLALVLAVSWAMELKPTAPPIFTGRPFVVAWDVPTQDCGPRLKVPLDLNAFDVQASPNEGFVNQNITIFYRDRLGLYPRFDSAGRSVHGGVPQNVSLWAHRKMLQKRV

SEQ ID NO: 279597 - protein, 81 aa, Artificial Sequence
  derived and/or modified sequence
MRAGPGPTVTLALVLAVSWAMELKPTAPPIFTGRPFVVAWDVPTQDCGPRLKVPLDLNAFDVQASPNEGFVNQNITIFYRD

SEQ ID NO: 279598 - protein, 76 aa, Artificial Sequence
  derived and/or modified sequence
MRAGPGPTVTLALVLAVSWAMELKPTAPPIFTGRPFVVAWDVPTQDCGPRLKVPLDLNAFDVQASPNEGFVNQNIT

SEQ ID NO: 279599 - protein, 121 aa, Artificial Sequence
  derived and/or modified sequence
MRAGPGPTVTLALVLAVSWAMELKPTAPPIFTGRPFVVAWDVPTQDCGPRLKVPLDLNAFDVQASPNEGFVNQNITIFYRDRLGLYPRFDSAGRSVHGGVPQNVSLWAHRKMLQKRVEHYI

SEQ ID NO: 279600 - DNA, 1422 bp, Artificial Sequence
  derived and/or modified sequence
atgagagccggccccggccccaccgtgaccctggccctggtgctggccgtgagctgggccatggagctgaagcccaccgccccccccatcttcaccggcagacccttcgtggtggcctgggacgtgcccacccaggactgcggccccagactgaaggtgcccctggacctgaacgccttcgacgtgcaggccagccccaacgagggcttcgtgaaccagaacatcaccatcttctacagagacagactgggcctgtaccccagattcgacagcgccggcagaagcgtgcacggcggcgtgccccagaacgtgagcctgtgggcccacagaaagatgctgcagaagagagtggagcactacatcagaacccaggagagcgccggcctggccgtgatcgactgggaggactggagacccgtgtgggtgagaaactggcaggacaaggacgtgtacagaagactgagcagacagctggtggccagcagacaccccgactggccccccgacagaatcgtgaagcaggcccagtacgagttcgagttcgccgcccagcagttcatgctggagaccctgagatacgtgaaggccgtgagacccagacacctgtggggcttctacctgttccccgactgctacaaccacgactacgtgcagaactgggagagctacaccggcagatgccccgacgtggaggtggccagaaacgaccagctggcctggctgtgggccgagagcaccgccctgttccccagcgtgtacctggacgagaccctggccagcagcagacacggcagaaacttcgtgagcttcagagtgcaggaggccctgagagtggccagaacccaccacgccaaccacgccctgcccgtgtacgtgttcaccagacccacctacagcagaagactgaccggcctgagcgagatggacctgatcagcaccatcggcgagagcgccgccctgggcgccgccggcgtgatcctgtggggcgacgccggctacaccaccagcaccgagacctgccagtacctgaaggactacctgaccagactgctggtgccctacgtggtgaacgtgagctgggccacccagtactgcagcagagcccagtgccacggccacggcagatgcgtgagaagaaaccccagcgccagcaccttcctgcacctgagcaccaacagcttcagactggtgcccggccacgcccccggcgagccccagctgagacccgtgggcgagctgagctgggccgacatcgaccacctgcagacccacttcagatgccagtgctacctgggctggagcggcgagcagtgccagtgggaccacagacaggccgccggcggcgccagcgaggcctgggccggcagccacctgaccagcctgctggccctggccgccctggccttcacctggaccctgtag

SEQ ID NO: 279601 - DNA, 1422 bp, Artificial Sequence
  derived and/or modified sequence
atgagagccgggccaggtcccactgttacgcttgcattggttctcgcagtgagctgggctatggaattgaaacctaccgccccacctatattcaccggacgcccctttgtggtcgcctgggatgtgcctactcaggattgcgggcctcgtctcaaagtcccccttgacctgaatgcatttgatgttcaagcctctcctaatgagggctttgtcaaccaaaatattaccatcttttaccgggaccggttggggctttatccacggttcgactctgctgggcgctctgtgcacggcggggtgcctcagaatgtgtctctctgggcacataggaaaatgcttcagaagcgtgtggaacactatattcggactcaagagtcagcaggtctagctgtaatcgattgggaggattggcgaccagtctgggtaaggaactggcaggataaggacgtgtatcgcaggctaagcagacagctggttgcttctcgtcacccagactggccccccgaccgaattgtgaaacaggcccagtatgaattcgaattcgctgcccaacagttcatgcttgaaaccttgcgctacgtgaaggccgtgcggcctcggcatttatggggattttacttatttccggattgctacaaccacgattatgtgcaaaactgggaatcgtataccggcagatgtccggatgtcgaagtcgctcggaatgaccagctggcatggttatgggctgagagcacagccctatttcccagcgtttacttagacgaaaccctagcatcaagccgccacggaagaaattttgtttctttcagagtgcaagaggcccttcgggttgctagaactcaccatgctaatcacgctttaccagtgtacgtgtttacgcgtcccacctactcaagaaggctgacaggactttctgaaatggacctgattagtacaattggagagtccgccgctctgggtgccgctggagtgatcctttggggagatgccggctacactacctccactgagacatgtcagtatcttaaagattatctgaccaggcttctggtgccatatgtcgtgaatgtgtcgtgggcgactcagtactgtagcagggctcagtgccatggacacggccgttgcgttaggcggaatcccagtgcttccacctttttgcatttaagcactaactcatttcggctggtccccggtcacgcacccggcgagcctcagctgagaccagtgggtgagctcagttgggccgacatcgaccatctccagacgcactttcgatgccagtgctatctcgggtggtccggcgagcagtgccagtgggatcaccgtcaggccgccggaggggcctctgaggcctgggccggatcgcatctaacctcactgcttgccctcgccgctctggcattcacctggacattgtag

SEQ ID NO: 279602 - DNA, 1422 bp, Artificial Sequence
  derived and/or modified sequence
atgcgcgctgggccaggcccaacggtgaccctagcccttgttttagccgtgagttgggcaatggagctgaaaccgaccgcccctcctattttcacgggaagaccattcgtggtggcttgggacgtccccacacaggattgtggccctcgcctgaaggtgccactggaccttaacgcctttgatgttcaggcctcaccaaatgaaggcttcgtcaaccagaatattaccatattctatagagacaggctgggtctgtaccctcgctttgatagcgcaggacggtctgttcatggtggcgtcccacaaaacgtctccttatgggcacatcgcaaaatgctccagaagcgggtggaacattacatccggactcaggagtcggcaggactggctgtgatagactgggaggactggagacccgtgtgggtcaggaactggcaagataaggatgtctataggcgactgtccaggcagctcgtcgcatctagacaccctgactggcctccggacagaattgtgaagcaggcacagtacgaattcgagttcgccgcacagcagttcatgctggagacactgaggtacgtaaaagccgtgagaccccgtcatctgtgggggttctatctgttcccagactgctacaatcacgattatgtacaaaactgggaatcttacacagggcgctgccccgatgttgaggttgcccgtaacgaccagctagcatggctgtgggcagagtccaccgctttgttcccttccgtgtatttagatgagactctggcgagctctcgccacggacgaaatttcgtttctttccgtgtgcaagaggccctaagagtggcgcggacacaccatgccaatcacgcgctgccagtgtacgtctttacacgccccacttattctcgccgattgactgggctgtccgaaatggacctcatcagcaccatcggggaaagcgctgcactcggtgcagctggcgttatcttgtggggagacgcaggatatactacgtccaccgagacctgccagtatctcaaagattatctcacccgccttctagtcccatatgtggttaacgtatcctgggccacccagtactgctccagggcccaatgccacggtcacgggcgctgtgtcaggcggaatcctagcgcctctacgttccttcacctgagcacaaattcattccggctagttcctggccacgccccaggcgaaccacagcttagacccgtgggagaactctcgtgggccgatatcgatcaccttcagactcactttcggtgccagtgctatctaggttggagcggagagcagtgccagtgggaccataggcaagcagcagggggggcaagcgaagcttgggcgggttcgcacctgaccagcttgcttgcactcgcagccttagcttttacatggactctgtag

SEQ ID NO: 279603 - DNA, 1422 bp, Artificial Sequence
  derived and/or modified sequence
atgagagctggccctggccccaccgtgaccctggccctggtgctggccgtgtcctgggccatggagctgaagcccacagccccacccatcttcaccggccggccctttgtggtggcctgggatgtgcccacccaggactgtggcccccggctgaaggtgcccctggacctgaatgcctttgatgtgcaggccagccccaatgaaggatttgtgaaccagaacatcaccatcttctacagagaccggctgggcctgtaccccaggtttgattctgctggccgctctgtgcatggaggagtgccccagaatgtgtccctgtgggcccacaggaagatgctgcagaagagggtggagcactacatccgcacccaggagagcgctggcctggccgtcatcgactgggaggactggaggcctgtgtgggtgaggaactggcaggacaaggatgtgtaccgccgcctgagccggcagctggtggccagccgccacccagactggcccccagacagaattgtgaagcaggcccagtatgaatttgaatttgctgcccagcagttcatgctggagaccctgcgctacgtgaaggctgtgcggcccaggcacctgtggggcttctacctgttcccagactgctacaaccacgactatgtgcagaactgggagagctacacaggccgctgcccagatgtggaggtggccagaaatgaccagctggcctggctgtgggccgagagcacagccctcttccccagcgtgtacctggatgagaccctggccagcagcagacatggaagaaactttgtgtccttccgggtgcaggaggccctgcgggtggcccggacccaccacgccaaccacgccctgcctgtgtatgtgttcacccggcccacctacagccggcggctgaccggcctgtctgagatggacctgatcagcaccatcggggagagcgctgccctgggcgctgctggggtcatcctgtggggagatgctggctacaccaccagcacagagacctgccagtacctgaaggactacctgacccggctgctggtgccctacgtggtgaatgtgtcctgggccacccagtactgcagccgggcccagtgccacggccacggccgctgtgtgagaagaaaccccagcgccagcaccttcctgcacctgagcaccaacagcttccggctggtgcccggccacgcccctggagagccccagctgcggcctgtgggggagctgtcctgggccgacatcgaccacctgcagacccacttccgctgccagtgctacctgggctggagcggggagcagtgccagtgggaccaccggcaggccgccggcggggccagcgaggcctgggccggcagccacctgaccagcctgctggccctggccgccctggccttcacctggaccctgtag

SEQ ID NO: 279604 - DNA, 2055 bp, Artificial Sequence
  derived and/or modified sequence
attctggagggaaacagggtcaaggcgatctcctcccccacgcctgttcctggccctttcctctcagggggcagcaggaagtgaggagaaagggctgggatgggaggcgggagcggatgggagggaatggggtttatcaagtcctcggcgagctgcccaacgggcagcagctggcgcaagtagcctagctggagaggctcaccccaggaaggagggaggccaccgacctactgggccgacggactcccacacagttcctgagctggtgccaggcaggtgacacctcctgcagcccccagcatgcgggcaggcccaggccccaccgttacattggccctggtgctggcggtgtcatgggccatggagctcaagcccacagcaccacccatcttcactggccggccctttgtggtagcgtgggacgtgcccacacaggactgtggcccacgcctcaaggtgccactggacctgaatgcctttgatgtgcaggcctcacctaatgagggttttgtgaaccagaatattaccatcttctaccgcgaccgtctaggcctgtatccacgcttcgattctgccggaaggtctgtgcatggtggtgtgccacagaatgtcagcctttgggcacaccggaagatgctgcagaaacgtgtggagcactacattcggacacaggagtctgcggggctggcggtcatcgactgggaggactggcgacctgtgtgggtgcgcaactggcaggacaaagatgtgtatcgccggttatcacgccagctagtggccagtcgtcaccctgactggcctccagaccgcatagtcaaacaggcacaatatgagtttgagttcgcagcacagcagttcatgctggagacactgcgttatgtcaaggcagtgcggccccggcacctctggggcttctacctctttcctgactgctacaatcatgattatgtgcagaactgggagagctacacaggccgctgccctgatgttgaggtggcccgcaatgaccagctggcctggctgtgggctgagagcacggccctcttcccgtctgtctacctggacgagacacttgcttcctcccgccatggccgcaactttgtgagcttccgtgttcaggaggcccttcgtgtggctcgcacccaccatgccaaccatgcactcccagtctacgtcttcacacgacccacctacagccgcaggctcacggggcttagtgagatggacctcatctctaccattggcgagagtgcggccctgggcgcagctggtgtcatcctctggggtgacgcggggtacaccacaagcacggagacctgccagtacctcaaagattacctgacacggctgctggtcccctacgtggtcaatgtgtcctgggccacccaatattgcagccgggcccagtgccatggccatgggcgctgtgtgcgccgcaaccccagtgccagtaccttcctgcatctcagcaccaacagtttccgcctagtgcctggccatgcacctggtgaaccccagctgcgacctgtgggggagctcagttgggccgacattgaccacctgcagacacacttccgctgccagtgctacttgggctggagtggtgagcaatgccagtgggaccataggcaggcagctggaggtgccagcgaggcctgggctgggtcccacctcaccagtctgctggctctggcagccctggcctttacctggaccttgtaggggtctcctgcctagctgcctagcaagctggcctctaccacaagggctctcttaggcatgtaggaccctgcagggggtggacaaactggagtctggagtgggcagagcccccaggaagcccaggagggcatccataccagctcgcacccccctgttctaagggggaggggaagtccctgggaggccccttctctccctgccagaggggaaggagggtacagctgggctggggaggacctgaccctactcccttgccctagatagtttattattattattattttggggtctcttttgtaaattaaacataaaacaattgcttctctgcttgga

SEQ ID NO: 279605 - DNA, 2318 bp, Artificial Sequence
  derived and/or modified sequence
gggtttatcaagtcctcggcgagctgcccaacgggcagcagctggcgcaagtagcctagctggagaggctcaccccaggaaggagggaggccaccgacctactgggccgacggactcccacacagggctggcggcgccgcggagctgggaggactgaaccaccggcctcgggctgcaggggaaacatttcaggctgactggcgctcgtggctgagactcccatagaaagcccggctcagaggggcattagggtcctaaatgggcggccacgtccctctgcagaggacctggggctcttcgagcccgaaacgaggcaccggcaccgagaaaggtggaccacaccttcccgccccgtccgcaagtccaatcccgggcccacctccgcactggagtcttaaagggccagcgtgcctgggggcggagccagcagaggcgctgagccgggccgcgcctgggcgaacggccggagcgggctgggctgggcccgggatggcggtggccctggcgccggtcccggtggcgccccgcgcgagttcctgagctggtgccaggcaggtgacacctcctgcagcccccagcatgcgggcaggcccaggccccaccgttacattggccctggtgctggcggtgtcatgggccatggagctcaagcccacagcaccacccatcttcactggccggccctttgtggtagcgtgggacgtgcccacacaggactgtggcccacgcctcaaggtgccactggacctgaatgcctttgatgtgcaggcctcacctaatgagggttttgtgaaccagaatattaccatcttctaccgcgaccgtctaggcctgtatccacgcttcgattctgccggaaggtctgtgcatggtggtgtgccacagaatgtcagcctttgggcacaccggaagatgctgcagaaacgtgtggagcactacattcggacacaggagtctgcggggctggcggtcatcgactgggaggactggcgacctgtgtgggtgcgcaactggcaggacaaagatgtgtatcgccggttatcacgccagctagtggccagtcgtcaccctgactggcctccagaccgcatagtcaaacaggcacaatatgagtttgagttcgcagcacagcagttcatgctggagacactgcgttatgtcaaggcagtgcggccccggcacctctggggcttctacctctttcctgactgctacaatcatgattatgtgcagaactgggagagctacacaggccgctgccctgatgttgaggtggcccgcaatgaccagctggcctggctgtgggctgagagcacggccctcttcccgtctgtctacctggacgagacacttgcttcctcccgccatggccgcaactttgtgagcttccgtgttcaggaggcccttcgtgtggctcgcacccaccatgccaaccatgcactcccagtctacgtcttcacacgacccacctacagccgcaggctcacggggcttagtgagatggacctcatctctaccattggcgagagtgcggccctgggcgcagctggtgtcatcctctggggtgacgcggggtacaccacaagcacggagacctgccagtacctcaaagattacctgacacggctgctggtcccctacgtggtcaatgtgtcctgggccacccaatattgcagccgggcccagtgccatggccatgggcgctgtgtgcgccgcaaccccagtgccagtaccttcctgcatctcagcaccaacagtttccgcctagtgcctggccatgcacctggtgaaccccagctgcgacctgtgggggagctcagttgggccgacattgaccacctgcagacacacttccgctgccagtgctacttgggctggagtggtgagcaatgccagtgggaccataggcaggcagctggaggtgccagcgaggcctgggctgggtcccacctcaccagtctgctggctctggcagccctggcctttacctggaccttgtaggggtctcctgcctagctgcctagcaagctggcctctaccacaagggctctcttaggcatgtaggaccctgcagggggtggacaaactggagtctggagtgggcagagcccccaggaagcccaggagggcatccataccagctcgcacccccctgttctaagggggaggggaagtccctgggaggccccttctctccctgccagaggggaaggagggtacagctgggctggggaggacctgaccctactcccttgccctagatagtttattattattattattttggggtctcttttgtaaattaaacataaaacaat

SEQ ID NO: 279606 - DNA, 1422 bp, Artificial Sequence
  derived and/or modified sequence
atgcgggccggccccggccccaccgtgaccctggccctggtgctggctgtatcttgggctatggaactgaaacccacagcgccccctatattcaccggccggcctttcgtggtggcctgggacgttcccactcaggactgtgggccaaggctcaaagtgccattggaccttaatgctttcgatgtgcaggccagtcccaacgaagggttcgtgaatcaaaatataactatcttctaccgggaccggctcggtctatacccgcggtttgactccgccggcagaagcgtccacggaggtgtgccccagaatgtgtctttatgggcacacaggaaaatgctgcagaagagagtcgagcattatataagaacacaggagtcagctgggctcgccgtgattgactgggaggattggcgacccgtgtgggtcagaaattggcaagacaaagacgtctacagacggctttctaggcaactagtggcttctcgccaccccgactggcctccagacaggatcgtcaagcaggcacagtatgaattcgaatttgccgctcagcagttcatgttagaaacactgcgctatgtgaaggcggtgagacccagacatctgtgggggttttacctgttcccggactgctacaaccacgattatgtgcagaattgggagagttataccggcaggtgtcctgatgttgaggtggcacgcaatgaccagttggcgtggctctgggccgaatccactgccctgtttccaagcgtctatctggacgaaaccctggctagctccaggcatgggcgtaatttcgtcagctttcgcgtccaagaagccctaagagtggccagaacacaccacgctaaccacgcattacctgtgtatgtctttacccgcccaacatactctagacggcttacaggtttgtccgaaatggacctgatctcgaccattggcgagagcgccgcactgggtgcggctggagttatactgtggggtgatgccgggtatactaccagcacagaaacatgtcagtacttgaaagactatttgacccgtttgttggtgccatatgtagtgaatgtgtcttgggctacacagtattgtagcagagcccagtgtcatggccatggccggtgcgtccgacggaacccctctgcatcaacgtttctacatctgagcactaacagcttccggctggtgccagggcacgcacccggggagccccagctgaggccggtcggagagttatcctgggctgatattgaccatttgcagactcacttcaggtgtcagtgctacctcggttggagcggagaacaatgccagtgggatcatcgacaggccgccggcggagcgtctgaggcttgggctggcagccacttgacctctctgctggcgctcgccgcactcgcgttcacatggacgctgtag

SEQ ID NO: 279607 - DNA, 1422 bp, Artificial Sequence
  derived and/or modified sequence
atgcgggccggccccggccccaccgtgaccctggccctggtgctggccgtgagctgggccatggagctcaaacctactgcaccaccaatatttaccggcaggccattcgttgtagcatgggacgtccccacacaggactgtggcccaaggctgaaggtccccctagatctcaacgcatttgacgtccaggctagccctaatgaaggattcgtaaaccagaatataactattttttaccgggatcgacttggcctgtatccccgcttcgattccgccgggcgttctgtccacggaggcgtgccccagaacgtgtcactatgggcccaccgcaaaatgctccaaaaacgcgttgagcattacatcagaactcaggaaagcgccggactagccgttatcgactgggaggactggaggcctgtatgggtgaggaattggcaggacaaggacgtataccgcaggctgtcacggcagctggtagcttctcgccacccggattggcccccagaccggattgtcaaacaagcccagtacgagtttgaatttgctgctcaacaatttatgcttgaaaccttgcggtacgtgaaagcagtgaggccacggcacctctggggcttctacttgtttccagattgctataatcatgactatgtccagaactgggagtcatacacaggcagatgtccggacgtggaagttgctaggaatgaccagctagcatggctttgggcagaatccacagccctttttcccagcgtttatctggacgagacgttggcgagtagccgacacggtagaaacttcgtcagtttccgtgttcaggaagcgctgcgcgtcgctcgaacccatcacgctaaccacgccctaccagtgtatgtattcacaaggcccacttacagcagaaggctgactggattaagcgagatggatttgattagcacaattggggaaagcgccgccctcggtgccgccggagtgattctttggggagacgctggttacaccacaagcaccgaaacttgtcagtacctcaaggattatctcactcgactgctggtcccatacgtcgttaacgtgagttgggccacacagtattgctcgagggctcagtgtcatggtcacggacgctgtgtgcgaagaaacccgtcagccagcacctttttgcatcttagcaccaattcttttcgacttgttccgggccatgctcctggagagcctcagttgcggcccgtgggcgaactgtcctgggctgatattgatcacctccagactcatttccggtgtcagtgttacctgggatggtccggggagcagtgtcagtgggatcaccggcaggctgcagggggagccagcgaggcttgggcaggcagccacctcacatccttacttgccctggccgccctggccttcacctggactctctag

SEQ ID NO: 279608 - DNA, 1422 bp, Artificial Sequence
  derived and/or modified sequence
atgagagcgggtccagggccaaccgtcacgctcgctcttgttctggccgtgtcctgggccatggaattaaagcccacggcgcctcccatctttaccggtcggccttttgtagttgcatgggacgtgccaactcaggactgcggacccagactcaaagtgcctctggacctgaacgctttcgacgtgcaggcaagtccaaacgagggttttgtcaaccagaatattaccatattttaccgcgatcgccttggactctatcctcgcttcgacagtgccggaagaagcgtccatggcggagtgccacagaacgtgagcctgtgggcccaccgcaagatgctgcagaagagggtagaacactacattcgtacacaggagtccgccggtttggccgttatagattgggaggattggcgacctgtttgggtgcgaaattggcaggataaggacgtctatcgccgattaagccggcagctggtggccagcaggcaccctgactggcccccagacaggattgtcaagcaggcacaatatgagtttgaattcgcggcacagcaatttatgttagaaaccctacggtatgtcaaagccgtgcgcccaagacatttgtggggattttatctgtttccagattgctataaccatgattatgtgcagaactgggaatcttacaccgggagatgccctgacgtggaggtcgcccgaaatgaccagctcgcttggctttgggcggagtccaccgctttgttcccgtctgtgtacctcgatgagactttggccagttctcggcacggcagaaactttgtatcgtttcgggtgcaggaagctctacgggtcgcgagaacccaccacgctaaccatgccctgcccgtctatgtattcacgcgaccgacctattccagacgactgaccggactctctgagatggacttaatctccaccataggagaatctgccgctctaggagccgctggagtaattctgtggggagacgccggttacaccactagtacagaaacctgtcagtacctgaaggattatctgaccagactgctcgttccttacgtggtcaacgtgtcttgggccacacagtactgttctcgggctcaatgccatggacacggacgatgtgtacggagaaacccatccgctagcaccttcctgcatctgtccacgaacagtttcaggttggtgcccggtcatgcccctggagagccacagctgaggcccgttggcgagctttcgtgggccgatatcgaccaccttcagactcattttaggtgccagtgctatctcggctggtccggggagcagtgccagtgggaccacaggcaggcagccggtggagcctcagaggcatgggcgggtagtcatttaacttccctgctcgctcttgcagcacttgccttcacctggacactgtag

SEQ ID NO: 279609 - DNA, 1422 bp, Artificial Sequence
  derived and/or modified sequence
atgagagccggacccggtcccactgtgaccctagcgctggtcctggccgtatcttgggctatggagctgaaaccaactgctccaccgatttttacggggcgtccgtttgtcgtggcttgggatgttccaacacaggactgtggccctagactgaaggtgcccctcgatttaaatgcattcgatgttcaggcgtctccaaatgagggcttcgttaaccagaacatcacgatcttctatagggaccggctgggactgtatccacggttcgattctgcgggaagaagcgtgcacgggggagttccgcaaaacgtgagcttgtgggcccaccggaaaatgttgcagaagcgagtagaacattacatcaggacccaggagagtgccggactggctgtcattgattgggaagactggagaccggtgtgggttaggaactggcaagataaggatgtctatcgcaggttgtctcggcagctcgtggcatccaggcatccagattggcctccagataggatcgttaagcaagctcagtacgagtttgagtttgccgcacagcagttcatgctggagactctgagatatgtgaaggccgtgcggcctaggcatctttgggggttttacctgtttcccgattgttataatcacgactacgtgcagaattgggaatcttatacagggaggtgtccagatgtcgaagtagcacgcaacgaccagttggcatggctgtgggccgagtcaacagccctgtttcccagtgtctaccttgatgagaccctggccagttcacggcatggcaggaacttcgtcagttttagagttcaggaggccctgcgggtggcaaggactcatcacgctaaccacgctcttccggtgtatgtgttcacacgcccaacttattctcgtcgcttgaccgggctcagtgagatggatcttatctcgaccataggggagagcgccgctttgggtgcagccggagttattttatggggggatgctgggtataccacgtctactgaaacctgccagtacctgaaggactatctgacacgactgcttgtaccatacgttgtcaatgtctcctgggctacgcagtactgctcacgtgcgcagtgccacggacatggcaggtgtgtgcggaggaacccctcggccagtacctttctccatctctccacaaattccttccgacttgtacccggacatgccccaggtgagccacagttacgccctgtgggcgagctgtcctgggccgacatcgaccaccttcagactcatttccgctgtcagtgttacctcggctggagcggcgaacagtgtcaatgggaccaccgccaggctgcagggggagcatctgaagcctgggcgggaagccacctgacatccctgttggcacttgccgcactagcttttacatggaccctgtag

SEQ ID NO: 279610 - DNA, 1422 bp, Artificial Sequence
  derived and/or modified sequence
atgcgggccgggcctggaccaaccgttacgctggccttggtgttggccgtttcatgggcaatggaactgaagccaaccgcacctccgattttcaccggacgaccctttgtggtggcatgggacgtccccacccaggactgtgggccgcggctgaaagtacccctcgacctgaacgcatttgatgttcaggcttcacctaacgaggggttcgtaaaccaaaatatcaccattttctatagagaccgactgggactttatccgaggttcgacagtgccggtagatctgttcatggtggagtaccgcagaatgtttcactctgggcccataggaaaatgctgcagaaacgcgtggaacattatattaggactcaagaaagtgccggcctggcagtcattgattgggaagattggagaccagtttgggttagaaattggcaggataaagatgtgtatcggcgcctctcacgccaattggtggccagtcggcaccctgactggccacccgataggattgtgaagcaagcacagtacgaatttgagtttgccgcacaacagtttatgctcgaaaccctcagatacgtgaaggccgttaggccgcgacacttgtggggattctacctgttccccgattgttataatcatgattatgtgcaaaattgggagagttataccggcaggtgtccagacgtcgaagtcgcacgtaacgatcaactcgcatggctctgggcagaatccaccgccctatttccttccgtttaccttgatgaaaccctggcaagttctaggcacggaagaaattttgtcagttttcgggtgcaggaggcgttaagggtcgcccggactcaccacgccaaccatgcactgcccgtgtacgtttttacccgcccgacctacagcagacggctgacgggactctccgaaatggacctgatcagcactattggggaaagtgctgccttgggagctgctggcgtcattctctggggagacgcaggatataccacctcaacagagacctgccagtatctgaaagactatctgacccgccttctggtgccttatgtggtgaacgtcagctgggcgacacagtattgctcaagggcccagtgccatggtcacggtagatgtgttcgacgcaacccatctgctagtacttttctgcatctatccacaaactctttccgtctggtccctgggcacgctcctggtgaacctcagctgcgcccagttggagaactgagttgggcagacatagaccacctccagacccacttccggtgccagtgctatctcggctggagtggcgagcaatgccagtgggaccataggcaggctgccgggggcgcctccgaggcatgggctgggtcccatctgaccagtttactggccttggccgcactggcctttacatggacgttgtag

SEQ ID NO: 279611 - DNA, 1422 bp, Artificial Sequence
  derived and/or modified sequence
atgcgagccggacccggcccaacagtgacactcgctctggtgttggccgttagttgggcaatggaactaaagcctacagcgccgcccatatttacagggcgcccttttgttgtggcctgggacgtacctacccaggattgcggaccacgattgaaggtgccattggaccttaatgcgttcgatgtccaggccagccctaacgagggtttcgtcaatcagaatattacaatcttttatcgtgatagactgggtttgtacccccgattcgactccgcagggcgaagtgtccatggaggggtaccacaaaacgtcagcctgtgggcgcataggaaaatgctgcaaaaaagggtcgagcactacattaggactcaggaaagcgccgggctggcggtgatcgactgggaagactggaggccagtctgggttaggaattggcaggacaaggatgtgtatagacgtctgtcacggcaactggtggcttctaggcatcctgattggcctcccgatcgtatcgtgaaacaggctcagtatgagttcgaattcgctgcccagcaattcatgctggagactctccgctacgtcaaggctgtccggcctaggcacttgtgggggttctatctcttccctgattgttacaatcacgactatgtgcaaaactgggagagctatactggccgctgtcccgacgtggaggtggcccgcaacgaccaattagcatggctgtgggcggagagcactgcactctttccatcagtctacctggatgaaacactggccagtagtcgccatggaagaaactttgtttccttccgggtccaagaggcactcagggttgctcggacccatcacgctaaccatgcgctgcctgtgtacgtgttcacccggcccacctacagtcgccgcttgaccgggctctccgagatggatctcatctcgaccatcggcgagtctgccgcgctcggagctgctggggtgatactgtggggagacgccgggtatactactagtaccgagacctgccagtatctgaaggattacctcactcgcctcctcgtgccctacgttgtaaatgtgagttgggcaacccaatattgctcaagggcacagtgccatggtcacggacgatgcgttcgccgtaacccttctgcaagtacattcctccatctatccactaacagcttccggttggttcccggccacgcaccaggggaaccgcagctgcgacccgtaggggaacttagctgggctgatatcgatcatctacagacacatttcagatgccagtgttacctggggtggagcggtgagcagtgtcagtgggaccataggcaagccgctgggggcgcatcggaggcctgggcgggtagtcatctgacctcactgcttgctctggctgcgttagcttttacctggacgttatag

SEQ ID NO: 279612 - DNA, 147 bp, Artificial Sequence
  derived and/or modified sequence
atgagagctggccctggtcctactgtcacccttgccctggttttagcggtctcttgggcgatggaactgaaaccaactgcacccccaatctttactggtcgaccctttgtggtggcttgggatgttcccactcaggattgcggttag

SEQ ID NO: 279613 - DNA, 354 bp, Artificial Sequence
  derived and/or modified sequence
atgcgagctggtcccgggcccaccgtgacgttggccctcgtccttgcagtaagctgggccatggaattaaaacccacagcccctcccatctttacagggaggccattcgtggtagcgtgggatgttcctacccaggactgcggacccagactcaaggtgccgctagacctcaacgcctttgatgtgcaggccagtcccaatgagggcttcgttaatcagaacattaccatcttttatcgtgaccgacttggcctttatccccggttcgactctgcagggaggtccgttcacggaggagtccctcaaaatgtttcgctgtgggcccaccgaaaaatgctccagaagcgcgtctag

SEQ ID NO: 279614 - DNA, 246 bp, Artificial Sequence
  derived and/or modified sequence
atgcgcgctggccctgggcctacggttactttagcgcttgttctggccgtcagttgggcgatggaactgaaacctaccgctccccctatctttacaggtcgaccatttgtggtggcttgggacgtgcctacacaagactgcggtcctagactgaaagtgcccctggatctgaatgcgttcgacgtgcaagcaagccccaatgagggcttcgtgaatcagaatattactattttctatagggactag

SEQ ID NO: 279615 - DNA, 231 bp, Artificial Sequence
  derived and/or modified sequence
atgcgtgccggcccgggccccacagtgacactggccctggtcttggcggtgtcgtgggctatggaactgaaacccacagcccccccaattttcaccgggagacccttcgtggtggcctgggatgtgccaactcaggattgcggtccccggctgaaagtccctctggatctgaacgcttttgacgtgcaagcatcacccaacgagggctttgtaaatcaaaacataacctag

SEQ ID NO: 279616 - DNA, 1422 bp, Artificial Sequence
  derived and/or modified sequence
atgcgtgccgggcccggccctactgtgactctcgcattagtcctagcagtgagctgggcaatggagctgaaaccgacagccccccctattttcacgggccgccccttcgttgtggcctgggacgttccaactcaagactgcggacctcgactcaaagtgccgctggacctcaacgccttcgacgttcaggcatcccctaacgagggttttgttaatcagaacatcactatcttttatcgcgaccggttaggcctgtatccgcgtttcgattccgccggcagaagtgtccatgggggagtgcctcagaacgtcagcctatgggcccatagaaaaatgctgcagaagcgcgttgagcattatatacggactcaggagagtgccggactggctgtgatcgactgggaagactggagacccgtttgggtccgcaattggcaggacaaggatgtctatcggagattgtcacggcagctggtcgccagccgacaccccgattggccaccagatagaatcgtcaagcaggcccagtatgagttcgagttcgctgcccaacaattcatgttagaaaccctaaggtatgtgaaggcggtgcgcccccggcacctatggggattttacttgttcccagactgttacaaccatgactatgtgcagaactgggagtcctacaccggacgctgtcccgatgtggaggtggctagaaatgatcagctggcgtggctttgggccgagtccaccgctctcttccccagtgtctacttagatgagactttggcatcctcacggcatggacgcaactttgtgtccttccgcgtgcaggaggccctacgggtagcccggacacaccacgcaaaccacgcgctccccgtctacgtgttcactaggcctacatacagtcgccgcctgacagggctgtctgagatggacctgatatccacaatcggagaaagcgcagctttaggagcggcaggtgtcattttgtggggagacgcaggctacaccacctcaaccgaaacttgtcagtacctgaaggattacctgacacgcttactggtgccttacgtcgtcaatgtgagctgggctacccaatactgctctcgggcccaatgccacggtcacgggcgctgcgtacggcgcaacccctctgcgtccactttcctgcacttgtccactaattccttccggttagtaccgggccatgcgccaggtgagccacagctgcggccagtgggggagttatcctgggctgatatagaccatctccaaacacacttcagatgccagtgctacctgggctggtcaggtgagcagtgtcaatgggatcaccgccaagccgccggcggtgcatcggaggcctgggccgggagtcatttaacctcactgctggctctggctgccctggcgtttacttggacactctag

SEQ ID NO: 279617 - DNA, 1422 bp, Artificial Sequence
  derived and/or modified sequence
atgcgagcaggacctggcccaacagtaactcttgcactagtgctagccgtatcatgggctatggaactaaaacctaccgctcccccaattttcacaggacgccccttcgtggtggcgtgggacgtccccacccaggattgtggaccgcgcttgaaagtgccattagaccttaatgcattcgacgtgcaggcaagtcccaacgaaggctttgtgaaccagaacatcacgattttttatagagataggctgggcctttacccaagatttgacagcgcaggtcggtccgtccatggaggggtgccacaaaatgtgtctctttgggcccaccggaaaatgttacagaagcgtgtagagcactatatccgaacacaagagtctgctggcctggcagtgattgattgggaagactggagacctgtctgggtgaggaactggcaggataaagacgtgtatcgaaggctgtcccgccagctggtggcgtcgcgacacccggactggccacctgatcgcatagtgaagcaggcccaatatgagtttgagttcgctgcccagcagtttatgttggaaacccttcggtatgtaaaggccgtgaggccccggcatttgtggggcttctacttgttccccgattgctacaaccacgactacgtgcagaattgggaatcatacacaggaagatgcccagatgttgaggtcgcaaggaatgaccagttggcttggctctgggcagagagtaccgctttgttccccagtgtgtacctagatgagaccttagccagctcgcgccacggccgcaactttgtctccttccgagtacaggaagctctcagggtggcaaggactcaccacgctaatcacgccctacccgtgtatgtgttcaccaggccaacttatagtagaaggttgactgggctaagcgaaatggatctcatttctacaattggggagtccgccgcactgggagctgcgggtgtgattctgtggggggatgcaggatataccacctcgacagaaacgtgtcagtacctgaaggactacctgactagacttctggtgccatatgtggttaatgtgtcttgggcaacccagtattgctctagagctcagtgtcacggacacggcagatgtgtaaggaggaaccctagcgcctcgaccttcctgcatctgtcaaccaactcttttcgcctcgtaccaggacacgccccgggggaacctcaactgaggcctgtaggcgaattgtcctgggcagacatcgaccacctgcagacgcatttccggtgccaatgttacctaggctggagtggtgagcaatgccagtgggaccatagacaggccgccggcggcgcatctgaggcttgggcaggaagtcaccttactagtttgctggccttagctgccttggcatttacttggaccctgtag

SEQ ID NO: 279618 - DNA, 366 bp, Artificial Sequence
  derived and/or modified sequence
atgagagcagggccggggccaaccgtaaccttagcattagtgctagccgtgagttgggccatggaactgaaacctacggcaccacccatcttcactgggcgaccgttcgttgtggcctgggatgtgccaacacaggactgcgggccacgactgaaggtccctttagatctgaacgcatttgacgtccaggcatcacccaacgagggatttgtcaatcagaatatcaccatattttacagagaccggctcggactgtacccacgtttcgattccgctggccgttccgtgcatgggggggtccctcagaatgtgtctctgtgggcccacaggaaaatgcttcagaagcgggtcgaacattacatttag

SEQ ID NO: 279619 - DNA, 2136 bp, Artificial Sequence
  derived and/or modified sequence
atttcaggctgactggcgctcgtggctgagactcccatagaaagcccggctcagaggggcattagggtcctaaatgggcggccacgtccctctgcagaggacctggggctcttcgagcccgaaacgaggcaccggcaccgagaaaggtggaccacaccttcccgccccgtccgcaagtccaatcccgggcccacctccgcactggagtcttaaagggccagcgtgcctgggggcggagccagcagaggcgctgagccgggccgcgcctgggcgaacggccggagcgggctgggctgggcccgggatggcggtggccctggcgccggtcccggtggcgccccgcgcgagttcctgagctggtgccaggcaggtgacacctcctgcagcccccagcatgcgggcaggcccaggccccaccgttacattggccctggtgctggcggtgtcatgggccatggagctcaagcccacagcaccacccatcttcactggccggccctttgtggtagcgtgggacgtgcccacacaggactgtggcccacgcctcaaggtgccactggacctgaatgcctttgatgtgcaggcctcacctaatgagggttttgtgaaccagaatattaccatcttctaccgcgaccgtctaggcctgtatccacgcttcgattctgccggaaggtctgtgcatggtggtgtgccacagaatgtcagcctttgggcacaccggaagatgctgcagaaacgtgtggagcactacattcggacacaggagtctgcggggctggcggtcatcgactgggaggactggcgacctgtgtgggtgcgcaactggcaggacaaagatgtgtatcgccggttatcacgccagctagtggccagtcgtcaccctgactggcctccagaccgcatagtcaaacaggcacaatatgagtttgagttcgcagcacagcagttcatgctggagacactgcgttatgtcaaggcagtgcggccccggcacctctggggcttctacctctttcctgactgctacaatcatgattatgtgcagaactgggagagctacacaggccgctgccctgatgttgaggtggcccgcaatgaccagctggcctggctgtgggctgagagcacggccctcttcccgtctgtctacctggacgagacacttgcttcctcccgccatggccgcaactttgtgagcttccgtgttcaggaggcccttcgtgtggctcgcacccaccatgccaaccatgcactcccagtctacgtcttcacacgacccacctacagccgcaggctcacggggcttagtgagatggacctcatctctaccattggcgagagtgcggccctgggcgcagctggtgtcatcctctggggtgacgcggggtacaccacaagcacggagacctgccagtacctcaaagattacctgacacggctgctggtcccctacgtggtcaatgtgtcctgggccacccaatattgcagccgggcccagtgccatggccatgggcgctgtgtgcgccgcaaccccagtgccagtaccttcctgcatctcagcaccaacagtttccgcctagtgcctggccatgcacctggtgaaccccagctgcgacctgtgggggagctcagttgggccgacattgaccacctgcagacacacttccgctgccagtgctacttgggctggagtggtgagcaatgccagtgggaccataggcaggcagctggaggtgccagcgaggcctgggctgggtcccacctcaccagtctgctggctctggcagccctggcctttacctggaccttgtaggggtctcctgcctagctgcctagcaagctggcctctaccacaagggctctcttaggcatgtaggaccctgcagggggtggacaaactggagtctggagtgggcagagcccccaggaagcccaggagggcatccataccagctcgcacccccctgttctaagggggaggggaagtccctgggaggccccttctctccctgccagaggggaaggagggtacagctgggctggggaggacctgaccctactcccttgccctagatagtttattattattattattttggggtctcttttgtaaattaaacataaaacaattgc

SEQ ID NO: 279620 - DNA, 301 bp, Artificial Sequence
  derived and/or modified sequence
ggtggcggtggagggaagggccgggcggccggcgccgccgtgggaggtccgctgcccctttgtccctacggggcctcctccaagccgggagagtgtcagcgctcgagagaaattcctgagctggtgccaggcaggtgacacctcctgcagcccccagcatgcgggcaggcccaggccccaccgttacattggccctggtgctggcggtgtcatgggccatggagctcaagcccacagcaccacccatcttcactggccggccctttgtggtagcgtgggacgtgcccacacaggactgtgg

SEQ ID NO: 279621 - DNA, 550 bp, Artificial Sequence
  derived and/or modified sequence
ctcccggcagcgttccttccagtttcgtagcctcttgacgagctgttccctgctttacccaaatgctgtcgtttctctggatcaagggttcttcacggtgtacagggtgggcatcagctgttcagggttctctgaaaccatgtactggatgttcctgagctggtgccaggcaggtgacacctcctgcagcccccagcatgcgggcaggcccaggccccaccgttacattggccctggtgctggcggtgtcatgggccatggagctcaagcccacagcaccacccatcttcactggccggccctttgtggtagcgtgggacgtgcccacacaggactgtggcccacgcctcaaggtgccactggacctgaatgcctttgatgtgcaggcctcacctaatgagggttttgtgaaccagaatattaccatcttctaccgcgaccgtctaggcctgtatccacgcttcgattctgccggaaggtctgtgcatggtggtgtgccacagaatgtcagcctttgggcacaccggaagatgctgcagaaacgtgtgga

SEQ ID NO: 279622 - DNA, 357 bp, Artificial Sequence
  derived and/or modified sequence
gagctgttccctgctttacccaaatgctgtcgtttctctggatcaagggttcttcacggtgtacaggttcctgagctggtgccaggcaggtgacacctcctgcagcccccagcatgcgggcaggcccaggccccaccgttacattggccctggtgctggcggtgtcatgggccatggagctcaagcccacagcaccacccatcttcactggccggccctttgtggtagcgtgggacgtgcccacacaggactgtggcccacgcctcaaggtgccactggacctgaatgcctttgatgtgcaggcctcacctaatgagggttttgtgaaccagaatattaccatcttctaccgcgacc

SEQ ID NO: 279623 - DNA, 571 bp, Artificial Sequence
  derived and/or modified sequence
agcagctggcgcaagtagcctagctggagaggctcaccccaggaaggagggaggccaccgacctactgggccgacggactcccacacagggctggcggcgccgcggagctgggaggactgaaccaccggcctcgggctgcaggggaaacatttcaggctgactggcgctcgtggctgagactcccatagaaagcccggctcagaggggcattagggtcctaaatgggcggccacgtccctctgcagaggacctggggctcttcgagcccgaaacgaggcaccggcaccgagaaagttcctgagctggtgccaggcaggtgacacctcctgcagcccccagcatgcgggcaggcccaggccccaccgttacattggccctggtgctggcggtgtcatgggccatggagctcaagcccacagcaccacccatcttcactggccggccctttgtggtagcgtgggacgtgcccacacaggactgtggcccacgcctcaaggtgccactggacctgaatgcctttgatgtgcaggcctcacctaatgagggttttgtgaaccagaatattaccat

SEQ ID NO: 279624 - DNA, 4054 bp, Artificial Sequence
  derived and/or modified sequence
gaatggggtttatcaagtcctcggcgagctgcccaacgggcagcagctggcgcaagtagcctagctggagaggctcaccccaggaaggagggaggccaccgacctactgggccgacggactcccacacaggtgagcccagagcagacggctggtctgcacccccacagatgcgctcgcagttgcactccctccctctcctggcgcccgggagggttaggggctggtggtgcagacgcgggcccttttgggagttgagtctcgcacaagggagcggacctaggaagagccgaggtggtttcgcacggggctcgccagggtctaagcctgccccccaccgggagaggcctgtggagcgtagggggcgctggatacgggatggaggccctgggagacccctcttgctggctttctcggaggtccagccagaaactgctgcaaggaatggaggcctcctcggggttgagagggagccgggctcccaaaggacctcagagactgggcagaaaaggacgggatctcagggatgactgtcccgccctgatgcgagtcagggagaggggcggccaacctcctagacccctctgagcttccctgaccccaaccctgcggccacgccgcgacccagagccgggctgccaggataacgactgcctcggcccttcctgggccggctaagaagcggtgcttggccccttccctcagtctggcagggggcggggcctccctttagacggcggaccagagaagggggcccctgattcgtgggaggcggggcactactctccaggagaccagaggtcgcctcaggtcaaagtccctttttccacacaaaggggacccacggctggcgtctacgttagggggtgcagagccagatctggtgctgccccctgccaacctcggagtaccacagcacctcctgatggccgaacggggcaacgcctcctcctattcccccccccccccttcccgtccccctgccttgtccctcacactgtctctttaaagggctggcggcgccgcggagctgggaggactgaaccaccggcctcgggctgcaggggaaacatttcaggctgactggcgctcgtggctgagactcccatagaaagcccggctcagaggggcattagggtcctaaatgggcggccacgtccctctgcagaggacctggggctcttcgagcccgaaacgaggcaccggcaccgagaaaggtggaccacaccttcccgccccgtccgcaagtccaatcccgggcccacctccgcactggagtcttaaagggccagcgtgcctgggggcggagccagcagaggcgctgagccgggccgcgcctgggcgaacggccggagcgggctgggctgggcccgggatggcggtggccctggcgccggtcccggtggcgccccgcgcgaggtgagggcgggcggtgcaaacctggcggctctctccccttgggctggggtctgaatccccgggggtgctcgcggagaggcgtcccagaaaccccacccccacccgaccgggcgcaggccccacgtgtggggcgggggcggggtcccgcacaaagacccggcggagcgcgctctagccctgagcggccgggcgggggaggcgagcgcgcgcattcccggtggcggtggagggaagggccgggcggccggcgccgccgtgggaggtccgctgcccctttgtccctacggggcctcctccaagccgggagagtgtcagcgctcgagagaaagtccggagagcctcactcttctgccgggcgagtgttacacggatagaagcctcccggcagcgttccttccagtttcgtagcctcttgacgagctgttccctgctttacccaaatgctgtcgtttctctggatcaagggttcttcacggtgtacagggtgggcatcagctgttcagggttctctgaaaccatgtactggatggtatgcaggcatatatgtgactctggtgagcccaaattatctagttcttagaagggtcacagacctaatagagatttgtgccgagccacaggctacctgctccagaaaagagccctgtgcttctggcagtgagttcccagggtgccttgtctgccctgcagtggcctgtggtctctcaaacctattacagccatgagcacagtgcccccacacagcatgggctttgggagcatagatgggcttgaggtgggcacttccagtattccctagactgacttgttctccccaacccttcttccagttcctgagctggtgccaggcaggtgacacctcctgcagcccccagcatgcgggcaggcccaggccccaccgttacattggccctggtgctggcggtgtcatgggccatggagctcaagcccacagcaccacccatcttcactggccggccctttgtggtagcgtgggacgtgcccacacaggactgtggcccacgcctcaaggtgccactggacctgaatgcctttgatgtgcaggcctcacctaatgagggttttgtgaaccagaatattaccatcttctaccgcgaccgtctaggcctgtatccacgcttcgattctgccggaaggtctgtgcatggtggtgtgccacagaatgtcagcctttgggcacaccggaagatgctgcagaaacgtgtggagcactacattcggacacaggagtctgcggggctggcggtcatcgactgggaggactggcgacctgtgtgggtgcgcaactggcaggacaaagatgtgtatcgccggttatcacgccagctagtggccagtcgtcaccctgactggcctccagaccgcatagtcaaacaggcacaatatgagtttgagttcgcagcacagcagttcatgctggagacactgcgttatgtcaaggcagtgcggccccggcacctctggggcttctacctctttcctgactgctacaatcatgattatgtgcagaactgggagagctacacaggccgctgccctgatgttgaggtggcccgcaatgaccagctggcctggctgtgggctgagagcacggccctcttcccgtctgtctacctggacgagacacttgcttcctcccgccatggccgcaactttgtgagcttccgtgttcaggaggcccttcgtgtggctcgcacccaccatgccaaccatgcactcccagtctacgtcttcacacgacccacctacagccgcaggctcacggggcttagtgagatggacctcatctctaccattggcgagagtgcggccctgggcgcagctggtgtcatcctctggggtgacgcggggtacaccacaagcacggagacctgccagtacctcaaagattacctgacacggctgctggtcccctacgtggtcaatgtgtcctgggccacccaatattgcagccgggcccagtgccatggccatgggcgctgtgtgcgccgcaaccccagtgccagtaccttcctgcatctcagcaccaacagtttccgcctagtgcctggccatgcacctggtgaaccccagctgcgacctgtgggggagctcagttgggccgacattgaccacctgcagacacacttccgctgccagtgctacttgggctggagtggtgagcaatgccagtgggaccataggcaggcagctggaggtgccagcgaggcctgggctgggtcccacctcaccagtctgctggctctggcagccctggcctttacctggaccttgtaggggtctcctgcctagctgcctagcaagctggcctctaccacaagggctctcttaggcatgtaggaccctgcagggggtggacaaactggagtctggagtgggcagagcccccaggaagcccaggagggcatccataccagctcgcacccccctgttctaagggggaggggaagtccctgggaggccccttctctccctgccagaggggaaggagggtacagctgggctggggaggacctgaccctactcccttgccctagatagtttattattattattattttggggtctcttttgtaaattaaacataaaacaattgcttctctgcttggattttgt

SEQ ID NO: 279625 - DNA, 745 bp, Artificial Sequence
  derived and/or modified sequence
acaaagacccggcggagcgcgctctagccctgagcggccgggcgggggaggcgagcgcgcgcattcccggtggcggtggagggaagggccgggcggccggcgccgccgtgggaggtccgctgcccctttgtccctacggggcctcctccaagccgggagagtgtcagcgctcgagagaaagtccggagagcctcactcttctgccgggcgagtgttacacggatagaagcctcccggcagcgttccttccagtttcgtagcctcttgacgagctgttccctgctttacccaaatgctgtcgtttctctggatcaagggttcttcacggtgtacaggttcctgagctggtgccaggcaggtgacacctcctgcagcccccagcatgcgggcaggcccaggccccaccgttacattggccctggtgctggcggtgtcatgggccatggagctcaagcccacagcaccacccatcttcactggccggccctttgtggtagcgtgggacgtgcccacacaggactgtggcccacgcctcaaggtgccactggacctgaatgcctttgatgtgcaggcctcacctaatgagggttttgtgaaccagaatattaccatcttctaccgcgaccgtctaggcctgtatccacgcttcgattctgccggaaggtctgtgcatggtggtgtgccacagaatgtcagcctttgggcacaccggaagatgctgcagaaacgtgtggagcactacatt

SEQ ID NO: 279626 - DNA, 147 bp, Artificial Sequence
  derived and/or modified sequence
atgagagctggccctggccccaccgtgaccctggccctggtgctggccgtgtcctgggccatggagctgaagcccacagccccacccatcttcaccggccggccctttgtggtggcctgggatgtgcccacccaggactgtggctag

SEQ ID NO: 279627 - DNA, 354 bp, Artificial Sequence
  derived and/or modified sequence
atgagagctggccctggccccaccgtgaccctggccctggtgctggccgtgtcctgggccatggagctgaagcccacagccccacccatcttcaccggccggccctttgtggtggcctgggatgtgcccacccaggactgtggcccccggctgaaggtgcccctggacctgaatgcctttgatgtgcaggccagccccaatgaaggatttgtgaaccagaacatcaccatcttctacagagaccggctgggcctgtaccccaggtttgattctgctggccgctctgtgcatggaggagtgccccagaatgtgtccctgtgggcccacaggaagatgctgcagaagagggtgtag

SEQ ID NO: 279628 - DNA, 246 bp, Artificial Sequence
  derived and/or modified sequence
atgagagctggccctggccccaccgtgaccctggccctggtgctggccgtgtcctgggccatggagctgaagcccacagccccacccatcttcaccggccggccctttgtggtggcctgggatgtgcccacccaggactgtggcccccggctgaaggtgcccctggacctgaatgcctttgatgtgcaggccagccccaatgaaggatttgtgaaccagaacatcaccatcttctacagagactag

SEQ ID NO: 279629 - DNA, 231 bp, Artificial Sequence
  derived and/or modified sequence
atgagagctggccctggccccaccgtgaccctggccctggtgctggccgtgtcctgggccatggagctgaagcccacagccccacccatcttcaccggccggccctttgtggtggcctgggatgtgcccacccaggactgtggcccccggctgaaggtgcccctggacctgaatgcctttgatgtgcaggccagccccaatgaaggatttgtgaaccagaacatcacctag

SEQ ID NO: 279630 - DNA, 366 bp, Artificial Sequence
  derived and/or modified sequence
atgagagctggccctggccccaccgtgaccctggccctggtgctggccgtgtcctgggccatggagctgaagcccacagccccacccatcttcaccggccggccctttgtggtggcctgggatgtgcccacccaggactgtggcccccggctgaaggtgcccctggacctgaatgcctttgatgtgcaggccagccccaatgaaggatttgtgaaccagaacatcaccatcttctacagagaccggctgggcctgtaccccaggtttgattctgctggccgctctgtgcatggaggagtgccccagaatgtgtccctgtgggcccacaggaagatgctgcagaagagggtggagcactacatctag

SEQ ID NO: 279631 - DNA, 1422 bp, Artificial Sequence
  derived and/or modified sequence
atgcgggccggccccggccccaccgtgaccctggccctggtgctggcagtcagctgggccatggagcttaaaccaaccgccccccccatttttactggacgccccttcgtagtggcttgggatgtgcctacacaggactgtggtcctcgactgaaagtccccctggacctcaatgctttcgacgtccaagccagccccaacgaagggttcgtcaaccaaaatatcaccattttttaccgggaccgccttggcctctacccccgattcgactctgccggacgctcggtgcacggcggtgtcccccagaacgtgagtctatgggctcatcggaaaatgctgcagaagcgcgtcgaacattacatacgtacacaagagagcgccggcttggctgtgattgactgggaagactggcgcccagtctgggtgcgcaactggcaggacaaggatgtttatcgaaggctgtcccgtcaattggttgcctcacgtcaccctgactggccccctgacagaatcgtgaaacaggcccagtacgaattcgaattcgccgcccaacagttcatgcttgaaacgctgcgctatgttaaggccgtcaggccccgccatctgtggggtttctacctctttcccgactgctacaaccatgactatgtccagaactgggagtcctataccggtcgctgtcctgatgtcgaagtggcaaggaacgaccaactggcctggctgtgggctgagagcacagctttgtttcccagtgtctacctcgacgagacacttgcctcttcacggcacggcagaaatttcgtttctttcagagtgcaggaagctctgagggtcgcccgaacgcatcatgctaaccacgctctccctgtctatgtctttactcgaccaacctacagccgcagactgactggcctgtctgagatggaccttatttccactatcggcgagagcgctgcactgggggcagccggggtgatactctggggggacgccggttatactacgagtacagagacctgccagtacctcaaagattacctgaccagactgttagttccatacgtggtgaacgttagctgggcaacccagtactgtagtcgtgcgcagtgtcacgggcacgggcgatgcgtccggagaaacccatccgcgagtacatttcttcatctctccaccaacagtttcagactggtccctgggcatgccccgggcgaaccacaattgagacctgtcggcgaactgtcctgggccgacattgaccacctccaaacgcactttcggtgtcagtgttacttaggttggagcggggagcaatgccagtgggatcaccgacaagcagctggcggagccagtgaggcctgggcgggtagccatttaacttccttactagcactggccgcgctggccttcacatggaccctgtag

SEQ ID NO: 279632 - DNA, 1422 bp, Artificial Sequence
  derived and/or modified sequence
atgcgggccggccccggccccaccgtgaccctggccctggtgctggctgtgagttgggccatggaactgaagccaaccgccccccctatttttaccggccgcccatttgtcgtggcttgggatgttccaacccaagactgcgggccaaggctgaaagtccccttggacctaaatgcctttgatgtccaggcttctcccaatgaggggtttgttaaccagaacattacaattttctatcgagacaggctcgggctttaccccagattcgatagcgccggcagaagcgtgcatgggggggtgccccaaaacgtatccctttgggcccatcgtaaaatgctccagaagagagtggaacactacattcggactcaggagtccgctggactcgctgtcatagactgggaagactggagacccgtctgggtgcggaactggcaggacaaggacgtgtacagaagactgtctcgtcaactggtggccagtcgtcacccagactggcctcctgatcgtatcgtgaaacaagcccagtatgaatttgaattcgcagcccagcagttcatgttggaaaccctcaggtacgtcaaagcagttaggccacgccacctgtggggtttctatctgttccctgactgctacaatcatgattatgtgcagaactgggaatcctacactgggaggtgccccgacgtggaagtggctcgcaatgatcagctcgcttggttgtgggctgaatccaccgctctcttcccctccgtttatttggacgagaccctagcctcctcgcgacatggtcgaaattttgtctcttttcgagttcaggaggctcttcgggtagccaggactcatcacgccaaccacgccctacccgtgtacgtgtttacacgacctacgtacagtagaagacttacgggacttagcgagatggacctcatcagtactatcggtgagtcagccgcattaggggccgctggggtaatcctatggggcgacgctggctataccacctccacggaaacctgtcagtacctaaaggactacttgactcgcctgttggtgccatacgtcgttaacgtgagttgggccacccagtattgttccagggcccagtgtcatggacatggaaggtgcgtccggcggaacccctctgcctctacgtttctgcatttaagcaccaacagcttccggctggtgcctggtcacgcacctggcgagccacaattaaggcccgtcggtgaactgtcctgggctgatatcgatcatctgcaaacacattttagatgccagtgctatctgggctggagcggtgagcagtgtcaatgggaccaccgtcaggcagcgggcggcgcttctgaagcttgggccggctctcacctgacaagcctgctcgctctagccgcactggcatttacttggacgttatag

SEQ ID NO: 279633 - DNA, 147 bp, Artificial Sequence
  derived and/or modified sequence
atgcgggccggccccggccccaccgtgaccctggccctggtgctggcagtatcttgggccatggagctcaagccgacagctccacccatttttaccgggaggccatttgtggttgcctgggacgtccccacacaggactgtggctag

SEQ ID NO: 279634 - DNA, 354 bp, Artificial Sequence
  derived and/or modified sequence
atgcgggccggccccggccccaccgtgaccctggccctggtgctggctgtctcatgggctatggaacttaagcccaccgcgccacccatatttacaggaaggccttttgtcgtggcctgggacgtacccacacaggattgcggaccgagactgaaagtgcctctggacctaaacgcattcgatgttcaggcgagtccaaatgagggctttgtcaatcagaacatcactatattctatagagacagactaggcctttacccacggttcgatagtgcagggcgatcagtccatgggggcgttcctcaaaacgtttcactttgggcccataggaaaatgctccagaagagggtgtag

SEQ ID NO: 279635 - DNA, 246 bp, Artificial Sequence
  derived and/or modified sequence
atgcgggccggccccggccccaccgtgaccctggccctggtgctggccgtatcatgggccatggagctgaaacccacagcgcctcctatctttacagggagaccgtttgtggtggcctgggacgttcctacgcaggactgtggacctcggctgaaagttccgctggacctgaatgcctttgatgttcaagctagcccaaacgaaggatttgtaaaccaaaacatcacaatcttttatagagattag

SEQ ID NO: 279636 - DNA, 231 bp, Artificial Sequence
  derived and/or modified sequence
atgcgggccggccccggccccaccgtgaccctggccctggtgctggcagtgtcttgggccatggagttgaagcccacagctccacccatatttacaggcagacccttcgtggtggcatgggatgtccccacccaggattgcggtcctcggctcaaagtccctctcgacctgaatgcctttgatgtgcaggcttctccaaatgagggatttgtgaatcagaacattacctag

SEQ ID NO: 279637 - DNA, 1422 bp, Artificial Sequence
  derived and/or modified sequence
atgcgggccggccccggccccaccgtgaccctggccctggtgctggccgtcagctgggcgatggagctgaaacccaccgctccacccattttcactggaagacccttcgttgtggcctgggacgttcctacccaggattgcggccctcgtctcaaggtcccactggacctgaatgcctttgatgtccaggcgtctcctaacgaagggtttgttaaccagaacattaccatcttctaccgtgatcgtttaggtctctaccctcgattcgacagtgcaggaaggtccgttcacgggggagtcccccagaacgtgagcttgtgggcccatcgaaagatgctgcagaaacgtgtcgagcactacattagaactcaggaatctgccggccttgctgtgatcgattgggaagactggcgtcctgtgtgggttagaaactggcaggataaggacgtctatcggaggctctctcgacagctagtagcttccaggcatcccgattggcccccggaccgtatcgtgaagcaggcacaatacgagttcgagttcgctgctcagcagtttatgcttgaaacactgcgctatgtaaaggccgtgagacctagacacctgtggggattctatctcttcccagattgctataatcacgattatgtgcagaactgggaaagctacaccggtcgctgcccggatgtggaggtagcacgcaacgaccagctggcctggttgtgggccgagtcaacagctctctttccctctgtctacctggacgaaaccctagctagttcccggcatggcaggaactttgtgtcattcagggtgcaggaggcgctgagggttgcccgtactcaccacgcgaatcacgccctgcccgtctatgtgttcaccagacctacatactcacgacgtctgaccggattgagtgagatggacctgatatctaccatcggggagtcagccgctctcggggcagccggtgtcatactatggggggacgctggatacactacaagtaccgaaacttgtcaatacctcaaagactatctaacaagactcctagttccctacgttgtaaacgtttcttgggcgacccagtactgttcccgcgcacagtgtcacggacatggccgctgtgtccgcaggaatccatctgcctctacatttcttcacctgagtactaacagcttcagactcgtccccggccatgcccctggcgaaccccagctgaggcccgtgggagagttgagctgggcagatattgaccacctacagacgcactttagatgtcaatgttatctggggtggtcaggcgagcagtgtcaatgggaccaccgccaagcagccgggggagcctctgaggcctgggcagggagccatctcaccagtcttctggcacttgctgcgcttgcattcacgtggacactctag

SEQ ID NO: 279638 - DNA, 1422 bp, Artificial Sequence
  derived and/or modified sequence
atgcgggccggccccggccccaccgtgaccctggccctggtgctggcggtgtcttgggctatggagctaaagcccactgccccccctatttttaccggtcgaccgttcgtggtcgcttgggacgtgcctacacaggactgcggaccaagactaaaggtgccactggacctgaatgccttcgacgtccaggcaagtcctaatgaaggattcgtgaaccagaacattacaattttctaccgcgatagactcgggttataccctcggttcgattctgccgggaggtccgtgcatggaggagtgcctcagaatgtgagcctctgggctcacaggaagatgctgcaaaagcgcgtcgagcattatattagaacacaggaatccgccgggcttgccgtaatagactgggaagattggcggcccgtctgggttcgcaactggcaggataaggacgtgtacagacggctatcgcgccagctggtggcctccagacatccagactggcctccagaccgcatcgtgaagcaagctcagtatgagtttgagttcgccgcccagcagtttatgctggagacactgcgctacgtgaaagcagttaggccccggcacctgtgggggttctatttgttcccagattgctacaatcatgactacgtccagaactgggagtcttacacgggtcggtgccctgatgtagaggttgcaagaaatgatcagctggcctggctatgggcggaaagcactgccctgttcccctctgtttatctggacgagaccctggcaagctcacggcacggccgaaacttcgtgagcttccgcgtccaggaggccctgcgagttgctagaactcaccacgcgaaccacgctctgcccgtgtatgtgttcactcgtcccacctacagccgacgcctgaccgggcttagtgagatggacctgatctccacgatcggtgaatcagcagcactgggggctgcgggggtaattctgtggggagacgcgggctacactacttccactgagacctgccagtatctgaaagattatctgactcgactcttggtcccctacgtcgtgaatgttagctgggccacccaatactgttcccgcgcacagtgtcatggccacggccggtgcgtccgacggaatccctctgcgtcaacttttctccacctttcaactaattccttccgcttagtccccggacatgcgcctggagagccccagctccgacctgtgggagagctctcgtgggcagacatcgatcatcttcagacccattttaggtgccaatgctatctcggttggagtggagaacaatgccagtgggaccataggcaagcagccggaggtgcgtctgaagcttgggccggttctcacctgacaagtctgttggccctggccgctctggccttcacttggactctatag

SEQ ID NO: 279639 - DNA, 366 bp, Artificial Sequence
  derived and/or modified sequence
atgcgggccggccccggccccaccgtgaccctggccctggtgctggctgtgagctgggctatggagctaaagcctactgccccacctattttcactgggcgaccttttgtggtcgcttgggacgtcccgacccaggactgtgggccacgtctgaaggtacccctggacctgaacgcattcgatgttcaggcatctccaaatgagggcttcgtaaatcagaacatcaccatcttctacagggatcgattgggtctctaccctcgttttgacagcgccggccggagcgtccacggtggagtgccacaaaacgtgtccctttgggcccacagaaaaatgttacagaagcgcgtcgagcactatatctag

SEQ ID NO: 279640 - DNA, 1422 bp, Artificial Sequence
  derived and/or modified sequence
atgcgcgcaggccctgggcctaccgtgaccctggcattagtgctcgctgtgtcttgggcaatggaactcaaaccaactgctcctcctatcttcaccggtcgaccatttgtcgttgcctgggacgtcccaacccaggattgcggccctcgcctcaaggtccctttggacttaaacgccttcgatgttcaagcgtctccgaacgaaggatttgtcaaccagaacatcacaatcttctatcgagaccgactagggttgtatcctaggtttgatagcgctggaaggagtgtccatggaggagtgcctcagaacgtgagcctgtgggcccataggaaaatgctccagaagagagtcgagcactatatacgtactcaggagtctgccggactcgccgtcatcgactgggaggactggagacctgtctgggtgaggaattggcaggacaaggacgtctatcgccgtctcagtcgtcagcttgttgcctcacgacaccctgattggccacccgacagaatagtcaagcaagctcagtacgagtttgaatttgcagcgcagcaattcatgcttgagaccctcaggtatgtcaaagctgttcggccacgacacctctggggattttaccttttccccgactgctataaccacgactatgtgcaaaattgggagtcctacaccggacgatgcccagatgtggaagtggctcgcaacgatcaactcgcctggctgtgggccgaatcaaccgcgttgttccccagtgtatacctcgacgagactcttgccagcagtcgccatggtagaaatttcgtatcatttagagtgcaggaggccctgcgagttgcaaggacacaccatgccaaccacgcactgcctgtatatgtgtttacacggcctacttactctagacgtcttacaggcctaagcgaaatggatctaataagcacaataggggagtcagccgctctcggagcggcaggcgtcattctttggggcgacgcagggtacaccacttccaccgagacgtgccagtacttgaaggattaccttaccaggctgctggtgccctacgtagtcaatgtgagctgggcgactcagtactgtagtcgtgctcagtgccatggccacggacgttgcgtaaggcggaatccatccgctagcacctttctgcacctgtccacgaatagctttagactggtgccaggccatgcgcctggcgaaccgcaattacggcctgtgggggagttgtcctgggccgacattgaccacctccagacacattttcgatgtcagtgctatctggggtggtccggggaacagtgtcagtgggaccaccggcaggccgctgggggtgcatctgaggcctgggcaggcagtcacttaacaagtcttctggcgttagccgcactcgcattcacctggacgctatag

SEQ ID NO: 279641 - DNA, 1422 bp, Artificial Sequence
  derived and/or modified sequence
atgagggcaggcccaggtcccactgtgactttggccttggtcttggcagtgtcctgggctatggagctcaagcccacagcccctcctatcttcaccggacgtccgtttgtagtggcgtgggatgtccctacccaggattgtggtccccgtctcaaggtccccctggatctaaacgcatttgatgtccaagccagccctaatgaaggattcgttaaccaaaacatcactattttctaccgggacagactagggctgtacccacgcttcgactccgcgggtcggtccgttcacggcggagtacctcagaatgtctccctctgggcccatagaaaaatgctacaaaagagggttgaacactatattagaacgcaggagagcgctgggctggctgtgattgattgggaggattggcggcctgtctgggtacgaaattggcaggacaaagatgtctatcggaggctgtcaaggcagcttgtggcatcaaggcaccccgattggcctccagaccggatcgtcaaacaggcccagtatgagtttgagttcgccgcacagcagtttatgctggagacactccgatacgtgaaagctgtgagacccagacacctgtgggggttctatctttttccagactgctataatcatgactacgtgcagaattgggagagctataccggaaggtgtccagacgtggaggtggcacggaacgaccaattagcgtggttatgggccgaatccacagctctgttcccatcggtttaccttgacgaaacactcgcttcgtctagacatgggcgaaattttgtatccttcagggtgcaggaagccctacgagtggccaggacacaccacgctaaccatgctcttccggtatatgtcttcacccgtccaacatacagtcgcagactgacgggtttaagtgagatggatctgatatccaccataggggagagcgccgcattaggggctgccggtgtcatcctgtggggggacgcaggctacactacatctactgaaacatgccagtacttgaaggactatctgacaaggctgctggttccctacgtcgtgaatgtgagttgggccacccagtattgcagccgagcacagtgccatgggcatggaaggtgcgtgaggagaaatcccagtgcctcaaccttcttgcacctaagcactaacagctttagactggtccctggccatgctcctggcgaaccccagctgagaccggtgggggagctgagttgggcagacattgaccatcttcaaacccacttcagatgccagtgctacctggggtggtccggtgaacagtgtcagtgggaccacaggcaagctgccggaggcgcatctgaggcctgggccggttctcatttaacaagcctgctggctctggccgctctggcctttacctggactctctag

SEQ ID NO: 279642 - DNA, 147 bp, Artificial Sequence
  derived and/or modified sequence
atgcgagccggacccggacctactgtgacgctcgccctggtattggcagtctcatgggctatggaattaaagcctacagcgcctccaattttcaccgggagaccattcgtggtggcctgggacgtcccaacacaggattgcggctag

SEQ ID NO: 279643 - DNA, 354 bp, Artificial Sequence
  derived and/or modified sequence
atgagggccggaccagggccaactgtgaccttagcccttgtgctggctgtctcatgggccatggagctcaaaccaacagcacctccaatttttacggggaggcctttcgtggtggcctgggatgtccccacccaggactgtgggccacggctgaaggtccccctggatctgaatgcttttgatgtacaggcaagccccaacgaaggatttgtgaatcagaacattacaatcttttacagagatcgacttggactttatcctcgattcgactcggcaggtcgatcagtacacggaggagttcctcagaatgtgagcctctgggctcacaggaaaatgctccagaagagggtttag

SEQ ID NO: 279644 - DNA, 246 bp, Artificial Sequence
  derived and/or modified sequence
atgcgcgcaggccctggacccaccgtgaccctggccctggtgctggccgtgtcttgggccatggagctaaaaccgactgccccacctatattcacgggcagaccattcgtcgttgcctgggatgttcctacccaggattgcggccctcgtcttaaggttcctctggacctcaacgcattcgatgtacaggccagtccgaacgagggatttgttaaccagaatataacgatcttctaccgcgattag

SEQ ID NO: 279645 - DNA, 231 bp, Artificial Sequence
  derived and/or modified sequence
atgcgggctggccctgggcctacagtcactctggctctggtgttggccgtcagctgggctatggaattgaagcccaccgcccctcctatcttcaccggccgtccgtttgtagtggcctgggatgtcccgactcaggactgcgggccacggttgaaagtcccactggaccttaacgcattcgacgtccaggcaagcccaaatgaagggttcgtcaaccagaacatcacttag

SEQ ID NO: 279646 - DNA, 1422 bp, Artificial Sequence
  derived and/or modified sequence
atgagagctggcccagggcctaccgtgaccctcgccttagtcttagccgtctcctgggcgatggaactgaagcctaccgcaccccctatttttaccggtagaccctttgtggtggcctgggatgtgcccacacaggattgcggccctcggctcaaagttcccctggatttaaatgctttcgatgtgcaggcgtctcctaacgagggatttgtcaaccaaaatatcaccattttctaccgagatcggctcgggttataccccaggtttgattctgctggccgaagcgtacacgggggagtccctcaaaatgtctccctgtgggctcacagaaaaatgctgcagaagagagtggagcactacatcagaacccaggaatcggccggacttgcagtcatcgattgggaggactggcgaccggtgtgggtgcgtaactggcaagacaaggatgtttaccggagactcagtcggcagctggtcgcgtcaaggcacccagactggccccctgatagaatcgtgaaacaggctcaatacgagttcgagttcgccgcacaacaatttatgttggaaacactgaggtacgttaaggccgtgagaccacgtcatctgtggggtttttatctctttcccgattgctacaatcatgactacgtgcagaattgggaaagctataccggtaggtgtccagatgtggaggtggccaggaacgatcagctggcctggctgtgggctgagtcaaccgccttatttccatcggtttacctcgatgaaaccctagcttcctcgagacacgggcgaaactttgtgtctttccgtgtgcaagaagctctgcgggtggccagaacccatcatgcgaaccacgccttgcccgtgtatgtgttcacccgaccaacctacagtagaagacttaccgggctttctgaaatggatctcattagtactattggcgagagtgctgcactcggcgcagccggtgtaatcttgtggggagacgctggctacacgacaagcactgagacctgccaatatttgaaggactatctaacccggctactcgtgccctacgtggttaatgtctcctgggcaacacaatactgctctcgagctcagtgtcacgggcacggacggtgtgtcagaagaaacccaagcgcatctaccttcctccatttgtcaaccaacagtttcagattagtccctggccacgcccctggggaaccgcagctgcggcctgttggagagctgtcttgggcagatattgaccatctgcaaacacattttaggtgtcagtgctacctcggatggtccggggagcagtgccaatgggaccaccgtcaagccgctggcggtgcgtccgaggcttgggccggatcacatctcacctcactgctggcactggccgctttggctttcacctggaccctgtag

SEQ ID NO: 279647 - DNA, 1422 bp, Artificial Sequence
  derived and/or modified sequence
atgagggctggtccaggtcccaccgtcactctagcacttgtgctcgcggtcagttgggccatggaattgaagccaactgctcctcctatttttacaggccgtccctttgttgtggcatgggacgttccaactcaagattgcggacccaggctcaaggtgcccctcgacttgaacgccttcgatgtccaggcctctccaaacgaaggctttgtgaaccagaacattactatcttttatagagaccgcctgggtctgtacccaagattcgactccgccggtaggtctgtccatggtggagtgcctcaaaatgtgagcctctgggcccaccggaagatgctgcaaaaaagagtggagcactacatacggactcaggagagcgcaggcctcgccgtaattgactgggaggactggcgtcccgtttgggtgagaaactggcaagacaaagatgtttaccggcgtctgagccggcagttagtggcttcacggcatcctgactggccacccgaccgcattgtgaaacaggcgcagtatgagttcgagtttgcagcacagcagtttatgttagaaactctccggtatgtcaaagcagtacggccaagacatctgtggggcttctatctgttccctgactgttacaatcatgactacgtgcaaaactgggaatcatatactggaagatgccccgacgtcgaagtggccaggaatgaccagctcgcctggctttgggctgaatccactgccctgttcccctcagtatacctggatgagacactagcgtcttccagacacggccgaaacttcgtgtccttccgcgtgcaagaagccctgagagtggcgcgtacacatcatgctaatcacgcactgcccgtttacgttttcaccagaccgacatacagccggagattgaccggcctctccgaaatggacctgatcagcacaattggagagtctgccgctctgggtgccgctggcgtgatcttgtggggggatgctgggtacacgacatccaccgaaacttgccagtacttgaaagactatctgaccagactgctggtgccatacgttgtcaacgtgtcatgggccacccaatactgtagcagggctcagtgccacggacacgggcgatgtgtaaggagaaatccaagcgcgtctactttcttgcacctgtccaccaatagctttcggttagttcctggccacgcacctggtgaaccccagctgagacccgtcggggagttaagctgggctgatatcgaccacctgcagacccacttcagatgtcagtgttaccttgggtggtccggagaacagtgtcagtgggatcaccggcaggctgccggtggggcatccgaagcttgggccggttcacatctcacttctctgctcgcgcttgcggcattagcctttacctggactctttag

SEQ ID NO: 279648 - DNA, 366 bp, Artificial Sequence
  derived and/or modified sequence
atgcgggctggcccaggccctaccgtgaccctggccttggtgctcgctgtgagttgggctatggaactcaagcccactgcgcctccaattttcactggacgccctttcgtggtcgcatgggacgttcctacccaggactgcggtcccaggctaaaagtccccttggatctcaatgcttttgacgttcaggcttccccaaacgaaggtttcgtgaatcagaacattaccattttttacagagatagactgggcttatacccgagattcgatagtgcaggaaggagtgtgcacggaggggttccacagaacgtgtctctttgggctcataggaagatgcttcaaaaacgggtcgagcactacatctag

SEQ ID NO: 279649 - DNA, 147 bp, Artificial Sequence
  derived and/or modified sequence
atgagagccggccccggccccaccgtgaccctggccctggtgctggccgtgagctgggccatggagctgaagcccaccgccccccccatcttcaccggcagacccttcgtggtggcctgggacgtgcccacccaggactgcggctag

SEQ ID NO: 279650 - DNA, 354 bp, Artificial Sequence
  derived and/or modified sequence
atgagagccggccccggccccaccgtgaccctggccctggtgctggccgtgagctgggccatggagctgaagcccaccgccccccccatcttcaccggcagacccttcgtggtggcctgggacgtgcccacccaggactgcggccccagactgaaggtgcccctggacctgaacgccttcgacgtgcaggccagccccaacgagggcttcgtgaaccagaacatcaccatcttctacagagacagactgggcctgtaccccagattcgacagcgccggcagaagcgtgcacggcggcgtgccccagaacgtgagcctgtgggcccacagaaagatgctgcagaagagagtgtag

SEQ ID NO: 279651 - DNA, 246 bp, Artificial Sequence
  derived and/or modified sequence
atgagagccggccccggccccaccgtgaccctggccctggtgctggccgtgagctgggccatggagctgaagcccaccgccccccccatcttcaccggcagacccttcgtggtggcctgggacgtgcccacccaggactgcggccccagactgaaggtgcccctggacctgaacgccttcgacgtgcaggccagccccaacgagggcttcgtgaaccagaacatcaccatcttctacagagactag

SEQ ID NO: 279652 - DNA, 231 bp, Artificial Sequence
  derived and/or modified sequence
atgagagccggccccggccccaccgtgaccctggccctggtgctggccgtgagctgggccatggagctgaagcccaccgccccccccatcttcaccggcagacccttcgtggtggcctgggacgtgcccacccaggactgcggccccagactgaaggtgcccctggacctgaacgccttcgacgtgcaggccagccccaacgagggcttcgtgaaccagaacatcacctag

SEQ ID NO: 279653 - DNA, 366 bp, Artificial Sequence
  derived and/or modified sequence
atgagagccggccccggccccaccgtgaccctggccctggtgctggccgtgagctgggccatggagctgaagcccaccgccccccccatcttcaccggcagacccttcgtggtggcctgggacgtgcccacccaggactgcggccccagactgaaggtgcccctggacctgaacgccttcgacgtgcaggccagccccaacgagggcttcgtgaaccagaacatcaccatcttctacagagacagactgggcctgtaccccagattcgacagcgccggcagaagcgtgcacggcggcgtgccccagaacgtgagcctgtgggcccacagaaagatgctgcagaagagagtggagcactacatctag

SEQ ID NO: 279654 - protein, 1095 aa, Artificial Sequence
  derived and/or modified sequence
MEADGAGEQMRPLLTRGPDEEAVVDLGKTSSTVNTKFEKEELESHRAVYIGVHVPFSKESRRRHRHRGHKHHHRRRKDKESDKEDGRESPSYDTPSQRVQFILGTEDDDEEHIPHDLFTEMDELCYRDGEEYEWKETARWLKFEEDVEDGGDRWSKPYVATLSLHSLFELRSCILNGTVMLDMRASTLDEIADMVLDNMIASGQLDESIRENVREALLKRHHHQNEKRFTSRIPLVRSFADIGKKHSDPHLLERNGILASPQSAPGNLDNSKSGEIKGNGSGGSRENSTVDFSKVDMNFMRKIPTGAEASNVLVGEVDFLERPIIAFVRLAPAVLLTGLTEVPVPTRFLFLLLGPAGKAPQYHEIGRSIATLMTDEIFHDVAYKAKDRNDLLSGIDEFLDQVTVLPPGEWDPSIRIEPPKSVPSQEKRKIPVFHNGSTPTLGETPKEAAHHAGPELQRTGRLFGGLILDIKRKAPFFLSDFKDALSLQCLASILFLYCACMSPVITFGGLLGEATEGRISAIESLFGASLTGIAYSLFAGQPLTILGSTGPVLVFEKILYKFCRDYQLSYLSLRTSIGLWTSFLCIVLVATDASSLVCYITRFTEEAFAALICIIFIYEALEKLFDLGETYAFNMHNNLDKLTSYSCVCTEPPNPSNETLAQWKKDNITAHNISWRNLTVSECKKLRGVFLGSACGHHGPYIPDVLFWCVILFFTTFFLSSFLKQFKTKRYFPTKVRSTISDFAVFLTIVIMVTIDYLVGVPSPKLHVPEKFEPTHPERGWIISPLGDNPWWTLLIAAIPALLCTILIFMDQQITAVIINRKEHKLKKGAGYHLDLLMVGVMLGVCSVMGLPWFVAATVLSISHVNSLKVESECSAPGEQPKFLGIREQRVTGLMIFILMGLSVFMTSVLKFIPMPVLYGVFLYMGVSSLKGIQLFDRIKLFGMPAKHQPDLIYLRYVPLWKVHIFTVIQLTCLVLLWVIKVSAAAVVFPMMVLALVFVRKLMDLCFTKRELSWLDDLMPESKKKKEDDKKKKEKEEAERMLQDDDDTVHLPFEGGSLLQIPVKALKYSPDKPVSVKISFEDEPRKKYVDAETSL

SEQ ID NO: 279655 - DNA, 3288 bp, Artificial Sequence
  derived and/or modified sequence
atggaggccgacggcgccggcgagcagatgagacccctgctgaccagaggccccgacgaggaggccgtggtggacctgggcaagaccagcagcaccgtgaacaccaagttcgagaaggaggagctggagagccacagagccgtgtacatcggcgtgcacgtgcccttcagcaaggagagcagaagaagacacagacacagaggccacaagcaccaccacagaagaagaaaggacaaggagagcgacaaggaggacggcagagagagccccagctacgacacccccagccagagagtgcagttcatcctgggcaccgaggacgacgacgaggagcacatcccccacgacctgttcaccgagatggacgagctgtgctacagagacggcgaggagtacgagtggaaggagaccgccagatggctgaagttcgaggaggacgtggaggacggcggcgacagatggagcaagccctacgtggccaccctgagcctgcacagcctgttcgagctgagaagctgcatcctgaacggcaccgtgatgctggacatgagagccagcaccctggacgagatcgccgacatggtgctggacaacatgatcgccagcggccagctggacgagagcatcagagagaacgtgagagaggccctgctgaagagacaccaccaccagaacgagaagagattcaccagcagaatccccctggtgagaagcttcgccgacatcggcaagaagcacagcgacccccacctgctggagagaaacggcatcctggccagcccccagagcgcccccggcaacctggacaacagcaagagcggcgagatcaagggcaacggcagcggcggcagcagagagaacagcaccgtggacttcagcaaggtggacatgaacttcatgagaaagatccccaccggcgccgaggccagcaacgtgctggtgggcgaggtggacttcctggagagacccatcatcgccttcgtgagactggcccccgccgtgctgctgaccggcctgaccgaggtgcccgtgcccaccagattcctgttcctgctgctgggccccgccggcaaggccccccagtaccacgagatcggcagaagcatcgccaccctgatgaccgacgagatcttccacgacgtggcctacaaggccaaggacagaaacgacctgctgagcggcatcgacgagttcctggaccaggtgaccgtgctgccccccggcgagtgggaccccagcatcagaatcgagccccccaagagcgtgcccagccaggagaagagaaagatccccgtgttccacaacggcagcacccccaccctgggcgagacccccaaggaggccgcccaccacgccggccccgagctgcagagaaccggcagactgttcggcggcctgatcctggacatcaagagaaaggcccccttcttcctgagcgacttcaaggacgccctgagcctgcagtgcctggccagcatcctgttcctgtactgcgcctgcatgagccccgtgatcaccttcggcggcctgctgggcgaggccaccgagggcagaatcagcgccatcgagagcctgttcggcgccagcctgaccggcatcgcctacagcctgttcgccggccagcccctgaccatcctgggcagcaccggccccgtgctggtgttcgagaagatcctgtacaagttctgcagagactaccagctgagctacctgagcctgagaaccagcatcggcctgtggaccagcttcctgtgcatcgtgctggtggccaccgacgccagcagcctggtgtgctacatcaccagattcaccgaggaggccttcgccgccctgatctgcatcatcttcatctacgaggccctggagaagctgttcgacctgggcgagacctacgccttcaacatgcacaacaacctggacaagctgaccagctacagctgcgtgtgcaccgagccccccaaccccagcaacgagaccctggcccagtggaagaaggacaacatcaccgcccacaacatcagctggagaaacctgaccgtgagcgagtgcaagaagctgagaggcgtgttcctgggcagcgcctgcggccaccacggcccctacatccccgacgtgctgttctggtgcgtgatcctgttcttcaccaccttcttcctgagcagcttcctgaagcagttcaagaccaagagatacttccccaccaaggtgagaagcaccatcagcgacttcgccgtgttcctgaccatcgtgatcatggtgaccatcgactacctggtgggcgtgcccagccccaagctgcacgtgcccgagaagttcgagcccacccaccccgagagaggctggatcatcagccccctgggcgacaacccctggtggaccctgctgatcgccgccatccccgccctgctgtgcaccatcctgatcttcatggaccagcagatcaccgccgtgatcatcaacagaaaggagcacaagctgaagaagggcgccggctaccacctggacctgctgatggtgggcgtgatgctgggcgtgtgcagcgtgatgggcctgccctggttcgtggccgccaccgtgctgagcatcagccacgtgaacagcctgaaggtggagagcgagtgcagcgcccccggcgagcagcccaagttcctgggcatcagagagcagagagtgaccggcctgatgatcttcatcctgatgggcctgagcgtgttcatgaccagcgtgctgaagttcatccccatgcccgtgctgtacggcgtgttcctgtacatgggcgtgagcagcctgaagggcatccagctgttcgacagaatcaagctgttcggcatgcccgccaagcaccagcccgacctgatctacctgagatacgtgcccctgtggaaggtgcacatcttcaccgtgatccagctgacctgcctggtgctgctgtgggtgatcaaggtgagcgccgccgccgtggtgttccccatgatggtgctggccctggtgttcgtgagaaagctgatggacctgtgcttcaccaagagagagctgagctggctggacgacctgatgcccgagagcaagaagaagaaggaggacgacaagaagaagaaggagaaggaggaggccgagagaatgctgcaggacgacgacgacaccgtgcacctgcccttcgagggcggcagcctgctgcagatccccgtgaaggccctgaagtacagccccgacaagcccgtgagcgtgaagatcagcttcgaggacgagcccagaaagaagtacgtggacgccgagaccagcctgtag

SEQ ID NO: 279656 - DNA, 1392 bp, Artificial Sequence
  derived and/or modified sequence
atggaggccgacggcgccggcgagcagatgagacccctgctgaccagaggccccgacgaggaggccgtggtggacctgggcaagaccagcagcaccgtgaacaccaagttcgagaaggaggagctggagagccacagagccgtgtacatcggcgtgcacgtgcccttcagcaaggagagcagaagaagacacagacacagaggccacaagcaccaccacagaagaagaaaggacaaggagagcgacaaggaggacggcagagagagccccagctacgacacccccagccagagagtgcagttcatcctgggcaccgaggacgacgacgaggagcacatcccccacgacctgttcaccgagatggacgagctgtgctacagagacggcgaggagtacgagtggaaggagaccgccagatggctgaagttcgaggaggacgtggaggacggcggcgacagatggagcaagccctacgtggccaccctgagcctgcacagcctgttcgagctgagaagctgcatcctgaacggcaccgtgatgctggacatgagagccagcaccctggacgagatcgccgacatggtgctggacaacatgatcgccagcggccagctggacgagagcatcagagagaacgtgagagaggccctgctgaagagacaccaccaccagaacgagaagagattcaccagcagaatccccctggtgagaagcttcgccgacatcggcaagaagcacagcgacccccacctgctggagagaaacggcatcctggccagcccccagagcgcccccggcaacctggacaacagcaagagcggcgagatcaagggcaacggcagcggcggcagcagagagaacagcaccgtggacttcagcaaggtggacatgaacttcatgagaaagatccccaccggcgccgaggccagcaacgtgctggtgggcgaggtggacttcctggagagacccatcatcgccttcgtgagactggcccccgccgtgctgctgaccggcctgaccgaggtgcccgtgcccaccagattcctgttcctgctgctgggccccgccggcaaggccccccagtaccacgagatcggcagaagcatcgccaccctgatgaccgacgagatcttccacgacgtggcctacaaggccaaggacagaaacgacctgctgagcggcatcgacgagttcctggaccaggtgaccgtgctgccccccggcgagtgggaccccagcatcagaatcgagccccccaagagcgtgcccagccaggagaagagaaagatccccgtgttccacaacggcagcacccccaccctgggcgagacccccaaggaggccgcccaccacgccggccccgagctgcagagaaccggcagagtgcagtag

SEQ ID NO: 279657 - DNA, 3288 bp, Artificial Sequence
  derived and/or modified sequence
atggaggccgacggagccggtgagcagatgagacctctcctgactagaggcccagacgaagaagcggtcgtggatttaggaaaaacgtcaagcactgtgaatacaaaatttgaaaaagaagaactcgagtcgcaccgcgccgtgtacattggggtgcacgtcccattcagcaaggaaagtagacgtcgccaccgtcatcgcgggcacaagcatcatcatcgacgccgcaaagataaagagagcgataaggaggatggcagagaatccccatcgtacgatacaccgtcgcagcgcgttcagttcatcctgggcacagaggatgacgatgaggaacacattccacacgatctgtttactgaaatggatgaactgtgttacagagacggggaagaatatgagtggaaagagacagcacgctggctcaagtttgaggaagatgtcgaggacggcggtgacagatggtccaaaccctacgttgccactttgagcctgcactctttgttcgagcttaggagttgcatactaaacggcaccgtgatgctggatatgagggccagcacacttgatgaaatcgctgacatggtcctcgataacatgattgcgagcggacagctggatgagtctatcagagaaaacgttcgtgaagccctactcaagcgacaccaccaccagaacgagaagaggttcacaagcaggatccctctcgttagaagtttcgcggacatcggcaaaaaacacagcgaccctcatttactagaaaggaacgggatcctcgcatctccacagtcagccccaggaaatctggacaactccaagtccggcgagataaaagggaatggaagcggcggttcccgcgagaactctactgttgatttttcgaaggtggatatgaacttcatgaggaaaattcccactggcgcagaggcctctaacgtgcttgtaggcgaggtcgactttctggagcgaccaatcattgcatttgtgcgcctcgctcccgcagtactgctcaccggccttactgaggtcccagttccgacaagatttctgttcttacttttaggccccgccggtaaagcgccccagtaccacgaaatcggcagatctatagctacactgatgaccgatgagatcttccacgacgttgcctacaaggctaaagatcggaatgatttactgtccgggatcgacgagttcttagaccaggttactgtgctgccgcctggggagtgggatccatctattagaatcgaacctcccaagagcgttccatcgcaggagaagcgcaaaattccagtatttcacaatggctctacgccaacactgggagagacccctaaggaggccgcccaccacgccggacccgagttgcagaggactgggaggctgttcgggggcctgatcctcgacataaaaagaaaggcccctttttttctttcagatttcaaagacgctttatcactgcagtgccttgcatctatactgtttctgtactgcgcttgcatgagccccgtgatcactttcggcgggctgctcggcgaggccactgagggaagaatcagtgcgatcgaaagcctcttcggcgcaagtctgacagggatagcttacagtctgttcgctggacaacctctgaccatactgggatctacagggccagtgctggtgttcgaaaaaattctctacaagttttgtcgggactaccaactgtcatatcttagtttaaggacaagcattgggttgtggaccagctttctgtgtatcgtgttggtcgcaactgatgcttcatcgctagtatgctacatcactagattcacagaagaggcgttcgctgccttgatatgcataatatttatttacgaggcactggaaaagctgtttgatctgggagaaacttatgcctttaatatgcataataacctggacaagctgactagttacagctgcgtctgtactgagccaccaaacccgagtaatgaaactctggcacagtggaagaaagataatatcactgcccataatattagctggcggaacctgacagtgagtgagtgcaaaaaattgcggggcgtgttcctgggctccgcttgtggacatcatggcccttatatcccggatgtgctcttctggtgcgtcattctgttttttaccacattctttttgagttccttcctgaagcagttcaaaacaaagcggtattttcccaccaaagtgaggagcactatttcagatttcgccgtatttctgactatcgttattatggtcactatagactacttagtgggcgtcccgagccccaaattacacgtgcccgaaaagtttgagcctactcatcccgaaaggggctggattatctccccactgggcgacaacccctggtggactctcctgatcgcagccatcccagcgctcctgtgtactatcctgattttcatggatcagcagatcacagcagtaattattaatcgtaaagagcataagctcaagaaaggtgccggctaccacctagatctgctgatggtaggggtcatgttgggagtgtgttctgtgatggggctcccttggtttgtagctgcaaccgtcttaagtattagtcatgtgaactccttaaaagtggaaagtgagtgctctgccccaggcgagcaacctaagttcctgggtattcgcgaacaacgggttacaggcctgatgatatttatcctgatgggactaagcgtctttatgacctccgtgctgaagttcatccccatgcccgtgctgtatggtgtttttctctacatgggagttagcagtcttaagggtatccagctgtttgatcgcataaaacttttcggcatgcctgccaagcaccaaccagacctgatctacctacggtacgttcctctatggaaagtgcacatttttacggtgatacaattaacatgcctggtattgctgtgggttattaaggtatccgcagcggcagtggtcttccccatgatggtgctagcccttgtgttcgtaagaaagcttatggacctgtgcttcactaagagagagctctcctggctagacgatctcatgccagaaagcaaaaaaaagaaggaagacgacaagaaaaaaaaggaaaaggaggaggcggagcggatgctgcaggatgacgatgacacagtgcacttgcccttcgaaggcggctccttgctgcagatcccagtcaaggcacttaaatacagtcccgataagccagtcagtgttaagattagctttgaggacgagcctagaaaaaagtatgtggatgctgagacaagcttatag

SEQ ID NO: 279658 - DNA, 1392 bp, Artificial Sequence
  derived and/or modified sequence
atggaagcagacggcgcgggcgaacagatgcgaccattacttactagggggccggacgaggaggccgtggtcgatcttggcaagacttcatctactgtgaatacaaaatttgagaaggaggaacttgaatcccaccgggctgtgtatataggagtgcacgtaccttttagcaaggagagccggcgccggcaccgacacaggggccacaagcatcaccataggcgacggaaggataaagaatccgacaaggaggacggtcgcgagtctccctcttatgataccccgagccaacgcgtgcaatttattcttgggactgaggatgatgacgaagaacatatacctcatgatctttttaccgaaatggacgagttatgctatagagacggggaggagtacgagtggaaggaaaccgcccgatggctcaaattcgaagaggatgtggaagacgggggggaccgatggtcgaagccctacgtggccacgctgagtttacattcattgtttgaactacgctcctgtatcttaaacggtacggtcatgttggatatgcgagcctctaccctcgacgaaatcgcggacatggtactcgacaacatgatcgcatcgggccagctggacgagtctattcgagaaaatgtgagagaagccttactgaaacggcaccaccatcagaacgagaagcggtttaccagtagaattccactcgtaagaagctttgctgacattggtaagaaacactcagatccgcatttgctggagaggaacggcatattggccagtcctcagagtgctcctggcaacctggacaatagcaagtcgggcgaaatcaaaggaaacggcagcggagggagccgagagaacagcacagtggacttctccaaagtcgacatgaactttatgcggaaaatccccaccggcgctgaggcctcaaatgtactggtcggggaagttgatttcctagagcggcctatcattgcattcgttaggcttgcccccgccgtcctcctgaccggcctgactgaagttcccgttccaacccgctttctgtttctgcttttaggacccgctggaaaggcccctcagtatcatgagatcggaagatccatcgctacattgatgactgacgagatttttcacgacgttgcctacaaagcaaaagaccgcaacgatctgctgtcgggtatcgacgagtttttagatcaggtcacggtgctgccaccgggtgaatgggatccttccatcagaattgaacctcccaaatccgtccccagtcaggaaaaacgcaagattccagtgttccacaatgggtcaaccccaacacttggggagactccaaaggaggctgcgcaccacgctggtcctgaattgcagcggactgggagggtgcagtag

SEQ ID NO: 279659 - DNA, 1392 bp, Artificial Sequence
  derived and/or modified sequence
atggaagccgacggggccggcgagcaaatgcgcccacttcttacaagaggccctgatgaagaggccgtggtagacctggggaagacgagctccactgtcaatacaaagttcgagaaggaagagctcgaaagtcatcgtgcggtttatatcggtgttcatgtgcctttcagcaaggagagtagacgtcgccatcgtcacagaggtcacaagcatcaccaccggagacggaaagataaggaatcagataaagaggatggcagagagagtccaagctacgatactccgtcccagcgcgtgcagtttatactgggcaccgaggatgacgatgaagagcacatcccacacgacctgttcacagagatggacgagctctgttatagggacggggaggagtacgagtggaaagagacagcccggtggctcaagttcgaggaagatgtcgaagacggaggcgaccgatggtccaagccctacgtggccaccctgtcccttcacagtctgtttgagctgagatcatgcatcttaaacgggaccgtgatgctcgacatgcgtgcctccactctggatgagattgcagacatggtgctggacaacatgattgccagcgggcagttagatgagtcaatcagagagaacgtgcgggaagcactcttaaagcgccatcatcatcagaacgagaagcggttcacctctaggattcctctggtaagaagtttcgctgacattggaaagaagcacagcgatccccatcttctggagagaaacggaattttagccagtccccaatccgccccaggcaatctggacaactccaaaagcggagaaatcaagggaaacggcagcggaggttccagggaaaacagcaccgtcgatttctccaaggtagatatgaatttcatgaggaaaattccgaccggcgcagaagccagcaacgttctggtgggggaagttgactttcttgaacgccctatcattgctttcgtgcggctagctcctgctgtgctccttacaggcctgaccgaagtgcccgtccccactcgattcctattcttattactcggccccgctggcaaagctccacagtaccatgaaataggtcgtagtatagctactcttatgaccgatgaaatcttccacgatgtggcctacaaggccaaggatcggaacgacctattgtccggtatcgacgagttcctggatcaggtcacagtgctcccaccaggcgagtgggacccatcgatccggatcgaaccccccaagtccgtgccttcccaggagaagaggaagatccccgtctttcacaatggtagcactcctacactgggggagactcccaaagaagcggcccaccatgcagggccagagctgcagaggaccggtcgcgtgcaatag

SEQ ID NO: 279660 - DNA, 3288 bp, Artificial Sequence
  derived and/or modified sequence
atggaggctgatggagctggggagcagatgaggcccctgctgacccggggcccagatgaggaggccgtggtggacctgggcaagaccagcagcacagtgaacaccaagtttgagaaggaggagctggagagccacagagctgtgtacatcggcgtgcacgtgcccttcagcaaggagagcagaagaagacaccgccaccggggccacaagcaccaccacagaagaaggaaggacaaggagagtgacaaggaggatggccgggagagccccagctatgacacccccagccagagggtgcagttcatcctgggcacagaagatgatgatgaggagcacatcccccatgacctcttcacagagatggatgagctgtgctacagagatggagaggagtatgagtggaaggagacagcccgctggctgaagtttgaagaagatgtggaggatggaggagaccgctggagcaagccctacgtggccaccctgagcctgcacagcctgtttgagctgcggagctgcatcctgaatggcaccgtgatgctggacatgagggccagcaccctggatgaaattgctgacatggtgctggacaacatgattgccagcggccagctggatgagagcatcagagaaaatgtgcgggaggccctgctgaagaggcaccaccaccagaatgagaagcgcttcaccagccgcatccccctggtgcgcagctttgctgacatcggcaagaagcacagcgacccccacctgctggagagaaatggcatcctggccagcccccagagcgcccctggcaacctggacaacagcaagtctggagagatcaagggaaatggaagtggcggcagccgggagaacagcacagtggacttcagcaaggtggacatgaacttcatgaggaagatccccactggagctgaggccagcaatgtgctggtgggggaggtggacttcctggagcggcccatcatcgcctttgtgcggctggccccagctgtgctgctgaccggcctgacagaggtgcctgtgcccacccgcttcctgttcctgctgctgggccctgctgggaaggccccccagtaccatgaaattggccgcagcatcgccaccctgatgacagatgagatcttccatgatgtggcctacaaggccaaggacagaaatgacctgctgtctggaattgatgagttcctggaccaggtgacagtgctgcccccaggagagtgggaccccagcatccgcatcgagccccccaagtctgtgcccagccaggagaagaggaagatccctgtgttccacaacggcagcacccccaccctgggggagacccccaaggaggccgcccaccacgccggccctgagctgcagaggacaggccgcctgtttggaggcctcatcctggacatcaagaggaaggcccccttcttcctgagtgacttcaaggatgccctgagcctgcagtgcctggccagcatcctcttcctgtactgtgcctgcatgagccctgtgatcacctttggaggcctgctgggggaggccacagagggccgcatcagcgccatcgagagcctgtttggagccagcctgactggaattgcctacagcctgtttgctggccagcccctgaccatcctgggcagcactggacctgtgctggtgtttgagaagatcctgtacaagttctgccgggactaccagctgagctacctgagcctgcggaccagcatcggcctgtggaccagcttcctgtgcatcgtgctggtggccacagatgccagcagcctggtgtgctacatcacccgcttcacagaggaggcctttgctgccctgatctgcatcatcttcatctatgaggccctggagaagctgtttgacctgggggagacctacgccttcaacatgcacaacaacctggacaagctgaccagctacagctgtgtgtgcacagagccccccaaccccagcaatgagaccctggcccagtggaagaaggacaacatcacagcccacaacatctcctggaggaacctgactgtgtctgagtgcaagaagctgcggggcgtcttcctgggcagcgcctgtggccaccacggcccctacatcccagatgtgctcttctggtgtgtgatcctcttcttcaccaccttcttcctgagcagcttcctgaagcagttcaagaccaagcgctacttccccaccaaggtgcgcagcaccatcagtgactttgctgtgttcctgaccatcgtcatcatggtgaccatcgactacctggtgggcgtgcccagccccaagctgcacgtgcctgagaagtttgagcccacccaccctgagcggggctggatcatcagccccctgggggacaacccctggtggaccctgctgattgctgccatcccagccctgctgtgcaccatcctgatcttcatggaccagcagatcacagctgtgatcatcaacaggaaggagcacaagctgaagaagggggccggctaccacctggacctgctgatggtgggcgtgatgctgggcgtgtgcagcgtgatgggcctgccctggtttgtggccgccaccgtgctgagcatcagccacgtgaacagcctgaaggtggagagtgaatgttctgcccctggagagcagcccaagttcctgggcatccgggagcagagggtgacaggcctgatgatcttcatcctgatgggcctgtctgtgttcatgacctctgtgctgaagttcatccccatgcctgtgctgtatggagtcttcctgtacatgggcgtgagcagcctgaagggcatccagctgtttgaccgcatcaagctgtttggcatgcctgccaagcaccagcctgacctgatctacctgcgctacgtgcccctgtggaaggtgcacatcttcaccgtcatccagctgacctgcctggtgctgctgtgggtgatcaaggtgtctgctgctgctgtggtgttccccatgatggtgctggccctggtgtttgtgaggaagctgatggacctgtgcttcaccaagcgggagctgtcctggctggatgacctgatgcctgagagcaagaagaagaaggaggatgacaagaagaagaaggagaaggaggaggccgagaggatgctgcaggatgatgatgacacagtgcacctgccctttgaaggaggcagcctgctgcagatccctgtgaaggccctgaagtacagcccagacaagcctgtgtctgtgaagatcagctttgaagatgagcccaggaagaagtatgtggatgctgagaccagcctgtag

SEQ ID NO: 279661 - DNA, 1392 bp, Artificial Sequence
  derived and/or modified sequence
atggaggctgatggagctggggagcagatgaggcccctgctgacccggggcccagatgaggaggccgtggtggacctgggcaagaccagcagcacagtgaacaccaagtttgagaaggaggagctggagagccacagagctgtgtacatcggcgtgcacgtgcccttcagcaaggagagcagaagaagacaccgccaccggggccacaagcaccaccacagaagaaggaaggacaaggagagtgacaaggaggatggccgggagagccccagctatgacacccccagccagagggtgcagttcatcctgggcacagaagatgatgatgaggagcacatcccccatgacctcttcacagagatggatgagctgtgctacagagatggagaggagtatgagtggaaggagacagcccgctggctgaagtttgaagaagatgtggaggatggaggagaccgctggagcaagccctacgtggccaccctgagcctgcacagcctgtttgagctgcggagctgcatcctgaatggcaccgtgatgctggacatgagggccagcaccctggatgaaattgctgacatggtgctggacaacatgattgccagcggccagctggatgagagcatcagagaaaatgtgcgggaggccctgctgaagaggcaccaccaccagaatgagaagcgcttcaccagccgcatccccctggtgcgcagctttgctgacatcggcaagaagcacagcgacccccacctgctggagagaaatggcatcctggccagcccccagagcgcccctggcaacctggacaacagcaagtctggagagatcaagggaaatggaagtggcggcagccgggagaacagcacagtggacttcagcaaggtggacatgaacttcatgaggaagatccccactggagctgaggccagcaatgtgctggtgggggaggtggacttcctggagcggcccatcatcgcctttgtgcggctggccccagctgtgctgctgaccggcctgacagaggtgcctgtgcccacccgcttcctgttcctgctgctgggccctgctgggaaggccccccagtaccatgaaattggccgcagcatcgccaccctgatgacagatgagatcttccatgatgtggcctacaaggccaaggacagaaatgacctgctgtctggaattgatgagttcctggaccaggtgacagtgctgcccccaggagagtgggaccccagcatccgcatcgagccccccaagtctgtgcccagccaggagaagaggaagatccctgtgttccacaacggcagcacccccaccctgggggagacccccaaggaggccgcccaccacgccggccctgagctgcagaggacaggccgggtgcagtag

SEQ ID NO: 279662 - DNA, 3288 bp, Artificial Sequence
  derived and/or modified sequence
atggaggccgacggcgccggcgagcagatgcggcccctgctgacccggggtccagacgaggaggccgtggtcgatctcggaaaaacttcaagcacggtaaatactaaattcgagaaagaagagctggagtcacatcgggctgtctatatcggagtgcacgtccctttctctaaggaaagcaggcggcgccatcgccacagaggacataagcatcaccaccgaagacggaaggataaggaatccgataaggaagacgggcgagaatccccgtcctatgacactccctcccaaagggtgcaattcatcctggggaccgaggatgatgatgaagagcatattccccatgacctctttaccgagatggacgagctctgttacagagatggtgaagaatacgaatggaaagaaaccgctcgttggttgaagttcgaggaggatgttgaggacggcggcgataggtggtctaagccatatgttgccactctgagtttacactcactgttcgagctgcgaagctgcattctaaatggtactgtgatgttggacatgagagccagtaccctagatgaaatagcagacatggtgctggataacatgattgccagcggccagctcgacgaaagcatccgcgagaatgtgcgcgaagccttgctcaagcgacaccatcatcagaatgaaaagaggtttactagccgaattcctttggtcaggagtttcgctgacatcggaaagaaacacagcgaccctcatctcctcgaacgtaacggtatactcgcctcacctcagtccgccccaggtaatcttgacaactccaagagcggggagataaaaggcaacgggtcagggggatcccgagagaattctaccgtggatttctccaaggtcgacatgaattttatgagaaaaatccccacgggcgctgaggccagtaacgtcctggtcggggaggtggacttcctggaaaggcctattatagctttcgtcagactagccccagcagtacttttgaccggcttgacagaggtccccgtccctacgcgatttctgttcctgctcctgggcccagcaggcaaggcacctcagtatcacgaaatcggccgcagcatagccacattaatgaccgacgagatcttccacgatgtcgcctataaggctaaagatcgcaatgacttgcttagcggcatcgatgagtttctggatcaggtgactgtgttaccacctggtgagtgggatcctagtatcagaatagagcctccaaagtcagtgccctcccaggaaaagagaaaaattccagtttttcacaacggcagtacccctactctaggcgagacgccaaaggaagctgcccaccacgctggccctgaactccagcgcacggggaggttatttggaggactcatcttggatattaaacgtaaggccccttttttcctttccgattttaaggacgccctgtccctgcagtgcctggcatctattttatttctgtattgcgcctgtatgtcccctgttatcacattcgggggcctcttaggagaggcgactgaagggcgcatcagcgccattgagagtctctttggagcctccctcacaggaatcgcctactctctttttgcaggtcagcctttaaccatccttggtagcaccggccctgtcctggtttttgagaaaatcctgtacaagttttgtcgagattatcagctatcctacctcagtttgcggacttcaattggtctgtggacatctttcctgtgtatagtgctcgtggcaaccgatgcctcttctttggtttgctatataacacgcttcacagaagaagccttcgccgcattgatatgtattattttcatatatgaggccctagagaaactttttgatttaggggaaacatatgcatttaatatgcacaataacctcgacaaactgacatcttattcctgcgtctgcacggaacctcctaaccctagcaatgagactctggcgcaatggaagaaagacaacattaccgcccataacatatcttggcggaatctgactgtgtccgagtgtaagaagctgcgtggagtcttcctgggatcagcctgtgggcaccatggtccttacattcctgatgtgttattctggtgcgtgatcttattctttaccacctttttcctctcttcgtttcttaagcagtttaagactaaaagatactttcctaccaaagtcaggtctaccattagcgatttcgccgtttttctgaccattgttataatggttacaatcgactacttggtcggcgttccctcccccaaattgcatgttcccgagaagttcgagcctactcaccccgagcgtggttggataatctcgccactgggggacaacccttggtggactttgctgatcgccgctattccggcactgctttgcacaatcttaatctttatggaccagcagatcacagccgtcatcatcaataggaaggaacataaactgaaaaagggagctggatatcacttggacctgcttatggtgggagtgatgcttggtgtgtgctccgtcatggggcttccatggttcgtagctgcaactgtgttgtcaatctcacatgtgaactcgttgaaagtcgagtcagaatgttcagcccctggcgagcagccgaaattccttggtatcagagagcaacgcgtcaccgggctgatgatctttatcctcatggggctgtcagtatttatgacctccgtgttaaaattcatcccaatgccagtgctgtacggcgtttttctgtatatgggtgtgtcttcccttaaaggaattcaactcttcgatcgcattaaactcttcggaatgcctgcaaaacatcagcccgatctaatctatctccggtacgtgcccctgtggaaagtgcacattttcactgtgatccagctaacctgcctggtcctactttgggttataaaggtgtcagcggctgcagtcgttttcccaatgatggtgctcgccctggttttcgtaaggaaattgatggacctgtgctttaccaagagagaattgtcttggcttgacgaccttatgcctgagtccaaaaaaaagaaagaagacgacaagaagaaaaaggagaaggaagaagctgagcggatgctccaggatgatgacgataccgtgcatctcccctttgaaggaggcagccttctgcagatcccagtaaaagcccttaaatacagtcccgacaaaccagttagcgtgaagatctccttcgaagatgaacccagaaagaaatacgtcgatgctgagacttccctttag

SEQ ID NO: 279663 - DNA, 1392 bp, Artificial Sequence
  derived and/or modified sequence
atggaggccgacggcgccggcgagcagatgcggcccctgctgacccgtgggccagatgaggaagccgttgtggatcttggtaagacatcatctaccgtgaatactaaatttgaaaaagaagaacttgaatcccacagggctgtgtatatcggcgtccatgtcccgtttagcaaggaaagtcggcgacgacatcgacatcgtggacataagcaccatcaccggcgtagaaaggacaaggaatctgacaaagaagacggtcgtgaatccccatcatatgataccccatctcaacgagtgcagtttattttaggtaccgaagatgatgatgaagagcacataccacacgaccttttcactgagatggacgagctatgctatagagacggtgaggaatacgagtggaaggaaaccgcacgatggcttaagttcgaggaggacgtggaggatggcggcgacagatggtccaagccatacgtggcaactttgtccctccattcgctcttcgaacttcgaagctgcattttgaacggcaccgtcatgcttgatatgagagcctctaccctggatgagattgcggatatggtcctggataatatgatcgctagcggtcagctcgacgaaagtattcgcgaaaacgtgcgcgaggccctgctgaaaagacatcatcatcagaatgaaaagaggtttacttctcggatcccactcgttcgtagcttcgcggatattggtaaaaaacattccgaccctcatctgctggaacggaacggcatcctggcgagtccgcaatcagcgcctggaaatctagacaactcaaagtccggtgaaatcaagggaaacggcagtggcggatccagggagaatagtacagtggacttcagtaaggtggacatgaatttcatgaggaaaattccaactggggcggaggcatcaaacgtgctcgttggggaggtggattttctggaacgacccataattgctttcgtacgcctcgccccagcggtgctcttgacaggcctcaccgaagtccctgtgccaaccagattcctatttctgctgctaggacccgcaggtaaagctccccagtaccacgaaatcggaagaagtatcgccacactgatgactgatgagatcttccatgacgtggcctacaaagccaaagatagaaatgatctgttatcggggatcgatgaatttctggatcaggtgactgttctgcctccaggtgagtgggacccatccatacggatcgagcccccaaagtccgtaccctcacaggagaaacgcaagatccctgtgtttcacaatgggagcactccgactttgggcgagacacctaaggaggcagcccatcacgccggccccgagctgcagcgcactggcagggtccaatag

SEQ ID NO: 279664 - DNA, 1392 bp, Artificial Sequence
  derived and/or modified sequence
atggaggccgacggcgccggcgagcagatgcggcccctgctgaccagggggccggacgaggaggccgttgtggaccttggaaaaaccagctccactgtaaataccaaattcgagaaggaagaactggagagccaccgcgccgtatacattggagtgcatgtgcctttctcaaaagaatcaagacgtagacaccgacataggggtcacaaacaccaccatagacgcagaaaggataaagagtcggataaagaggatggccgcgagtctcccagctacgatacccccagtcagcgagtgcagtttatcctcggaacggaagatgacgatgaggaacatattccccatgatctgtttaccgaaatggatgagctgtgttatagggacggcgaggagtacgagtggaaagaaacagccagatggctcaaattcgaagaggacgtggaggatgggggcgatcgctggagcaagccttacgtggccacgctgagtctgcacagcctgtttgagctccgctcttgcattctgaacggcacagtgatgctggacatgcgcgcatccaccctggatgaaatcgctgatatggtgttagacaacatgatcgcgagtgggcagctcgacgagtcgatccgcgaaaacgttagggaggctcttctgaaaagacaccaccaccaaaacgagaaacgctttactagccggatcccgctcgtcaggagcttcgccgatattggaaagaaacacagcgacccccatttgctggaaagaaatggcatcctggcctccccacagtccgcgcctgggaaccttgataattcaaagtctggagaaattaaaggcaatggctccggcggatcacgggagaattcaactgtcgatttcagtaaggtggacatgaatttcatgcggaaaatcccgaccggagccgaggcatctaatgtgttggttggcgaggtcgatttcttagaaagaccaataatcgctttcgtccgactggcgccagccgtgctcctcactggcctcactgaggttccagtaccaacccggtttctcttcctgcttctgggaccagctggcaaggctccgcagtatcacgaaatcggaaggagtatcgcaactctgatgactgacgagattttccacgacgtcgcctacaaggcaaaggacagaaacgatctcctatcgggaattgatgagtttctggatcaggtgaccgtgcttccccccggtgagtgggacccgagtattcgcatcgaacccccaaagtccgttccaagccaggagaaaagaaagattccagtatttcataatggatccacacccacccttggagagactcccaaagaggccgctcaccacgcgggcccagagttacaacgcactggaagagtgcagtag

SEQ ID NO: 279665 - DNA, 3288 bp, Artificial Sequence
  derived and/or modified sequence
atggaggccgatggcgcaggggagcagatgagaccacttctgaccaggggcccagacgaggaggccgtcgtcgatttgggaaaaacctcgagcactgtgaacacaaagtttgagaaagaggaacttgagagccatcgcgctgtgtatatcggagttcatgtccccttttcaaaagagtcgcggaggcggcacaggcacaggggccataagcaccaccacaggagacgaaaagacaaagagtctgataaggaggacgggagagagtctccttcctacgacaccccaagtcagcgagtgcagttcattctggggacagaagacgacgacgaagagcatatcccacatgacctattcacagagatggatgagctttgttacagagacggcgaagaatacgagtggaaggagacagccaggtggcttaagtttgaggaggacgtggaggatggcggtgatcggtggagtaaaccttatgtggctactctgtcactgcactccctgttcgagctgaggagttgcatcttaaatggaaccgtgatgctggatatgcgcgcttctacactggacgaaatagctgacatggtgctcgataatatgatcgcctccggtcagctggacgagtctatcagggagaatgttagagaggcccttctcaagcgccaccatcatcagaatgagaagaggtttacaagtcgcatcccactagttagaagttttgcagatatcgggaaaaaacattccgatccacacttattggaacggaacggaattctcgcatcaccgcagtccgcacccggaaacttggacaattccaagagcggggaaatcaagggcaacgggagcggcggttccagggagaatagtacagtcgatttctcgaaagttgatatgaatttcatgcggaaaattccaacaggcgctgaggcttccaatgtgctggtgggcgaggtcgattttctggagagaccaatcattgcctttgtgcgtctggctcctgctgttctgctcaccgggctgaccgaagtcccagttcctacgcgtttcctcttcctgctcctgggccctgctgggaaggcaccccagtatcacgagattggcagaagcattgccactttaatgactgatgaaattttccacgacgtggcatacaaagccaaagaccgcaatgatctgctctccggcattgacgagtttcttgaccaggtgacagtcctgcccccaggggagtgggaccctagcattaggatcgagccccctaagagtgtgccgtcccaagaaaaacgaaaaatcccggtattccataacggctctacaccgaccttgggagagacacctaaagaagctgcccaccacgccggacctgaactgcaacgcaccgggagattgttcgggggtttgattcttgacatcaagcgcaaagcgccatttttcttatccgacttcaaagatgccctgtcactgcaatgcctggccagcatattgttcttgtactgtgcctgtatgtctcccgtgatcacattcggtggccttcttggcgaggctaccgagggtcggatatccgctattgagagcctgttcggcgcatccctgactggaatcgcgtactctctctttgccggacagccacttacaatcttggggtccactggacctgtgttagtttttgagaagattctttataaattctgccgggactaccagctgagctatttgagtttacggacttccattgggctttggacttccttcttgtgcatcgtgctcgtagcaacggatgcctcttccctcgtctgctacatcacaaggttcaccgaggaagcatttgccgcactgatttgcatcatcttcatctacgaagccctggaaaaactcttcgatctgggcgagacatacgcgttcaacatgcacaataatctcgacaaactcactagctacagctgcgtgtgcaccgaacctcctaatcctagtaatgaaaccctcgcccaatggaagaaggacaatatcacggcccacaatatctcatggcgcaatctgaccgtctctgaatgtaagaaactgagaggggtgtttctgggctcagcatgtggacatcacgggccttatatccctgatgtcctcttctggtgcgtgatactgttttttactacttttttcttgtcatcattcctcaagcagttcaagaccaagcgatattttcccaccaaggttcggagcacaattagcgattttgcagtgttcctgacaattgtaatcatggtgaccatagactacctggtcggtgtcccctcccctaagctccacgtaccagaaaaatttgagcccacccatcccgagcgtggctggattatctcccccttgggagataatccttggtggacactcctgatcgccgcaattcccgcattactgtgcacaatcctgattttcatggatcagcagatcactgccgtcatcattaaccgaaaggagcacaagctgaaaaagggagctgggtaccacctagacctccttatggtgggcgtgatgctgggggtttgtagcgtaatgggccttccttggttcgtggcagccactgtacttagcatctctcatgttaactccctgaaggtcgagtccgagtgtagcgccccaggggagcaacctaaatttctgggcatacgggaacaacgagtcaccggcctcatgatcttcattctcatgggcttatccgtctttatgacatctgtgctgaagtttatccctatgcccgtgctgtatggtgtcttcctctacatgggcgtgtcatctctgaagggcatccaactattcgacagaattaagctctttggtatgccggctaaacaccagcccgacttgatctatcttcgatatgtgccactttggaaggtccatattttcaccgtgattcagcttacctgcctggttctgctttgggttattaaagtcagcgccgcagcagtcgttttcccaatgatggtcttggcgctggtattcgtccggaaactgatggacctgtgctttacgaaacgtgagctttcatggctcgacgatctcatgccggagtcaaaaaagaagaaggaagatgacaagaaaaagaaggagaaagaagaagcggaacgtatgttgcaggacgacgatgacacagtccatttaccatttgaaggtggatctttgttgcaaattccagtaaaggctctcaagtacagtccggacaaacccgtgagtgttaagattagttttgaggatgaaccaagaaagaagtacgtagacgctgaaacctcactttag

SEQ ID NO: 279666 - DNA, 1392 bp, Artificial Sequence
  derived and/or modified sequence
atggaggcagatggggcaggcgagcagatgcggcctttactgacgcgcggaccggatgaggaggcagtggtcgacctgggcaaaaccagttcaactgtgaacaccaagtttgaaaaagaggagctggaaagtcaccgtgccgtgtacatcggtgttcatgtgccttttagtaaagagagtcgcaggcgccaccggcatagaggacataagcaccaccacagaaggaggaaagacaaggagtctgataaggaggacggacgagaaagcccttcctacgacaccccttcacagcgagttcaatttattctcggaaccgaagatgacgacgaggagcacattcctcacgacttgttcaccgagatggacgagctgtgctacagagacggcgaagaatacgagtggaaggagactgccaggtggctcaaattcgaggaggacgtcgaggatggtggagacaggtggagtaaaccatatgtggcgacactcagcctacactcactctttgagctccgctcttgcatcctcaacggcaccgtaatgttggacatgagggcatcaaccctggacgaaatcgctgatatggtgcttgacaatatgattgcctctggtcagctggatgagtcaatccgcgagaacgttagggaagctctgctgaagcgccaccatcaccagaacgaaaagaggttcacttcacggattcctcttgtccggtccttcgccgacataggcaagaagcattcagatccccacctgcttgaacgcaatggcatcctcgcttccccgcagtccgcaccaggaaatctggacaactcaaagtccggggagatcaaaggaaacggatccggtggatctagagagaactccactgtagacttttctaaggtggatatgaatttcatgcgaaagattcccacaggcgctgaggcctccaatgtgcttgtgggagaggtggatttcctggagaggcccataatagcatttgtgagacttgccccagcagtgctcctgacagggttgaccgaggtccctgtgcctacccgtttccttttcctgctgctgggccctgctggcaaggcccctcaataccacgagataggtaggtcaattgcgacactcatgacagatgagatctttcacgatgttgcctacaaggctaaagataggaatgacctgctttcagggatcgacgaatttttggatcaagtcacggtcctcccccctggcgagtgggaccccagcatccggatcgaaccgcctaagagcgttccttcacaggagaaaaggaaaatacctgtttttcacaacggttctacaccaaccctgggcgaaaccccgaaagaggccgcacaccacgctgggcctgaattgcagcgcacaggtcgggtgcagtag

SEQ ID NO: 279667 - DNA, 1392 bp, Artificial Sequence
  derived and/or modified sequence
atggaagccgatggcgcaggagagcagatgaggcctctcttgactcgcggtcccgacgaagaggctgtggtcgatctgggaaaaacatctagcactgtcaatacgaagttcgaaaaagaggagctggagtcccatagggccgtgtacatcggcgtgcacgtgccctttagtaaagagtctcggagaagacatagacacaggggacataagcaccaccacagacgtagaaaagacaaagaaagcgataaggaagatggcagggaatccccttcctacgataccccctcgcagcgcgtgcagttcattctggggaccgaggatgacgatgaagagcatatccctcatgatctattcacagaaatggatgaactttgttaccgcgacggagaagaatatgagtggaaagagacagctagatggcttaaatttgaagaggatgtggaagatggtggcgatcggtggtctaagccttacgtggcgacactcagcctccatagcctgtttgagttaaggtcatgtatactgaacggtaccgtcatgctggacatgcgagccagcacacttgatgaaatcgctgatatggtcctcgacaatatgattgctagcggccagctcgatgaaagcatccgggagaatgtacgggaagccctcctcaagcgccaccaccaccagaacgagaagcggttcacgagccgaatcccacttgtaaggtcttttgccgacatagggaaaaaacacagcgacccccatttattggaacgaaacggcatcttggccagtccacagtccgctcccggaaacctggacaactctaaatccggggagataaaagggaacgggagcggcggatcacgggagaacagcacagtggacttctcaaaggtggatatgaatttcatgcggaaaataccaaccggggctgaagctagcaatgttctggttggcgaagttgatttcctggaaagaccaatcatcgcattcgtccgactggcccctgccgtgctcttaaccggcttgactgaggtgcctgtacctacgcggttcctgttcctgcttctcgggcctgccggaaaagctcctcaataccacgagattggtcggtccatcgctactctcatgactgacgaaatctttcatgatgtggcctataaagccaaggataggaacgacctgcttagtggaatcgatgaatttctggatcaagttactgttctccccccaggtgagtgggatccttcaattcgtatcgaaccaccgaagtctgtgcccagccaggagaaaagaaaaattcctgtgtttcataacgggtccacgcctactttgggtgaaaccccgaaggaagccgctcaccatgcgggtcccgagctacagagaacgggacgtgtgcaatag

SEQ ID NO: 279668 - DNA, 3667 bp, Artificial Sequence
  derived and/or modified sequence
cctactaaagccagcccagcagtcgcagcgcgcacacgcacgccccgcgtctcccgcgcccggcgcccggctctccccacgcgcgcacacctcgcgcacggacgcacccacgtttgtcctcgcgcgccgggggctcggcggcggcggcaggggcagcggcagaagcaggcagaccgcgcggggcagtaccgtagcggccgtcacgggctggccggccggccatggaggctgatggggccggcgagcagatgagaccgctactcacccggggtcctgatgaagaagctgttgtggatcttggcaaaactagctcaactgtgaacaccaagtttgaaaaagaagaactagaaagtcatagagctgtatatattggtgttcacgtcccgtttagtaaagagagtcgtcggcgtcataggcatcgcggacacaaacatcaccaccggagaagaaaagataaagaatcagataaagaagatggacgggaatctccttcttatgatacaccatcccagagagttcagtttatccttggtactgaagatgatgatgaagaacatattccccatgatctcttcacggaaatggatgaactgtgttacagagatggagaagaatatgaatggaaagaaactgctagatggctgaaatttgaagaggatgttgaagatggcggtgaccgatggagtaaaccttatgtggcaactctctctttgcacagtctttttgaactaaggagttgcatcctcaatggaacagtcatgctggatatgagagcaagcactctagatgaaatagcagatatggtattagacaacatgatagcttctggccaattagacgagtccatacgagagaatgtcagagaagctcttctgaagagacatcatcatcagaatgagaaaagattcaccagtcggattcctcttgttcgatcttttgcagatataggcaagaaacattctgaccctcacttgcttgaaaggaatggtattttggcctctccccagtctgctcctggaaacttggacaatagtaaaagtggagaaattaaaggtaatggaagtggtggaagcagagaaaatagtactgttgacttcagcaaggttgatatgaatttcatgagaaaaattcctacgggtgctgaggcatccaacgtcctggtgggcgaagtagactttttggaaaggccaataattgcatttgtgagactggctcctgctgtcctccttacagggttgactgaggtccctgttccaaccaggtttttgtttttgttattgggtccagcgggcaaggcaccacagtaccatgaaattggacgatcaatagccactctcatgacagatgagattttccatgatgtagcttataaagcaaaagacagaaatgacctcttatctggaattgatgaatttttagatcaagtaactgtcctacctccaggagagtgggatccttctatacgcatagaaccaccaaaaagtgtcccttctcaggaaaagagaaagattcctgtgtttcacaatggatctacccccacactgggtgagactcctaaagaggccgctcatcatgctgggcctgagctacagaggactggacggctttttggtggtttgatacttgacatcaaaaggaaagcaccttttttcttgagtgacttcaaggatgcattaagcctgcagtgcctggcctcgattcttttcctatactgtgcctgtatgtctcctgtaatcacttttggagggctgcttggagaagctacagaaggcagaataagtgcaatagagtctctttttggagcatcattaactgggattgcctattcattgtttgctgggcaacctctaacaatattggggagcacaggtccagttctagtgtttgaaaaaattttatataaattctgcagagattatcaactttcttatctgtctttaagaaccagtattggtctgtggacttcttttttgtgcattgttttggttgcaacagatgcaagcagccttgtgtgttatattactcgatttacagaagaggcttttgcagcccttatttgcatcatattcatctacgaggctttggagaagctctttgatttaggagaaacatatgcatttaatatgcacaacaacttagataaactgaccagctactcatgtgtatgtactgaacctccaaaccccagcaatgaaactctagcacaatggaagaaagataatataacagcacacaatatttcctggagaaatcttactgtttctgaatgtaaaaaacttcgtggtgtattcttggggtcagcttgtggtcatcatggaccttatattccagatgtgctcttttggtgtgtcatcttgtttttcacaacattttttctgtcttcattcctcaagcaatttaagaccaagcgttactttcctaccaaggtgcgatcgacaatcagtgattttgctgtatttctcacaatagtaataatggttacaattgactaccttgtaggagttccatctcctaaacttcatgttcctgaaaaatttgagcctactcatccagagagagggtggatcataagcccactgggagataatccttggtggaccttattaatagctgctattcctgctttgctttgtaccattctcatctttatggatcaacaaatcacagctgtaattataaacagaaaggaacacaaattgaagaaaggagctggctatcaccttgatttgctcatggttggcgttatgttgggagtttgctctgtcatgggacttccatggtttgtggctgcaacagtgttgtcaataagtcatgtcaacagcttaaaagttgaatctgaatgttctgctccaggggaacaacccaagtttttgggaattcgtgaacagcgggttacagggctaatgatttttattctaatgggcctctctgtgttcatgacttcagtcctaaagtttattccaatgcctgttctgtatggtgttttcctttatatgggagtttcctcattaaaaggaatccagttatttgaccgtataaaattatttggaatgcctgctaagcatcagcctgatttgatatacctccgttatgtgccgctctggaaggtccatattttcacagtcattcagcttacttgtttggtccttttatgggtgataaaagtttcagctgctgcagtggtttttcccatgatggttcttgcattagtgtttgtgcgcaaactcatggacctgtgtttcacgaagagagaacttagttggcttgatgatcttatgccagaaagtaagaaaaagaaagaagatgacaaaaagaaaaaagagaaagaggaagctgaacggatgcttcaagatgatgatgatactgtgcaccttccatttgaagggggaagtctcttgcaaattccagtcaaggccctaaaatatagtcctgataaacctgtgagtgtgaaaataagttttgaagatgaaccaagaaagaaatacgtggatgctgaaacttcattatagaattgaaccaagaggcattatacatatagatatatacatatgtaatgtgtgcgtatcatgtcactatatataagaatattgtatgtcatgctgtttatgtgtgactaccgggtttttaaaagtagtgtctggagtttgtaatgagcaccgtggagact

SEQ ID NO: 279669 - protein, 1758 aa, Artificial Sequence
  derived and/or modified sequence
METRSSKTRRSLASRTNECQGTMWAPTSPPAGSSSPSQPTWKSSLYSSLAYSEAFHYSFAARPRRLTQLALAQRPEPQLLRLRPSSLRTQDISHLLTGVFRNLYSAEVIGDEVSASLIKARGSENERHEEFVDQLQQIRELYKQRLDEFEMLERHITQAQARAIAENERVMSQAGVQDLESLVRLPPVKSVSRWCIDSELLRKHHLISPEDYYTDTVPFHSAPKGISLPGCSKLTFSCEKRSVQKKELNKKLEDSCRKKLAEFEDELDHTVDSLTWNLTPKAKERTREPLKKASQPRNKNWMNHLRVPQRELDRLLLARMESRNHFLKNPRFFPPNTRYGGKSLVFPPKKPAPIGEFQSTEPEQSCADTPVFLAKPPIGFFTDYEIGPVYEMVIALQNTTTTSRYLRVLPPSTPYFALGLGMFPGKGGMVAPGMTCQYIVQFFPDCLGDFDDFILVETQSAHTLLIPLQARRPPPVLTLSPVLDCGYCLIGGVKMTRFICKNVGFSVGRFCIMPKTSWPPLSFKAIATVGFVEQPPFGILPSVFELAPGHAILVEVLFSPKSLGKAEQTFIIMCDNCQIKELVTIGIGQLIALDLIYISGEKSQPDPGELTDLTAQHFIRFEPENLRSTARKQLIIRNATHVELAFYWQIMKPNLQPLMPGETFSMDSIKCYPDKETAFSIMPRKGVLSPHTDHEFILSFSPHELRDFHSVLQMVLEEVPEPVSSEAESLGHSSYSVDDVIVLEIEVKGSVEPFQVLLEPYALIIPGENYIGINVKKAFKMWNNSKSPIRYLWGKISDCHIIEVEPGTGVIEPSEVGDFELNFTGGVPGPTSQDLLCEIEDSPSPVVLHIEAVFKGPALIINVSALQFGLLRLGQKATNSIQIRNVSQLPATWRMKESPVSLQERPEDVSPFDIEPSSGQLHSLGECRVDITLEALHCQHLETVLELEVENGAWSYLPVYAEVQKPHVYLQSSQVEVRNLYLGVPTKTTITLINGTLLPTQFHWGKLLGHQAEFCMVTVSPKHGLLGPSEECQLKLELTAHTQEELTHLALPCHVSGMKKPLVLGISGKPQGLQVAITISKESSDCSVFSTEQWPGHPKELRLDFGSAVPLRTRVTRQLILTNRSPIRTRFSLKFEYFGSPQNSLSKKTSLPNMPPALLKTVRMQEHLAKREQLDFMESMLSHGKGAAFFPHFSQGMLGPYQQLCIDITGCANMWGEYWDNLICTVGDLLPEVIPVHMAAVGCPISSLRTTSYTIDQAQKEPAMRFGTQVSGGDTVTRTLRLNNSSPCDIRLDWETYVPEDKEDRLVELLVFYGPPFPLRDQAGNELVCPDTPEGGCLLWSPGPSSSSEFSHETDSSVEGSSSASNRVAQKLISVILQAHEGVPSGHLYCISPKQVVVPAGGSSTIYISFTPMVLSPEILHKVECTGYALGFMSLDSKVEREIPGKRHRLQDFAVGPLKLDLHSYVRPAQLSVELDYGGSMEFQCQASDLIPEQPCSGVLSELVTTHHLKLTNTTEIPHYFRLMVSRPFSVSQDGASQDHRAPGPGQKQECEEETASADKQLVLQAQENMLVNVSFSLSLELLSYQKLPADQTLPGVDIQQSASGEREMVFTQNLLLEYTNQTTQVVPLRAVVAVPELQLSTSWVDFGTCFVSQQRVREVYLMNLSGCRSYWTMLMGQQEPAKAAVAFRVSPNSGLLEARSANAPPTSIALQVFFTARSSELYESTMVVEGVLGEKSCTLRLRGQGSYDERYMLPHQP

SEQ ID NO: 279670 - DNA, 5277 bp, Artificial Sequence
  derived and/or modified sequence
atggagaccagaagcagcaagaccagaagaagcctggccagcagaaccaacgagtgccagggcaccatgtgggcccccaccagcccccccgccggcagcagcagccccagccagcccacctggaagagcagcctgtacagcagcctggcctacagcgaggccttccactacagcttcgccgccagacccagaagactgacccagctggccctggcccagagacccgagccccagctgctgagactgagacccagcagcctgagaacccaggacatcagccacctgctgaccggcgtgttcagaaacctgtacagcgccgaggtgatcggcgacgaggtgagcgccagcctgatcaaggccagaggcagcgagaacgagagacacgaggagttcgtggaccagctgcagcagatcagagagctgtacaagcagagactggacgagttcgagatgctggagagacacatcacccaggcccaggccagagccatcgccgagaacgagagagtgatgagccaggccggcgtgcaggacctggagagcctggtgagactgccccccgtgaagagcgtgagcagatggtgcatcgacagcgagctgctgagaaagcaccacctgatcagccccgaggactactacaccgacaccgtgcccttccacagcgcccccaagggcatcagcctgcccggctgcagcaagctgaccttcagctgcgagaagagaagcgtgcagaagaaggagctgaacaagaagctggaggacagctgcagaaagaagctggccgagttcgaggacgagctggaccacaccgtggacagcctgacctggaacctgacccccaaggccaaggagagaaccagagagcccctgaagaaggccagccagcccagaaacaagaactggatgaaccacctgagagtgccccagagagagctggacagactgctgctggccagaatggagagcagaaaccacttcctgaagaaccccagattcttcccccccaacaccagatacggcggcaagagcctggtgttcccccccaagaagcccgcccccatcggcgagttccagagcaccgagcccgagcagagctgcgccgacacccccgtgttcctggccaagccccccatcggcttcttcaccgactacgagatcggccccgtgtacgagatggtgatcgccctgcagaacaccaccaccaccagcagatacctgagagtgctgccccccagcaccccctacttcgccctgggcctgggcatgttccccggcaagggcggcatggtggcccccggcatgacctgccagtacatcgtgcagttcttccccgactgcctgggcgacttcgacgacttcatcctggtggagacccagagcgcccacaccctgctgatccccctgcaggccagaagacccccccccgtgctgaccctgagccccgtgctggactgcggctactgcctgatcggcggcgtgaagatgaccagattcatctgcaagaacgtgggcttcagcgtgggcagattctgcatcatgcccaagaccagctggccccccctgagcttcaaggccatcgccaccgtgggcttcgtggagcagccccccttcggcatcctgcccagcgtgttcgagctggcccccggccacgccatcctggtggaggtgctgttcagccccaagagcctgggcaaggccgagcagaccttcatcatcatgtgcgacaactgccagatcaaggagctggtgaccatcggcatcggccagctgatcgccctggacctgatctacatcagcggcgagaagagccagcccgaccccggcgagctgaccgacctgaccgcccagcacttcatcagattcgagcccgagaacctgagaagcaccgccagaaagcagctgatcatcagaaacgccacccacgtggagctggccttctactggcagatcatgaagcccaacctgcagcccctgatgcccggcgagaccttcagcatggacagcatcaagtgctaccccgacaaggagaccgccttcagcatcatgcccagaaagggcgtgctgagcccccacaccgaccacgagttcatcctgagcttcagcccccacgagctgagagacttccacagcgtgctgcagatggtgctggaggaggtgcccgagcccgtgagcagcgaggccgagagcctgggccacagcagctacagcgtggacgacgtgatcgtgctggagatcgaggtgaagggcagcgtggagcccttccaggtgctgctggagccctacgccctgatcatccccggcgagaactacatcggcatcaacgtgaagaaggccttcaagatgtggaacaacagcaagagccccatcagatacctgtggggcaagatcagcgactgccacatcatcgaggtggagcccggcaccggcgtgatcgagcccagcgaggtgggcgacttcgagctgaacttcaccggcggcgtgcccggccccaccagccaggacctgctgtgcgagatcgaggacagccccagccccgtggtgctgcacatcgaggccgtgttcaagggccccgccctgatcatcaacgtgagcgccctgcagttcggcctgctgagactgggccagaaggccaccaacagcatccagatcagaaacgtgagccagctgcccgccacctggagaatgaaggagagccccgtgagcctgcaggagagacccgaggacgtgagccccttcgacatcgagcccagcagcggccagctgcacagcctgggcgagtgcagagtggacatcaccctggaggccctgcactgccagcacctggagaccgtgctggagctggaggtggagaacggcgcctggagctacctgcccgtgtacgccgaggtgcagaagccccacgtgtacctgcagagcagccaggtggaggtgagaaacctgtacctgggcgtgcccaccaagaccaccatcaccctgatcaacggcaccctgctgcccacccagttccactggggcaagctgctgggccaccaggccgagttctgcatggtgaccgtgagccccaagcacggcctgctgggccccagcgaggagtgccagctgaagctggagctgaccgcccacacccaggaggagctgacccacctggccctgccctgccacgtgagcggcatgaagaagcccctggtgctgggcatcagcggcaagccccagggcctgcaggtggccatcaccatcagcaaggagagcagcgactgcagcgtgttcagcaccgagcagtggcccggccaccccaaggagctgagactggacttcggcagcgccgtgcccctgagaaccagagtgaccagacagctgatcctgaccaacagaagccccatcagaaccagattcagcctgaagttcgagtacttcggcagcccccagaacagcctgagcaagaagaccagcctgcccaacatgccccccgccctgctgaagaccgtgagaatgcaggagcacctggccaagagagagcagctggacttcatggagagcatgctgagccacggcaagggcgccgccttcttcccccacttcagccagggcatgctgggcccctaccagcagctgtgcatcgacatcaccggctgcgccaacatgtggggcgagtactgggacaacctgatctgcaccgtgggcgacctgctgcccgaggtgatccccgtgcacatggccgccgtgggctgccccatcagcagcctgagaaccaccagctacaccatcgaccaggcccagaaggagcccgccatgagattcggcacccaggtgagcggcggcgacaccgtgaccagaaccctgagactgaacaacagcagcccctgcgacatcagactggactgggagacctacgtgcccgaggacaaggaggacagactggtggagctgctggtgttctacggcccccccttccccctgagagaccaggccggcaacgagctggtgtgccccgacacccccgagggcggctgcctgctgtggagccccggccccagcagcagcagcgagttcagccacgagaccgacagcagcgtggagggcagcagcagcgccagcaacagagtggcccagaagctgatcagcgtgatcctgcaggcccacgagggcgtgcccagcggccacctgtactgcatcagccccaagcaggtggtggtgcccgccggcggcagcagcaccatctacatcagcttcacccccatggtgctgagccccgagatcctgcacaaggtggagtgcaccggctacgccctgggcttcatgagcctggacagcaaggtggagagagagatccccggcaagagacacagactgcaggacttcgccgtgggccccctgaagctggacctgcacagctacgtgagacccgcccagctgagcgtggagctggactacggcggcagcatggagttccagtgccaggccagcgacctgatccccgagcagccctgcagcggcgtgctgagcgagctggtgaccacccaccacctgaagctgaccaacaccaccgagatcccccactacttcagactgatggtgagcagacccttcagcgtgagccaggacggcgccagccaggaccacagagcccccggccccggccagaagcaggagtgcgaggaggagaccgccagcgccgacaagcagctggtgctgcaggcccaggagaacatgctggtgaacgtgagcttcagcctgagcctggagctgctgagctaccagaagctgcccgccgaccagaccctgcccggcgtggacatccagcagagcgccagcggcgagagagagatggtgttcacccagaacctgctgctggagtacaccaaccagaccacccaggtggtgcccctgagagccgtggtggccgtgcccgagctgcagctgagcaccagctgggtggacttcggcacctgcttcgtgagccagcagagagtgagagaggtgtacctgatgaacctgagcggctgcagaagctactggaccatgctgatgggccagcaggagcccgccaaggccgccgtggccttcagagtgagccccaacagcggcctgctggaggccagaagcgccaacgccccccccaccagcatcgccctgcaggtgttcttcaccgccagaagcagcgagctgtacgagagcaccatggtggtggagggcgtgctgggcgagaagagctgcaccctgagactgagaggccagggcagctacgacgagagatacatgctgccccaccagccctag

SEQ ID NO: 279671 - DNA, 5624 bp, Artificial Sequence
  derived and/or modified sequence
gttagcggcgtctcggttgccatggagaccaggagctccaaaacgcggaggtctttagcgtcccggaccaacgagtgccaggggacaatgtgggcgccaacttcgccaccagccgggtccagcagccccagccagcccacctggaagtcctccttgtattcctccctcgcctactctgaggccttccactacagcttcgcagcccggccccgccgcctcacgcagcttgcgctggcgcagcgtcccgagcctcagctgcttcgtctgcgcccctcctcgctgcgcacccaagatatctcgcacttgctcaccggcgtcttccgcaacttgtactcagccgaggtcatcggcgacgaagtgagcgcaagcttgatcaaggcccgcggcagcgagaatgagcgccacgaggagttcgtggaccagctgcagcagattcgggagctctataagcagcggctggatgagtttgaaatgttggagagacatatcactcaggcccaagcacgggctattgcggaaaatgagcgggtcatgagccaggctggagtacaggacctcgagagccttgtcaggttgcctccagtgaagagtgtctccagatggtgtatagacagcgagttgctacggaaacatcatttgatctccccagaagattactacaccgatacagtgccgtttcactctgcacctaaaggcatctccctacctggatgttcaaaactgacatttagctgtgagaagcgttccgtccagaagaaagagctgaacaagaagcttgaagattcatgcaggaagaagcttgctgagttcgaagatgagttagaccacactgtggacagcctgacatggaatttaactcctaaggccaaagaaaggaccagagaacctctcaagaaagcaagtcaaccaaggaataaaaactggatgaaccacttacgtgtgccacagagagagctagacagacttctgcttgccagaatggagagtcggaaccacttcctaaaaaatccccgtttttttcctcctaacactcgatatggaggcaagtctcttgtttttcctccaaagaagccagcaccgataggagaattccagagtacagagccagaacagagttgtgctgatactccagtgtttctagctaagccaccaattgggtttttcacagattatgaaattggtccagtttatgagatggtaattgcgctgcagaacaccaccacgaccagccgctacctgcgagtcctcccgccttccacgccatacttcgctctgggactggggatgttcccaggaaaaggtggaatggtggctcctggaatgacctgccagtacattgtccagttttttcccgactgccttggggattttgatgattttattttagtggagacccagtcagcccacacacttctgatccccctgcaggcccggaggccgccccccgtgctgacattgtcaccggtgttggactgtggttactgcctcattgggggagtcaagatgaccagattcatctgcaaaaatgtgggtttcagtgttggcaggttctgcattatgcccaaaacaagctggccaccactaagtttcaaggccattgcaaccgtcggctttgttgaacaacctccttttggaatcctgccttcggtgtttgagctggccccgggacatgctatattagtggaggtcttgttttccccaaagagcctaggaaaggcagagcagaccttcatcatcatgtgcgacaactgccagataaaggagctggtgaccataggaattgggcagctgattgctttggatctgatctatatttctggtgaaaaaagccagccagaccctggagagctcacagacttaacagcccagcacttcatacgatttgagcctgaaaaccttcggtccacggctaggaagcagctgattattagaaatgctacgcacgtggagctggccttctactggcagatcatgaagcccaacctgcagcccctcatgcctggagaaaccttcagcatggacagcatcaagtgctaccccgacaaggagactgccttctccatcatgcccagaaagggggttctaagcccccacacagaccacgagttcatcctgagcttttctcctcatgagctgagggattttcacagtgtgctccagatggtgctagaggaagtcccagagcctgtaagttcagaagcggagagcctggggcactcctcctactctgtggatgatgtgattgtcctggaaatcgaggtgaaaggctcagtagaacctttccaggttctcttagagccatatgccctcatcatcccaggggagaactacattgggataaatgtgaagaaggcttttaagatgtggaacaacagcaagtcacccatcagatacctgtgggggaagatcagcgactgccacatcattgaagtggagcccggcacaggggtcatagagcccagtgaggtcggggattttgagttgaactttactgggggtgtccctggccccacaagccaggacctgctgtgtgaaatcgaagactcgccctcgccagtggtgttacacattgaggctgtctttaaggggcctgccctcatcatcaacgtctcagcccttcagtttggtctgctccgcctggggcagaaagccacaaactccatccagatccggaacgtcagccagctcccagccacatggcgcatgaaggagagcccagtctccctccaggaaaggcctgaggatgtgtctcccttcgacattgagccttcgagtggccagcttcactctctgggggagtgcagggtggacatcaccttggaggccctgcactgccagcatctggagaccgtcctggagctggaggtggaaaatggtgcctggagctaccttcctgtgtatgctgaggtacagaagccccatgtgtacctacagagcagccaggtggaggttagaaatctctacctgggtgtgcccacgaagacaaccatcacacttatcaatggcacgctcctgcctacccagttccactggggcaagctcctcggacaccaagcagaattctgcatggtgacagtctcccccaaacatggcctgctgggcccaagtgaggagtgccagctcaagttggagttgactgctcatacccaggaagagctgacccatctggccctcccttgtcacgtgtcaggcatgaagaagccactggttctaggcatttctgggaagccccagggactgcaagtggccattaccatctctaaggagagctctgattgcagtgttttcagcacagagcagtggccaggccacccaaaggagctccgcctggactttggctcagcggtgccactgaggacccgtgtgactcgccagctcattctcaccaatcgctccccaatacggacccgtttctccctcaagtttgagtatttcgggagcccccaaaacagcctgagcaaaaagaccagccttcccaacatgcctcctgccctgctaaagacagtgcggatgcaagagcacctggccaagcgagagcagctggattttatggagagcatgctatcccacgggaaaggagctgctttcttccctcacttttcccagggcatgctggggccctaccagcagctgtgcattgacatcacaggctgtgccaacatgtggggcgagtactgggacaacctcatctgcacggtgggagacctgctgccggaagtcatcccagtgcacatggcagcggtgggctgccccatcagctccctgaggaccacctcctacactattgaccaggcccagaaggaaccagccatgaggttcggcacccaggtctccggaggagacacagttacccgaacccttcgcctgaataactccagcccctgtgacatccgcctggattgggagacctatgttccagaagacaaggaagaccggctggtggagctgctggtgttttatgggccacctttcccgctgcgggaccaagccgggaatgagcttgtgtgccctgatacccctgagggtggctgcctcctctggtccccaggcccctccagttcatcggaattcagccatgaaactgactcatcagttgagggcagctccagtgccagcaatagggtggcacagaagctcatctcagtcatcctgcaggcacatgagggggtgccctccggccacctgtactgtatcagccccaagcaggtggtggtccctgctgggggcagcagtaccatctacatctccttcacccctatggtgctcagccctgagatcctgcacaaggtggagtgtactggctacgccctgggtttcatgagcttggacagcaaggtggaaagggagattccagggaagaggcatcgcctgcaggactttgcggtgggacccctgaaactggacctgcatagctacgtgaggcctgcacagctaagtgtggagctggactacggcggcagtatggaattccagtgccaggccagtgacctcattcccgagcagccctgctctggggtgctgagtgagctggtgaccacccaccacctgaagctgaccaacactacagagatcccacactacttccggcttatggtctccaggcccttctccgtttctcaagatggggcgagccaggaccacagagctcctggccctggccagaagcaggagtgtgaggaggagacagcctcagcggacaagcagctggtgctccaagcacaggagaacatgctggtgaacgtgtccttctcactctccctggagctgctctcctatcagaagctcccagctgaccagacactgcctggggtggacattcagcagagtgcgagtggagagagagagatggtgtttactcagaacctgctcctggagtacaccaaccagaccactcaggtggtgcccctgcgggctgtggtggccgtgcctgagctgcagctctccaccagctgggtggactttgggacctgctttgtgagccagcagcgagtccgggaggtctacctgatgaacctgagcgggtgccgaagctactggactatgctgatgggccagcaggagccagccaaggccgctgtggccttcagggtctccccaaacagtgggctgctagaagcacgatccgccaatgcacccccaacctccatcgccttgcaggttttcttcactgccaggagtagtgagctgtacgagtccacgatggtggtggaaggtgtgctcggtgagaagtcctgcaccctgcggctccggggccaaggctcctatgatgagagatacatgttgcctcaccagccctgaggctccgccccagccctcagccccaggccccagctggagaaaaaacattgcccagggattaggagcagctcttcagcacaaagacacagacttggggacctggggacctctgggcagctcctggaatggaagaacccccttccacaatggtctcagcctaggccctcatgatatgtcctcagagctaacataaaggacaggccacaccacagcagagaccaccacattgagatcactactcagtgcatagcgaagaccagtatggcaaaattagtcttggaaaaaaaccacagccactaagataaattcatgcacttttactatgc

SEQ ID NO: 279672 - DNA, 5277 bp, Artificial Sequence
  derived and/or modified sequence
atggagacacggtctagcaaaacccggagaagtctggcctccagaaccaacgagtgccagggtacaatgtgggcgccaacttcccccccagcaggttcatcctcccccagccaacctacttggaaaagttctctctacagcagtcttgcttactcagaggcttttcattatagtttcgccgcaagacctcgccggttaacccaattagccctggcacagcggcccgaaccacagcttctccggttgcggccctcatccctgagaacacaggacatttcccatctgctcacgggcgtgttcaggaacctgtacagcgcagaggttattggtgatgaagtgagtgcgtctctcattaaggccagggggagcgaaaacgagcgccacgaggaatttgtggaccagttgcagcagatacgcgagctttataaacagaggctggatgaatttgagatgctcgaaagacacattacccaggcacaggctagggccatcgctgagaacgagagggttatgtcacaggccggagtccaggatctggagtccttggtgcggctcccccctgtcaagtcagtgagtaggtggtgtatcgatagcgaacttctgaggaaacaccaccttatttcaccagaggactattatactgacacagttcctttccactctgcgccaaagggcatcagcctgcccggctgttcaaaattgacctttagttgcgaaaagagatctgtgcagaaaaaggagcttaataagaaattagaagatagttgccgcaagaagctggccgaattcgaagacgaactggaccataccgtggactccctgacctggaatcttaccccgaaagctaaagagcgcacacgagagccactcaagaaggcatcgcagccccgaaataagaactggatgaaccacttacgggtcccgcagcgcgagcttgacaggctgttgcttgcgcgcatggagagcaggaaccattttctcaagaatcccaggttctttcctccaaatacaagatatggagggaaatcactcgtgttccctcctaagaagccagcccctattggggagttccagtcaacggaacccgaacagtcttgcgctgatacacccgtcttccttgcaaaaccacctatcggctttttcaccgattatgagattggccccgtatacgagatggtaattgctttgcagaacacaactaccacctcacgctatttgagagtactcccaccaagtacgccctacttcgctctcgggttaggtatgtttccagggaagggagggatggtggctcctggcatgacttgtcagtatattgtccaattctttcctgactgccttggagattttgatgacttcatcctggtcgagactcagtctgctcataccttactgatccctctccaggcccggagaccgccaccagttttgaccttgagtccagtgctcgattgtggctactgtctcatcggtggcgtcaagatgacgcggttcatatgtaagaacgtgggattcagtgtcgggcgattttgcataatgcccaagacctcatggccacccctgagcttcaaagctatcgcaacggtgggatttgtcgagcagccgccctttggaatcctaccctccgtgttcgagttagcccctggacatgctatcctggtggaggtccttttttccccaaaatcactggggaaagcggagcagacattcataataatgtgcgataattgccagataaaagagctagtcacaattggcatcggtcagctcattgcgctcgacctgatttatatcagcggagaaaagtcccagccggacccaggtgagcttacagatctgaccgcccagcatttcatccggttcgagcctgagaacctgagatcaacagcccggaagcagctaatcattagaaatgctacccacgtggagctagccttttactggcagatcatgaagcccaatcttcagcctctaatgcctggcgagactttttcaatggattccataaagtgttatcccgataaggagacagcttttagtatcatgcctcggaaaggcgttctgtctccccatacagatcatgaatttattctgtctttcagcccccatgaactgcgcgatttccacagtgttttgcaaatggttctggaggaagttcccgagccggtcagttcggaggcagaatcgcttggtcactcatcgtactctgtggatgatgtcatcgtgctcgaaattgaagtgaagggaagtgtggagccattccaagtcctgttagaaccatacgcactgatcataccaggcgaaaattatattggcatcaatgtgaaaaaggcctttaagatgtggaacaactccaagagccccattaggtacttgtggggcaaaatttccgactgccacatcatcgaggtggagccgggtacaggcgtgatagagccctccgaggtgggagatttcgagctgaactttaccggtggagtgcctggtcctacaagccaagatctgttatgcgaaatagaggatagcccatcaccagtggtactgcatatcgaagccgtttttaagggccctgctttgatcataaatgtaagtgccctgcaattcgggctccttcgcctgggacaaaaggccactaactctatccagatccgcaatgtttctcaacttcccgccacttggaggatgaaggagtctccagtgtccctgcaggaacggcctgaggacgtgagtccatttgatatcgaacccagctctggacagctgcactcgctcggggaatgtagagtggacatcaccctggaggcactgcactgtcaacatctggaaaccgtccttgaactggaggttgagaacggtgcgtggtcatatctgcctgtgtacgccgaagtgcagaagccacatgtctatttgcagtcctcacaggtcgaagtgcgaaacctctacctcggggtccctacgaagaccaccataactctcatcaatggaaccttgctccctacgcagtttcattggggaaagctgctggggcaccaggctgagttctgtatggtgaccgtgagccccaaacacgggctccttggcccctcagaggagtgccagctgaaactcgaactcactgcgcatacgcaggaagagctgacacacttggccctcccttgtcatgtgtcaggcatgaaaaaacctctcgtgcttggcatcagcggcaaaccgcaggggttgcaggttgctataacaattagcaaggaatcaagcgattgctcagtgttctcaactgaacagtggcccgggcatccaaaggagttgcgactggacttcgggagcgctgtgcctctcagaacaagggtcacccgccagctcatactcactaatagatcccctatccgaacaagattctcactgaagtttgaatattttggctcaccgcagaatagcctatcaaagaagacctcattgcccaacatgcctcccgccctactaaagaccgttcggatgcaggagcatctggccaagagggagcagctcgattttatggaatcaatgttatcccacggcaaaggagctgcatttttcccacatttctctcagggcatgctcgggccataccagcagctatgtatcgatattaccggatgtgccaatatgtggggtgagtattgggataacctgatttgtactgtgggcgatttgttacctgaagtgatccctgtgcacatggcggccgtaggttgtcctatatctagcctgcgcacgacctcttataccatcgatcaggcgcagaaagaaccagcaatgcgttttggcacccaggtctcaggcggcgatacagttactaggacacttagactgaataacagttctccctgtgacattagactagattgggagacatatgtgccggaggacaaggaggaccgcctggtggaactcttagtgttttatggacccccttttcccctcagggaccaagctggtaatgagctggtgtgtcctgacactcctgaaggcggctgcctgttgtggagtccaggcccatcttcctcaagcgaatttagccatgagacagatagctctgtggagggctctagttccgcatctaatagagtagctcagaaacttattagcgttatcctgcaagcacacgagggcgtgccgtccgggcacctgtactgtatttcacccaaacaagtcgtggtgcctgccggcggatcatctactatttatatttccttcacaccgatggttctgagcccggaaattctacacaaagtcgagtgcacaggctatgccctagggtttatgagtctggattccaaggtcgaacgcgagattcccggaaaacgtcacaggctgcaggactttgcagtggggcccctgaaattagacttgcattcttacgtgagaccagcacagttgtcggtggaattagactatgggggatctatggagttccagtgtcaggcttctgatttgatcccggagcagccatgctctggcgtgctctctgagctggtgacaacccaccacctgaagcttacaaacactacagagatcccacactactttagactgatggttagcaggccctttagtgtatctcaggatggcgcttctcaggaccatagggcccctgggcctgggcagaaacaggaatgcgaggaggaaacagcatccgccgataagcagctggttttgcaagctcaggagaatatgcttgtgaatgtaagcttttctttgtcccttgagctcctgtcatatcagaagctgcctgctgatcagacgctgcctggcgtagacatacagcaaagtgcatctggagaaagggagatggtgttcacccagaatctcctcctcgagtacaccaaccagacaactcaggtggtgcctctgcgggcagtggttgctgtgcccgaactgcaattaagcaccagctgggtcgacttcggaacgtgcttcgtgtcgcagcagagagtgagagaagtatatctcatgaacctgagtggctgcaggagttactggactatgctgatgggtcagcaagagcccgctaaagctgctgtagcgtttcgggtgtcaccaaactccggactgcttgaagctcgcagcgccaacgccccccccaccagcattgcccttcaagtgttttttaccgcaagaagttcagagctctatgagtccacgatggtggtggagggagtgctcggtgaaaagtcttgtacgcttcgcttaagaggccagggcagttatgacgaaaggtacatgctgcctcaccagccttag

SEQ ID NO: 279673 - DNA, 5277 bp, Artificial Sequence
  derived and/or modified sequence
atggagaccaggagcagcaagaccaggaggagcctggccagcaggaccaatgaatgccagggcaccatgtgggcccccaccagccccccagctggcagcagcagccccagccagcccacctggaagagcagcctgtacagcagcctggcctacagcgaggccttccactacagctttgctgcccggccccggcggctgacccagctggccctggcccagaggcctgagccccagctgctgcggctgcggcccagcagcctgcggacccaggacatcagccacctgctgactggagtcttcaggaacctgtacagcgctgaggtgattggagatgaggtgtctgccagcctcatcaaggcccggggctctgaaaatgaaagacatgaggagtttgtggaccagctgcagcagatccgggagctgtacaagcagaggctggatgaatttgagatgctggagcggcacatcacccaggcccaggcccgggccatcgccgagaatgaaagagtgatgagccaggccggcgtgcaggacctggagagcctggtgcggctgccccctgtgaagtctgtgagccgctggtgcatcgacagcgagctgctgaggaagcaccacctgatcagccctgaggactactacacagacacagtgcccttccacagcgcccccaagggcatcagcctgcccggctgcagcaagctgaccttcagctgtgagaagaggtctgtgcagaagaaggagctgaacaagaagctggaggacagctgcaggaagaagctggccgagtttgaagatgagctggaccacacagtggacagcctgacctggaacctgacccccaaggccaaggagaggacccgggagcccctgaagaaggccagccagcccaggaacaagaactggatgaaccacctgcgggtgccccagcgggagctggaccggctgctgctggccaggatggagagcaggaaccacttcctgaagaacccccgcttcttcccccccaacaccaggtatggaggcaagagcctggtgtttcctcccaagaagccagcccccatcggggagttccagagcacagagcctgagcagagctgtgccgacacccctgtgttcctggccaagccacccatcggcttcttcacagattatgagatcggccctgtgtatgagatggtgattgccctgcagaacaccaccaccaccagccgctacctgcgggtgctgccccccagcaccccctactttgccctgggcctgggcatgtttcctgggaagggcggcatggtggcccctggcatgacctgccagtacatcgtgcagttcttcccagactgcctgggggactttgatgacttcatcctggtggagacccagagcgcccacaccctgctgatccccctgcaggcccggcggcccccacctgtgctgaccctgagccctgtgctggactgtggctactgcctgattggaggagtgaagatgacccgcttcatctgcaagaatgtgggcttctctgtgggccgcttctgcatcatgcccaagacctcctggccacccctgtccttcaaggccatcgccaccgtgggctttgtggagcagcccccatttggcatcctgcccagcgtgtttgagctggcccctggccacgccatcctggtggaggtgctcttcagccccaagagcctgggcaaggccgagcagaccttcatcatcatgtgtgacaactgccagatcaaggagctggtgaccatcggcatcggccagctgattgccctggacctgatctacatctctggagagaagagccagcctgaccctggagagctgacagacctgacagcccagcacttcatccgctttgagcctgagaacctgcggagcacagccaggaagcagctgatcatcagaaatgccacccacgtggagctggccttctactggcagatcatgaagcccaacctgcagcccctgatgcctggagagaccttctccatggacagcatcaagtgctacccagacaaggagacagccttcagcatcatgcccaggaaaggagtgctgagcccccacacagaccacgagttcatcctgtccttcagcccccatgagctgcgggacttccacagcgtgctgcagatggtgctggaggaggtgcctgagcctgtgtcctctgaggccgagagcctgggccacagcagctacagcgtggatgatgtgattgtgctggagattgaggtgaagggctctgtggagcccttccaggtgctgctggagccctatgccctgatcatccctggagagaactacatcggcatcaacgtgaagaaggccttcaagatgtggaacaacagcaagagccccatccgctacctgtggggcaagatcagtgactgccacatcatcgaggtggagcccggcaccggggtgattgagcccagcgaggtgggggactttgagctgaacttcaccggcggcgtgcccggccccaccagccaggacctgctgtgtgaaattgaggacagccccagccctgtggtgctgcacatcgaggccgtgttcaagggccctgccctgatcatcaacgtgtctgccctgcagtttggcctgctgcggctgggccagaaggccaccaacagcatccagatcagaaatgtgtcccagctgcctgccacctggaggatgaaggagagccctgtgtccctgcaggagaggccagaagatgtgagcccctttgacatcgagcccagcagcggccagctgcacagcctgggggagtgccgggtggacatcaccctggaggccctgcactgccagcacctggagaccgtgctggagctggaggtggagaatggagcctggagctacctgcctgtgtatgcagaggtgcagaagccccacgtgtacctgcagagcagccaggtggaggtgaggaacctgtacctgggcgtgcccaccaagaccaccatcaccctcatcaatggcaccctgctgcccacccagttccactggggcaagctgctgggccaccaggccgagttctgcatggtgacagtgagccccaagcacggcctgctgggccccagcgaggagtgccagctgaagctggagctgacagcccacacccaggaggagctgacccacctggccctgccctgccacgtgtctggcatgaagaagcccctggtgctgggcatcagcggcaagccccagggcctgcaggtggccatcaccatcagcaaggagagcagtgactgcagcgtcttcagcacagagcagtggccaggccaccccaaggagctgcggctggactttggatctgctgtgcccctgcggaccagggtgacccggcagctgatcctgaccaacagaagccccatccgcacccgcttcagcctgaagtttgagtacttcggcagcccccagaacagcctgagcaagaagaccagcctgcccaacatgcccccagccctgctgaagacagtgaggatgcaggagcacctggccaagcgggagcagctggacttcatggagagcatgctgagccatggaaaaggagctgccttcttcccccacttcagccagggcatgctgggcccctaccagcagctgtgcatcgacatcaccggctgtgccaacatgtggggcgagtactgggacaacctgatctgcaccgtgggggacctgctgcctgaggtgattcctgtgcacatggctgctgtgggctgccccatcagcagcctgcggaccaccagctacaccatcgaccaggcccagaaggagcccgccatgagatttggcacccaggtgtctggaggagacacagtgaccaggaccctgcggctgaacaacagcagcccctgtgacatccggctggactgggagacctacgtgcctgaggacaaggaggaccggctggtggagctgctggtgttctacggcccccccttccccctgcgggaccaggccggaaatgagctggtgtgcccagacaccccagagggcggctgcctgctgtggagccctggccccagcagcagcagcgagttcagccatgaaacagacagctctgtggagggcagcagcagcgccagcaacagagtggcccagaagctgatcagcgtcatcctgcaggcccacgagggcgtgcccagcggccacctgtactgcatcagccccaagcaggtggtggtgcctgctgggggcagcagcaccatctacatctccttcacccccatggtgctgagccctgagatcctgcacaaggtggagtgcaccggctacgccctgggcttcatgagcctggacagcaaggtggagcgggagatccctgggaagaggcaccggctgcaggactttgctgtgggccccctgaagctggacctgcacagctatgtgcggcctgcccagctgtctgtggagctggactatggaggctccatggagttccagtgccaggccagtgacctgatccctgagcagccctgcagcggcgtgctgtctgagctggtgaccacccaccacctgaagctgaccaacaccacagagatcccccactacttccggctgatggtgtcccggcccttctctgtgtcccaggatggagccagccaggaccaccgggcccctggccctggccagaagcaggagtgtgaggaggagacagccagcgctgacaagcagctggtgctgcaggcccaggagaacatgctggtgaatgtgtccttcagcctgagcctggagctgctgagctaccagaagctgcctgctgaccagaccctgcccggggtggacatccagcagagcgccagcggggagcgggagatggtgttcacccagaacctgctgctggagtacaccaaccagaccacccaggtggtgcccctgcgggctgtggtggccgtgcctgagctgcagctgagcacctcctgggtggactttggcacctgctttgtgtcccagcagagggtgcgggaggtgtacctgatgaacctgagcggctgccgcagctactggaccatgctgatgggccagcaggagcccgccaaggctgctgtggccttccgggtgagccccaacagcggcctgctggaggcccggagcgccaatgccccacccaccagcatcgccctgcaggtgttcttcaccgcccggagcagcgagctgtatgagagcaccatggtggtggagggcgtgctgggggagaagagctgcaccctgcggctgcggggccagggcagctatgatgagcgctacatgctgccccaccagccctag

SEQ ID NO: 279674 - DNA, 5277 bp, Artificial Sequence
  derived and/or modified sequence
atggagacccggagcagcaagacccggcggagcctggccagccggacaaacgagtgccaggggaccatgtgggcccctacctctccaccagcgggatcatcgtctcctagtcagcctacctggaagtcttctctctattcctccctggcctattcagaggctttccactacagcttcgcggccaggccccggcggctcacccaactggctctggctcaacggcccgagcctcagctccttcgactaagaccatcttctcttcggactcaagacatcagccacttgctgaccggggtcttcagaaacttgtactcagccgaagtgatcggcgatgaagtctcagctagcttgatcaaggcaagaggtagcgagaatgaacggcacgaggaattcgtggaccaactgcagcagattcgggagctttacaagcagaggctggacgaattcgaaatgttagagcggcatattacccaggcccaggcccgagccatcgctgagaacgagagagtcatgagtcaagccggagtgcaggatctggagtctctggtgcgcttaccaccggtaaagtctgtgtctaggtggtgtatcgactccgagctgctgagaaagcaccatctcattagtcccgaggattactataccgacactgtaccttttcatagcgccccaaaggggatttcactgcctggatgtagtaagctgacgtttagttgtgagaaaagatctgtccagaaaaaagaactcaacaaaaagctggaagattcatgtaggaagaaactggcagaatttgaagatgaattggatcacaccgttgattccctaacctggaacttgactcccaaggctaaagagagaacaagagaacccctaaagaaagcctctcagccccgcaacaaaaattggatgaatcacctaagagtgccacagcgcgagctcgatcgcctcttgttggcgagaatggagtccagaaaccatttcctgaaaaatccccgattctttccacccaacacgcgctacggaggcaagagcctggtttttccccccaaaaaacccgcccccatcggcgaattccaatcaacagagccagaacaaagttgcgcggatacacccgtcttcctggctaaaccaccaatagggtttttcacggactacgagatcgggcctgtgtacgaaatggtgatcgcactccagaacacaaccaccacttcccggtaccttagagtccttcccccgagtactccgtactttgcactcggcttgggaatgtttcctggaaagggtggcatggttgctcctggcatgacctgtcagtatattgtgcagtttttccccgactgtttgggggactttgacgatttcatcttggtcgagactcagtcagcccacaccctgttgatccctttacaagctagacgacctccgcccgtcctgacactttcgcctgtgctggactgcggctactgtctgatcggtggagtgaaaatgactaggtttatttgtaagaacgtgggatttagcgtcggacggttctgcattatgccgaagacaagctggccccctctgagcttcaaggcaatcgcaaccgtgggctttgtcgaacagcctccttttggcatcctgcctagtgtgttcgaattggcgcctggccacgcaattctagtggaggttctattcagcccgaaatcattaggtaaggcagagcagacttttatcataatgtgtgacaattgccaaatcaaagagctggtgacgattggcatcggacagctgatagccctggatttgatctatatctctggagagaaatcgcaaccagacccaggcgaactgacggacctgactgcgcaacactttatcaggttcgagcctgagaatctgagatctacagctaggaagcagctgatcatacgcaatgcaactcatgtggaactggccttttactggcagatcatgaagcccaacctccagcctctgatgcccggcgagacatttagtatggactccataaagtgctatcctgacaaagagaccgcattcagtataatgcctaggaagggcgttctctctccccataccgatcatgagtttatcttatctttctcccctcacgaactgcgggatttccactcagtcctgcaaatggttcttgaggaagtgccagaaccagtgtcctcggaggccgaaagcctcggacattcctcctactctgtggatgacgttatcgtgctggaaatcgaggtgaagggatctgtggagccctttcaggtcctgttggagccatacgccctgatcattccaggtgaaaactacatcggcatcaatgtcaaaaaagcctttaagatgtggaataactcaaagtcccccatccggtacctttggggtaagatttcagattgtcacataatcgaggttgaacccgggacgggtgtcatagagccatctgaggtgggagacttcgaacttaactttacaggcggggtccctgggcctacttcacaggacttactctgtgagattgaagatagcccatctcctgtggtcctacacattgaagcagtgttcaaaggacccgctctgatcatcaacgtttctgccctgcagtttggtctactgcgccttggccaaaaggccaccaatagtatacagattcgaaacgtctcccagctccctgcaacatggcggatgaaggaaagccctgtgagcctccaggaacgacctgaggatgtttccccctttgatatcgaacctagctctggacaactgcactccctgggggagtgccgcgtggatattactcttgaagcattacattgtcagcacctggaaacagtcttagaacttgaggtggagaatggagcttggagttacctccccgtgtatgcagaggtgcagaaaccccacgtataccttcagtcaagccaagtggaggtgaggaacctttacctgggggtaccgacaaaaacaacaataactctcatcaatggcactctgctccctacacagttccactggggaaagctgttaggacatcaggcagagttctgcatggtgaccgtgagccccaagcacggcctgttgggccccagcgaggaatgtcaattaaaattagagcttactgcccacacccaggaggagctcacccaccttgccttgccctgccacgtctcggggatgaaaaagccgttggtacttgggatttctgggaagccccagggtctacaggtggccatcactattagtaaagaaagctccgattgctcagtgttttcgaccgagcagtggccgggccatcctaaagaattgagacttgatttcggcagcgcagttccactccgcaccagagtgacacggcagctgatactgacaaaccgcagcccaattagaaccagattttcactaaaatttgagtactttgggagcccacagaactccctctctaagaaaacatctctccccaacatgcctcccgcccttctgaagacagttcgtatgcaggaacacctggcaaaacgcgagcagcttgatttcatggaaagtatgctcagtcatggcaagggggctgcctttttcccccatttctctcagggaatgctggggccataccagcagttatgtattgacattacagggtgtgccaacatgtggggagagtattgggacaatttgatctgcactgtgggtgacctactcccagaggtgatacctgtgcacatggccgccgtgggatgccccatttcctctctcaggaccacttcctacaccatcgaccaagcccaaaaagagcccgccatgaggtttggcacacaggtttctgggggcgatacagtcactcgcacactccgcttgaataattcatctccctgtgacattcggctggactgggagacatatgtcccagaggacaaggaagatagactcgtcgagttactagtattttatggacccccctttcctctgagagaccaggctgggaacgaactggtgtgcccagacacgcccgaaggcgggtgcctgctctggtcacctggacccagtagtagcagcgagttcagccacgaaactgacagctcggtcgaaggctcctcaagcgctagtaatcgtgtggctcagaaactcatttctgtgattctccaagcccatgagggggtgcctagcggacacctgtattgcatttctcccaaacaggtggttgtacctgcagggggcagtagcaccatttacatctccttcacaccgatggtgctgtccccagagatactccacaaggtagagtgtactggctacgctctgggatttatgagcctcgacagcaaggtcgagcgggagattcccggcaaacgtcacagactgcaggatttcgcagtcgggcccctgaaactggatttgcattcctacgtgaggcccgcccagttgtccgtggaactggattacggggggagtatggagtttcaatgccaagcaagtgatctgattccagagcagccctgcagtggcgtgctttccgagctggtgaccacacaccatctgaagctgactaatactaccgagatcccccattattttcggctcatggtgagtcgtcccttttcagtatcccaggacggggcatcgcaggaccaccgcgccccagggccgggtcagaagcaagagtgcgaggaagagactgctagcgccgacaagcagttagtacttcaggctcaagagaatatgctggtgaatgtctccttcagcctgagcctggagctgctgagctaccagaagcttcctgctgaccagacactcccaggcgtcgatatccagcagagtgcttcgggagagagggaaatggtgttcactcagaacctgctgcttgagtacactaatcagaccactcaggtcgtaccactgagagctgtggtggccgtccccgaactgcagctgtcgacttcctgggtggatttcggcacttgcttcgtgtctcagcagagggttcgggaagtgtacctgatgaatctaagcggatgtagatcatactggactatgctaatgggccagcaggagccggccaaagccgccgttgcgtttcgcgtttcaccaaatagcggcctgctggaggcacgcagtgccaatgctcccccaactagtattgctctgcaggtattttttacggccaggtccagcgaattatatgaatccaccatggtggtggagggtgtgctgggcgaaaaaagctgcactcttagactccggggacagggcagttatgacgagcggtacatgctgccccatcagccttag

SEQ ID NO: 279675 - DNA, 5276 bp, Artificial Sequence
  derived and/or modified sequence
atggagacacgatcctctaagactcgccgatcactcgcgtcccgaactaacgagtgtcaggggacaatgtgggcacctacttctccgcctgccggatcatctagcccttcgcagccgacctggaaatcctccctgtactcttcactggcttactctgaggcgtttcattatagtttcgcagccagaccccgaagacttactcagctggcgttggcgcagaggcccgaaccacagctccttcgtctgcgcccttcttctttgcgaactcaggacatcagccacctgctaactggggtgtttcgcaacctgtattccgcagaagttataggtgatgaagtttcagcttccctgatcaaagctagaggctcagaaaacgaacgtcacgaggaatttgttgaccagctccagcagattagagagctgtacaagcagcggttagatgaattcgagatgctggaaagacacattacccaagcacaggccagggctatcgcggaaaacgaaagggtcatgtcacaagcaggcgtgcaggatctcgaaagcctggtgaggctcccaccagtaaaatcggtatcccggtggtgtatagacagtgaactgctgcgcaaacaccacctaatctcccccgaggattactacacagatactgtgcccttccacagcgctcccaaaggcatttccctacccggatgttctaagttgacatttagttgcgagaagagaagtgtacagaagaaggaactcaataaaaagctggaggattcatgcagaaagaaactggccgaattcgaggatgaactagaccacacggtggattcgctgacgtggaacctgacacccaaggccaaggagcggacaagggaaccgctcaaaaaggcctcacaaccacgaaacaaaaattggatgaaccacctgcgcgtcccacaaagagagcttgatagactgctcctcgctcggatggagtccagaaatcactttctgaagaatcctcgctttttccctccaaacaccagatatggcggaaaaagcctagttttccctcccaagaaaccggctcctatcggtgaattccagagcacggagcctgaacagagttgcgctgatacccccgtattcttagctaaaccaccaattggattcttcacagactatgagataggcccagtgtacgagatggtcatcgccctgcagaacactaccacgaccagccgctacctgagggtactaccgccatccacaccatactttgctctgggcttaggaatgtttcctgggaaaggagggatggtggcccctggtatgacctgtcagtacatagtccagtttttccccgactgcttaggagattttgatgattttattctggtcgagactcagagtgcgcacacactgctcatacctttgcaggctcggcgtcccccacccgtgctcactctgtccccagtgctggattgtgggtattgcctgataggcggagtgaaaatgactaggtttatctgcaaaaatgttggcttttctgtcggccgtttctgcatcatgccaaagactagctggccgcctttatcatttaaagcaatcgccacggttggattcgtggagcagccaccatttggcattctaccatctgtttttgagctcgcgccaggacacgcaatactagtggaggtgttgttcagcccaaagtctttggggaaggcagaacagacgttcatcatcatgtgcgacaactgccaaattaaggagctggttacaattggtattggacagctgatcgccttggatctcatctacattagcggcgaaaagagccaacctgacccaggtgaattgaccgacttgacagcccagcattttataagattcgaacccgaaaacttgaggtctaccgcacgcaagcaactgataataagaaacgccacacacgtggaattagccttttattggcagattatgaagcccaatctgcagccactgatgcccggtgagactttttctatggactcaatcaagtgttatccggacaaagaaacagcattctcaattatgccaagaaaaggagtacttagtccgcatacggaccacgaatttatcctttccttcagtccccacgagctgcgcgatttccactccgttttacagatggtcctagaggaggttcccgaacctgtgtcctcagaagctgaatccctggggcacagctcctacagcgtagatgatgtgatcgtactggaaatcgaggtgaagggtagtgtcgagcctttccaggtgctcttggagccctacgccttgatcatccccggtgaaaactatattgggatcaatgtgaaaaaggcttttaaaatgtggaataactccaaaagcccgataaggtacctctggggaaaaatctcagattgtcatattatcgaggtcgagccgggaactggggtgatcgaaccatccgaagtcggcgatttcgaactgaactttactggcggagtcccaggacctacatcccaagacctgctgtgcgaaatcgaagatagcccctcgcccgttgttctccatatagaggccgtcttcaagggccctgccctgatcattaatgtcagtgctctgcagttcgggctgctccgcttgggccagaaagccaccaactccattcagattcgaaatgtcagtcagctgccagcaacatggcgaatgaaggaatcacccgtgtccctgcaagaaaggcctgaggatgtatcccctttcgacatcgaaccttcatctgggcaactccactctctgggcgaatgtcgtgtagacattactttggaggcactgcactgccagcaccttgaaacagtgctggagttggaggttgagaatggggcatggtcctacttgcccgtgtatgcagaggtacagaaaccccatgtgtatctgcagagtagtcaggtggaagtgagaaatctatacctcggggtccccaccaagacgacaattacgcttatcaacggaaccctgcttccaacccagttccactggggcaaattacttggacaccaggcggagttctgtatggtgacagtctctccaaaacatggcttattgggtccttcagaggaatgtcagctcaaactggagcttacagcacatacgcaggaagaattaacccacctcgcactgccttgccacgtttcgggtatgaagaaaccacttgtgttggggatcagtggcaaaccccaaggcctgcaagtcgccatcacaatatcgaaagagtcgtctgattgttcagtattttctacagagcagtggccagggcacccaaaagagctgagactcgatttcggctccgccgtcccacttcgaacccgggtcacccgccagttgatattaactaacagatcgccgatcagaactcgattctcactaaaatttgaatattttggcagcccacagaactctctttccaaaaagactagcctccctaacatgccccctgctctcctgaagactgtgaggatgcaggagcacctggccaagagagagcagttagatttcatggagtccatgctgagtcacggcaaaggagcagcattcttcccccacttctcacaagggatgctcggcccttaccagcagctttgcatcgatattactgggtgtgctaacatgtggggtgaatattgggataacctgatctgtacggttggagacctcctgcctgaggtgatccccgttcacatggcggcagtgggttgccctatctcctcactacgcacaacctcttacaccatcgatcaggctcagaaagagccagctatgcgtttcggaactcaggtgagcggaggcgatacagttacgcgcaccctgaggttaaataatagcagcccatgtgacatccggctggactgggagacctacgtcccagaggacaaggaagacagactggtcgaactacttgttttctacggacccccattcccccttagggatcaggctggcaatgagctagtgtgtccggacactcccgaaggtggttgtctgctgtggtctcctggtccatcctcttccagtgagtttagccacgagactgatagctccgtagaaggcagtagcagtgcatctaatcgggtagcacagaagcttatctctgtgattctgcaggctcacgaaggagtgccctcaggacatctctattgcatttcaccgaagcaggttgtcgttcccgcaggaggctctagcacgatttacatctccttcacgccaatggtgttgagccccgaaatcttgcacaaggtagaatgtacaggatacgctttaggctttatgtcactcgattccaaagtcgaacgggagatccctgggaagcgccatcgcttacaggattttgccgttggtcctctcaaattggacctgcacagctacgtcagaccagctcagctgtcagtggagctcgattatggtggatccatggagttccagtgtcaggcttctgacctgatccctgagcagccttgtagcggcgtcctctccgaacttgtcaccacgcaccatttaaagttgacaaacacaacggagatccctcattactttcgcctgatggtgagcagaccctttagtgtgagccaggacggcgcaagtcaggatcacagggcgccaggtccgggacagaagcaggagtgcgaggaagaaacagcaagtgctgataagcagttggtgctccaggcacaagagaacatgctggtgaatgtctccttctcactttcactggaacttctgagctaccagaagcttcccgctgatcagacgctgcccggagtggatattcagcagtctgcctccggcgagcgcgaaatggtgtttactcaaaatctgctcctggagtacaccaaccaaaccacacaagtagtgcctttgcgggctgttgtggcggttccagagctgcagctttccacctcatgggttgactttggaacttgtttcgtctcccagcagagggtacgcgaagtttatctgatgaatctgtcaggctgccgcagctactggaccatgctcatggggcaacaagaacctgcgaaagcggctgtggcatttagagtgtcgcccaattcagggctcttggaggcacggtccgctaatgctcctcccacaagtatcgctctccaagtgttcttcaccgcccgatcatccgagctgtatgagagcacaatggtggttgagggcgtgctgggagaaaagagctgcaccttaaggctgagaggtcaaggcagctacgacgagcgttatatgttgcctcatcagcccta

SEQ ID NO: 279676 - protein, 133 aa, Artificial Sequence
  derived and/or modified sequence
MALGVPISVYLLFNAMTALTEEAAVTVTPPITAQQADNIEGPIALKFSHLCLEDHNSYCINGACAFHHELEKAICRCFTGYTGERCEHLTLTSYAVDSYEKYIAIGIGVGLLLSGFLVIFYCYIRKRYEKDKI

SEQ ID NO: 279677 - DNA, 402 bp, Artificial Sequence
  derived and/or modified sequence
atggctctcggagtcccaatatcagtataccttctctttaacgctatgaccgctctcaccgaggaggccgctgtcaccgtaactccacccatcactgcacagcaggccgacaatattgaaggcccaatcgccttgaagttctcgcatctttgcctggaggaccacaattcttactgcatcaatggggcatgcgccttccaccatgagttggagaaggctatctgcaggtgttttacaggctacactggagaacggtgtgagcatttgacactgaccagctatgccgttgactcatacgaaaaatacatcgccattgggattggcgttggtctcctgctttcagggtttcttgtcatcttctactgttacatccgtaaacgttatgagaaggataagatatag

SEQ ID NO: 279678 - DNA, 402 bp, Artificial Sequence
  derived and/or modified sequence
atggccctgggagtccctatctccgtgtatctcctgttcaacgcgatgactgcattaactgaggaagcagcggtcactgtcacgccacctatcactgctcaacaagccgataacatcgaagggcctatcgcactcaaattcagccacctgtgtctcgaggatcacaattcctactgcatcaacggggcttgcgccttccaccacgaactggaaaaggccatctgtagatgttttacaggctacaccggcgagcggtgtgaacacttgacactcacctcctacgccgttgatagctacgagaaatacattgcgatcggcattggtgttggtcttcttctgagtggctttctggttatcttctactgctacataagaaaacgatacgaaaaagataaaatctag

SEQ ID NO: 279679 - DNA, 402 bp, Artificial Sequence
  derived and/or modified sequence
atggcactgggggtgcccatctctgtctatctcctttttaacgcaatgacggctctaaccgaagaagctgctgttaccgtcaccccccctattacggctcagcaggccgataacatagaaggtccaatcgccttaaagttttctcatctgtgtctcgaggatcacaattcatattgcattaacggcgcctgtgcatttcaccatgagctggaaaaggcgatatgccgctgttttactggttacacaggagaaagatgcgaacacctcaccttgacatcttatgcagtcgattcctacgagaaatatatcgcgattggaatcggcgtgggattactattaagtgggtttcttgtcatcttctattgttatatcaggaaaagatacgaaaaggataagatctag

SEQ ID NO: 279680 - DNA, 402 bp, Artificial Sequence
  derived and/or modified sequence
atggccctgggcgtgcccatcagcgtgtacctgctgttcaacgccatgaccgccctgaccgaggaggccgccgtgaccgtgaccccccccatcaccgcccagcaggccgacaacatcgagggccccatcgccctgaagttcagccacctgtgcctggaggaccacaacagctactgcatcaacggcgcctgcgccttccaccacgagctggagaaggccatctgcagatgcttcaccggctacaccggcgagagatgcgagcacctgaccctgaccagctacgccgtggacagctacgagaagtacatcgccatcggcatcggcgtgggcctgctgctgagcggcttcctggtgatcttctactgctacatcagaaagagatacgagaaggacaagatctag

SEQ ID NO: 279681 - DNA, 847 bp, Artificial Sequence
  derived and/or modified sequence
cgtcagtctagaaggataagagaaagaaagttaagcaactacaggaaatggctttgggagttccaatatcagtctatcttttattcaacgcaatgacagcactgaccgaagaggcagccgtgactgtaacacctccaatcacagcccagcaagctgacaacatagaaggacccatagccttgaagttctcacacctttgcctggaagatcataacagttactgcatcaacggtgcttgtgcattccaccatgagctagagaaagccatctgcaggtgttttactggttatactggagaaaggtgtgagcacttgactttaacttcatatgctgtggattcttatgaaaaatacattgcaattgggattggtgttggattactattaagtggttttcttgttattttttactgctatataagaaagaggtatgaaaaagacaaaatatgaagtcacttcatatgcaatcgtttgacaaatagttattcaggccctataatgtgtcaggcactgacatgtaaaatttttttaattaaaaaagagctgtaatctggcaaaaagtttctatgtaatatttttcatgccttttctcataaacccagacgagtggtaaaaatttgccttcagttgtaataggagagttcaaacgtacagtctcccttcaacctatctctgtctgcccatatcaaaattataaatgaggaggacagcaggccccaagaaagtagggactaagtatgtcttgttcaaaattgtatattcagtgacttacactatgcctagcacacaacacacactgagtaaatatttgttgagtgaaataaaatcaagaaacaagtaaaaactga

SEQ ID NO: 279682 - DNA, 402 bp, Artificial Sequence
  derived and/or modified sequence
atggctttaggtgtgcccataagcgtgtaccttttgttcaatgcaatgactgccctgaccgaggaagccgccgtcaccgtcacgcctcccatcactgcacagcaggccgataacatcgaggggcctatagctctgaaatttagtcacctttgtctggaagaccacaactcctattgcattaacggggcctgcgctttccaccatgaactcgagaaggcaatttgcagatgttttactggatatacaggtgaacggtgcgagcatttgaccctcacctcctatgccgtggacagctacgaaaaatatattgccatcgggataggagttggtttgttactgtccgggtttctcgtgatcttctactgttacatccggaagcgctatgagaaggataaaatttag

SEQ ID NO: 279683 - DNA, 402 bp, Artificial Sequence
  derived and/or modified sequence
atggccctgggcgtgcccatctctgtgtacctgctcttcaatgccatgacagccctgacagaggaggccgctgtgacagtgaccccacccatcacagcccagcaggccgacaacatcgagggccccatcgccctgaagttcagccacctgtgcctggaggaccacaacagctactgcatcaatggagcctgtgccttccaccacgagctggagaaggccatctgccgctgcttcaccggctacaccggggagcgctgtgagcacctgaccctgaccagctatgctgtggacagctatgagaagtacatcgccatcggcattggagtgggcctgctgctgagcggcttcctggtgatcttctactgctacatcaggaagagatatgagaaggacaagatctag

SEQ ID NO: 279684 - DNA, 402 bp, Artificial Sequence
  derived and/or modified sequence
atggccctgggcgtgcccatcagcgtgtacctgctgttcaacgccatgaccgctctgacagaagaagctgctgtaaccgtcacccccccgattaccgcacagcaggcagacaacatcgaaggtcctatagccctcaagttcagccatttgtgcctagaagaccacaactcctactgtatcaatggcgcttgtgcttttcatcacgaactcgaaaaggctatctgtcgctgtttcacaggttatacaggggaacggtgcgagcatcttacactgacctcatatgccgtggactcgtatgagaaatacatagcgatcggcatcggagtcggcctgctgttatcagggtttttggtgatcttttactgctacatccgtaagaggtatgagaaagataagatctag

SEQ ID NO: 279685 - RNA, 402 nt, Artificial Sequence
  derived and/or modified sequence
auggcccugggagucccuaucuccguguaucuccuguucaacgcgaugacugcauuaacugaggaagcagcggucacugucacgccaccuaucacugcucaacaagccgauaacaucgaagggccuaucgcacucaaauucagccaccugugucucgaggaucacaauuccuacugcaucaacggggcuugcgccuuccaccacgaacuggaaaaggccaucuguagauguuuuacaggcuacaccggcgagcggugugaacacuugacacucaccuccuacgccguugauagcuacgagaaauacauugcgaucggcauugguguuggucuucuucugaguggcuuucugguuaucuucuacugcuacauaagaaaacgauacgaaaaagauaaaaucuag

SEQ ID NO: 279686 - RNA, 402 nt, Artificial Sequence
  derived and/or modified sequence
auggcacugggggugcccaucucugucuaucuccuuuuuaacgcaaugacggcucuaaccgaagaagcugcuguuaccgucacccccccuauuacggcucagcaggccgauaacauagaagguccaaucgccuuaaaguuuucucaucugugucucgaggaucacaauucauauugcauuaacggcgccugugcauuucaccaugagcuggaaaaggcgauaugccgcuguuuuacugguuacacaggagaaagaugcgaacaccucaccuugacaucuuaugcagucgauuccuacgagaaauauaucgcgauuggaaucggcgugggauuacuauuaaguggguuucuugucaucuucuauuguuauaucaggaaaagauacgaaaaggauaagaucuag

SEQ ID NO: 279687 - protein, 318 aa, Artificial Sequence
  derived and/or modified sequence
MEDVLNFFSDCRIRNGENGIHFLLNRDGKRRGDALIEMESEQDVQKALEKHRMYMGQRYVEVYEINNEDVDALMKSLQVKSSPVVNDGVVRLRGLPYSCNEKDIVDFFAGLNIVDITFVMDYRGRRKTGEAYVQFEEPEMANQALLKHREEIGNRYIEIFPSRRNEVRTHVGSYKGKKIASFPTAKYITEPEMVFEEHEVNEDIQPMTAFESEKEIELPKEVPEKLPEAADFGTTSSLHFVHMRGLPFQANAQDIINFFAPLKPVRITMEYSSSGKATGEADVHFETHEDAVAAMLKDRSHVHHRYIELFLNSCPKGK

SEQ ID NO: 279688 - protein, 453 aa, Artificial Sequence
  derived and/or modified sequence
AAAVPTRSYSQVRGRREGPGARSLPGRVHAPPRPSVPPCAPRGHARGSATLAAHPPPSTLCSYWALEQGKLSQASGLLLVLFSPRVSGRLGSESKTTYLEDLPPPPEYELAPSKLEEEVDDVFLIRAQGLPWSCTMEDVLNFFSDCRIRNGENGIHFLLNRDGKRRGDALIEMESEQDVQKALEKHRMYMGQRYVEVYEINNEDVDALMKSLQVKSSPVVNDGVVRLRGLPYSCNEKDIVDFFAGLNIVDITFVMDYRGRRKTGEAYVQFEEPEMANQALLKHREEIGNRYIEIFPSRRNEVRTHVGSYKGKKIASFPTAKYITEPEMVFEEHEVNEDIQPMTAFESEKEIELPKEVPEKLPEAADFGTTSSLHFVHMRGLPFQANAQDIINFFAPLKPVRITMEYSSSGKATGEADVHFETHEDAVAAMLKDRSHVHHRYIELFLNSCPKGK

SEQ ID NO: 279689 - protein, 417 aa, Artificial Sequence
  derived and/or modified sequence
  misc_feature (1)..(1): Xaa can be any naturally occurring amino acid
XPPPSTLCSYWALEQGKLSQASGLLLVLFSPRVSGRLGSVSVAGVNVEALFPAWPMESKTTYLEDLPPPPEYELAPSKLEEEVDDVFLIRAQGLPWSCTMEDVLNFFSDCRIRNGENGIHFLLNRDGKRRGDALIEMESEQDVQKALEKHRMYMGQRYVEVYEINNEDVDALMKSLQVKSSPVVNDGVVRLRGLPYSCNEKDIVDFFAGLNIVDITFVMDYRGRRKTGEAYVQFEEPEMANQALLKHREEIGNRYIEIFPSRRNEVRTHVGSYKGKKIASFPTAKYITEPEMVFEEHEVNEDIQPMTAFESEKEIELPKEVPEKLPEAADFGTTSSLHFVHMRGLPFQANAQDIINFFAPLKPVRITMEYSSSGKATGEADVHFETHEDAVAAMLKDRSHVHHRYIELFLNSCPKGK

SEQ ID NO: 279690 - protein, 362 aa, Artificial Sequence
  derived and/or modified sequence
MESKTTYLEDLPPPPEYELAPSKLEEEVDDVFLIRAQGLPWSCTMEDVLNFFSDCRIRNGENGIHFLLNRDGKRRGDALIEMESEQDVQKALEKHRMYMGQRYVEVYEINNEDVDALMKSLQVKSSPVVNDGVVRLRGLPYSCNEKDIVDFFAGLNIVDITFVMDYRGRRKTGEAYVQFEEPEMANQALLKHREEIGNRYIEIFPSRRNEVRTHVGSYKGKKIASFPTAKYITEPEMVFEEHEVNEDIQPMTAFESEKEIELPKEVPEKLPEAADFGTTSSLHFVHMRGLPFQANAQDIINFFAPLKPVRITMEYSSSGKATGEADVHFETHEDAVAAMLKDRSHVHHRYIELFLNSCPKGK

SEQ ID NO: 279691 - DNA, 1362 bp, Artificial Sequence
  derived and/or modified sequence
gcggcagccgtgcctaccaggagttactcccaagtgcgcggccgacgagaaggtcctggggcaaggagtctgcctggaagagttcatgcgccacctcggccgtccgtgcccccgtgcgctccccggggtcacgccaggggctctgcgacactggccgctcacccaccccctagtacgctgtgcagttactgggccctggagcaggggaaactttcacaagcatccgggctactcctcgtgctcttctctccaagagttagtggacgcctgggtagcgagagcaagaccacctacctggaagacttaccgcctcccccagagtatgagctggccccttccaagctcgaagaagaggtggacgatgtctttctgattagagcgcaggggttaccatggtcctgcactatggaggatgtgctgaatttcttttcggactgcagaatccggaatggggagaatggcattcacttcctgcttaatagggacggcaagcggcgcggggacgccctcattgaaatggagtccgagcaggacgtgcagaaggcactggaaaagcatcgaatgtatatgggtcagaggtacgtcgaagtctacgagatcaataacgaagatgtggatgctttgatgaaatcattgcaggtgaaaagttcacctgtggtcaacgacggggtggttcgtttgcgaggactcccttactcttgtaatgaaaaggacattgttgactttttcgctggtctcaacatcgtggatattacattcgtgatggactatcggggtagacggaaaacaggcgaggcctatgtgcagttcgaggagcccgagatggcaaaccaggccctcctgaagcatagagaggagattggcaaccgatatattgaaattttcccttcccggagaaacgaggtccgtactcacgttggctcctataaaggtaaaaaaattgctagcttccctactgcaaagtacattacagagcctgagatggtgtttgaagagcatgaagtaaacgaagacatccaaccaatgacagccttcgaatcggagaaggagatcgaactgccaaaggaagtgccggagaagttgccagaggcagccgacttcggtacgacaagctcattgcactttgtgcatatgcggggactaccatttcaagctaacgcacaggacatcatcaatttctttgcacctctcaagccagtcagaatcacaatggaatacagcagttctggaaaagcgacaggggaagccgacgttcactttgaaacccacgaggacgccgtcgccgcaatgctcaaggacaggtcccacgtacatcataggtacatcgagctcttcttgaacagctgtcccaaagggaaatag

SEQ ID NO: 279692 - DNA, 1254 bp, Artificial Sequence
  derived and/or modified sequence
taacctcccccttctaccttatgttcctattgggcactcgagcagggtaagctctcccaagcatccgggctccttttggtcctgttctcacccagagtgagcggcagactgggatcagtgtcggtggccggcgtgaacgtggaggcccttttccctgcctggccaatggagtcgaagaccacatacctggaagacctgcctccacccccagaatatgaactggccccttcaaaactcgaagaagaggtggacgatgtgttcctgataagagctcagggcctgccttggagttgtacaatggaagatgtgctgaatttcttcagcgattgccgtatccgaaatggtgagaacgggatccactttttattaaatcgagatgggaaaagacgcggggatgcattgatcgaaatggaatctgagcaagacgtgcaaaaagcactcgaaaaacaccgaatgtacatgggccagcggtatgtcgaggtgtacgagattaataacgaggatgtggatgccctgatgaagtccctgcaagtaaagtcctcacccgtggtaaatgacggggtagtgaggctccgcggtttgccttattcgtgtaacgagaaggatatcgttgacttctttgctgggctgaatatcgtggacatcacgtttgtgatggattatcgtgggcggcggaagactggagaggcgtacgtgcagttcgaggagcccgaaatggctaaccaggcactccttaagcaccgtgaggagataggcaacagatacatcgagatattcccatctcggcgtaatgaggtgagaacacacgtcgggtcctataaagggaaaaagattgccagctttcccacggcaaagtacatcactgagcctgaaatggtgtttgaggagcacgaggtgaacgaggacatccaacccatgacagcatttgagtcagagaaggaaatcgaactccctaaagaagtacctgagaaactacccgaagctgccgacttcggcaccaccagcagtctacacttcgtgcatatgaggggcctgccctttcaggccaacgcacaggacatcatcaatttttttgctccattaaaacccgtccgcatcactatggaatattcttcaagtggtaaggccacaggtgaagccgacgttcattttgagacacacgaggacgctgtggctgccatgctgaaagaccgttctcacgtgcaccaccggtatatcgagctgttcctgaattcatgtcctaaggggaaatag

SEQ ID NO: 279693 - DNA, 6462 bp, Artificial Sequence
  derived and/or modified sequence
gcggccgccgtcccgacgcgcagctacagccaggtacgtgggcgccgtgagggacctggcgcgagatccctcccgggccgcgtgcacgcgcccccgcgcccctccgtccctccgtgtgcgcctcgcgggcacgcccggggatccgcgacactcgccgcacacccgcccccgtccaccctgtgctcctattgggccctggaacaagggaagctctcccaggcgtcgggtcttctgcttgttttgttctcgcctcgagtctctggtcggttgggcagtgagtccaaaactacttacctggaagaccttccaccaccccctgagtatgaattggccccgtccaagttagaagaggaagtggatgatgtctttctcattcgagctcaaggactgccctggtcatgcactatggaagatgtgcttaactttttttcagactgcagaatccgcaacggtgagaatggaatacattttctcctaaacagagatgggaaacgaaggggtgatgccttaattgaaatggagtcagagcaggatgtgcagaaagccttagagaagcaccgcatgtacatgggccagcggtatgtggaagtatatgagataaacaatgaagatgtggatgccttaatgaagagcttgcaggtcaaatcttcgcctgtggtaaatgatggtgtggttcgtttgagaggacttccttatagttgcaatgagaaagacattgtagacttctttgcaggactgaatatagttgacattacttttgtgatggactatagagggaggcgaaaaacaggggaagcctatgtgcaatttgaagaaccagaaatggccaaccaagccctgttgaaacacagggaagaaattggtaatcgatacatcgagatatttccaagcagaaggaatgaagttcgaacacatgtcggttcttataagggaaagaaaatcgcatcttttcctactgctaagtatataactgagccagaaatggtctttgaagaacatgaagtaaatgaggatattcaacccatgacagcttttgaaagtgagaaggaaatagaattgcctaaggaggtgccagaaaagcttccagaggctgctgattttggaactacgtcttctctgcattttgtccacatgagaggattacctttccaagccaatgcccaagacattataaacttttttgctccactcaagcctgttagaatcaccatggaatacagctccagtgggaaggccactggagaagctgatgtgcactttgagacccatgaggatgctgttgcagcgatgctcaaggatcggtcccacgttcatcataggtatattgaactgttcctgaattcatgtccaaaaggaaaataagactctaggggctccagataataagggtgaagcaagaagcatttcatttgcacatctttcttggacttgggatatacagttccagtttattagcagcaactgctagggaaatgattttggtgttttgggttaattgcttctaagaaaagtttcatagtggactgtttagaagaagaaatgaaagatccagtttgggattatgaaataaaccacaaattaaaatttttgtttaaactgtccaggatctgatttaaaaatatggtctttgttttatatgattaaatggtttgttttcatagatgatatgttactcattgtaaagaccacatatttttattcagcagtgttctttaaacggtttcatttaaaaagtaactttttttttttgcctgtgaattgagtgctctgatgtaaaacttctcatggagtgaaacagtgatttattttaaccaaacattcaccaaagcaaagaacggtttcagacctttgaactggtatggtttggcagaatagttttaaattttgctgtatttgattacttagagataggaatttttaaaaatcaaaacaaaaaataccacagcttagtgtaaatgacaatttggcggttttatgtctttagaaatgttttgcctttctaagccttgtgctaaaggcgtataacggtggtgcctatctacttaagggggcattctagtcttaacttaaaagttgtctaaactgtccctccctggctttttttggtttggggtagacctaagggtgtttgttagtctcaaaactgtgaagtgacatgtcagaacagtccagactggtaagaaaattaatggcttcacttgaatttaaaccagctctagataggaaaaaaatcagtctcctcatttgctttttaaatggagtagtacatcccatattttagaacaagtaggggtgccttgcttaaataaaaatagcatttaatgtataattgtgtgaagggtttatggataaagctgtacttctgtcacaatgtggcagtactttctgctttaatattaaacagcttgttatttaaatattggacaaaatggctggcttcaaaatatagtcattaataaactaactttatgtgcacctgtgtaggagaatcaaaatcctgtatgctttctttgccttgttcctgttctcagggtgacgactgccaccaggagatgcagttctagttcttaaaattaaatttgcccaggtttctgacaggtgatacctggaagagagactatgtcttctcttacttaatacataaccatctttgattaccagctaagatgcgaaatcactgtactgtagtcaataaatgaagacttgtttcaggctgaagattacctaagagtatttattattggagtctgtgagtcaactgaatatattattacctcaagtcctgctatattaatataagtagtaagggttaattttcgtgtgtgtgttctctaaaatcctgtgaacatgacttaaccagcttaacatcatcagtagtactgcctagatggaaatgcgttttcatatatggttgaatatgccaagctatgagaactggtatctgtagttgtacgaactattagaatgtgatctttgttgctctttcacatttggtatctgatttgctgtggaaaagatctgtggggcctactgtgaggaattcatctgcaattgatttaagctaatgagttttatttgcacatctctggaaaaagaatgcaagcaaagcattaaaatgctatatgatggatgggtaaggttgaaaggatatatcttcttggcacgctacaggctgagttttctgtacaaaatgtggccattattgggaaatcattttatgtatttgaatgctcccttttgtttttgttcatgatctaggctagtacgtaagtgattgctaaggtggatgtagttatgggaaaggaagagaagcacataatacagtaaaagtaatcttatttccatgcaagtggaagacggtaccgtctccccacatttgagaagactgttttgcatcactctttgctattgaaggaagcagtgatggtgaatttccttctgtttgggttccttgtgtctataacttcctttgtggtaaagccatcaggaagaatagtgggagtggggcatatggtcagggtgctcatatcctgctttagcctagctgctgcttacggagtgcaagggagaactctgagaagcagtatgtaaataccagggagctgattgctgaatattgtggtctcatctgaatattgtggtctcatctaaatattgacaccaggcaatgaagcagaaatagagtatgtgtccctttatgcgtgggtaacttaagcttctgtcatgtgggaagggggaccgaatcttccctgggaggaaggctccaaattctcactacttctgtgttacttgaagggggaagcataaggaacccagtttgaaggcaacattgtgtgccatgaatctgcttattaatcaacatgccttgttaatgtcctctgccctgaacagcccttactcagttctcatttggaaagttattttttggggttacatcctgtttgtttcagaatttaaaaccctccatggtgggtcacttgaggtcaggagttcaagattagcctggccaacttagtgaaactccggctctactgaaaatgcaaaaattagccaggtgtggcacacgcctgtaatcccagttacttgggaggccaaggcaggagaatcgcttgaacctgggaggcagaggttgtagcgagccaagatcacaccattgcactccagcctgggcaacagagtgagactctgtcaaaatcaaaaaaaccaaaatacaaaaaactccattgttctgagagtttcccctaaattatcggaagacactcacattgaattggtaggacctatagtatagaggagaatggtatgtatgtcagcagtagagttccaatccaaattgcgctatcgcattagaaatacattaccctcccactccccaagttcagcaaattagaagagaatctgaagtttgtaggaagggaataaagctgctataaacatttatgtgcaggtttttgtgtagactcgttttcagctcctttgggtaaataccaaggaaccaggttgctggattgtaagttaagagtatgtttagttttggaagaaactgccaaactgttccaacatgactattttgaattcccattgacaatgaataagagttcctgtagctcctcaccctcattagtatttggtgatgtcactcttgcattttagctaatgggtgaatagtggtctcatcgttttaattcccaatcccatagtgatgtggagcaccttttcatatacttaatctgccatccttatatcatcattggtgaggtgtctggattttctgtccagaattttagttctagtggttttcttatttttagaaaggaagtataggaaggaaggtttaatctgtcttaagcctgattatatgaaaatcaagaataggctaggtgtggtggctgacatctgtaatccccgcactttgtgaggctgaagtgggaggactgcttgagcctgggaagtcaagcctgcagtgagccatgactgttgctgcactccagcctgagtgacagagtgagaccctgtctcagaaaaaaaaaaagcaggctcattttaaagttgtttatattttattttttgaaggaaataaacttgaagagatacaaacggtagtgaagattctccttcccctcctgtaattcagctgtttagtttctattctcgcacagccctgttatcagtttctagtgtaagcttgcagtgacttttactttatttataagcaagtgttagtgggtgttgtcatttcttttaaaaatataaattatactgtacatgctattttgtattttggcttttctcccacctaaacaccctaaagatcattttctgtcagtatataaaatcttggtgatgccaatacccatcccttagattgtacaagcagcattttgccatgctttatcccatagcctgcctcctgcagtctcatctttttttctatatgcatgtccaagtaagttgtagacatttttcacttttaatcctttcagcatacatgtcatgggaatttgtttttgtttttgttttttgtgtttgagacagtcgctctgtcacccaggctggagttatagtgacgtgatcccagctcattacagcctccacctcccagtttcaagcaattctcatgcctcagattcccgagtagctgggattacagatgtgcaccaccacgcctgactaatttttgtatttttagtagagatggggtttcatcatgttggccaggctggtctggaactcctggcctccagtcatttgcctgcctcggcctcccaaagtgctgggattacaggcatcagccaccacacccagccgtcattggagtttttttgagggagatttgcagtaaggtgaataaatgttaagtgtatcatttgatgaggttttttctttttttttttttttttttgagatggagtcttgtatcgcccaggctagagtgcagtggcctggtcttggctcactgcaacctccacctcctgggttcaagggagtctcctgcctcagcctcccgagtagctgggattacaggtgtgagccaccatacccagactcatttgatgagttttgatgtaaaagcatgtaactcaaacccctatgtctggaacatctgtattacatctgaattttttcacctagtcaattcctgcacctctctctcctgtcccttcttccctcccctggcagtcagctactgttaggattttgttcactgtagattaattttgcctattctagaacttcatataacggactcacttatgcagtatgtattctgtaagttccttttactcagcatgtttgtatgttcatcagtgtgtttaagctttgttcctttttatggctgagcagtgttctatgtatgaatgccacattttaacgtttcacctgttaggtgaacaactaactggtgaacaatgggctgtttctagtttggggctatcatgaataaagttggtatgaacatgt

SEQ ID NO: 279694 - DNA, 2491 bp, Artificial Sequence
  derived and/or modified sequence
gcggccgccgtcccgacgcgcagctacagccaggtacgtgggcgccgtgagggacctggcgcgagatccctcccgggccgcgtgcacgcgcccccgcgcccctccgtccctccgtgtgcgcctcgcgggcacgcccggggatccgcgacactcgccgcacacccgcccccgtccaccctgtgctcctattgggccctggaacaagggaagctctcccaggcgtcgggtcttctgcttgttttgttctcgcctcgagtctctggtcggttgggcagtgagtccaaaactacttacctggaagaccttccaccaccccctgagtatgaattggccccgtccaagttagaagaggaagtggatgatgtctttctcattcgagctcaaggactgccctggtcatgcactatggaagatgtgcttaactttttttcagactgcagaatccgcaacggtgagaatggaatacattttctcctaaacagagatgggaaacgaaggggtgatgccttaattgaaatggagtcagagcaggatgtgcagaaagccttagagaagcaccgcatgtacatgggccagcggtatgtggaagtatatgagataaacaatgaagatgtggatgccttaatgaagagcttgcaggtcaaatcttcgcctgtggtaaatgatggtgtggttcgtttgagaggacttccttatagttgcaatgagaaagacattgtagacttctttgcaggactgaatatagttgacattacttttgtgatggactatagagggaggcgaaaaacaggggaagcctatgtgcaatttgaagaaccagaaatggccaaccaagccctgttgaaacacagggaagaaattggtaatcgatacatcgagatatttccaagcagaaggaatgaagttcgaacacatgtcggttcttataagggaaagaaaatcgcatcttttcctactgctaagtatataactgagccagaaatggtctttgaagaacatgaagtaaatgaggatattcaacccatgacagcttttgaaagtgagaaggaaatagaattgcctaaggaggtgccagaaaagcttccagaggctgctgattttggaactacgtcttctctgcattttgtccacatgagaggattacctttccaagccaatgcccaagacattataaacttttttgctccactcaagcctgttagaatcaccatggaatacagctccagtgggaaggccactggagaagctgatgtgcactttgagacccatgaggatgctgttgcagcgatgctcaaggatcggtcccacgttcatcataggtatattgaactgttcctgaattcatgtccaaaaggaaaataagactctaggggctccagataataagggtgaagcaagaagcatttcatttgcacatctttcttggacttgggatatacagttccagtttattagcagcaactgctagggaaatgattttggtgttttgggttaattgcttctaagaaaagtttcatagtggactgtttagaagaagaaatgaaagatccagtttgggattatgaaataaaccacaaattaaaatttttgtttaaactgtccaggatctgatttaaaaatatggtctttgttttatatgattaaatggtttgttttcatagatgatatgttactcattgtaaagaccacatatttttattcagcagtgttctttaaacggtttcatttaaaaagtaactttttttttttgcctgtgaattgagtgctctgatgtaaaacttctcatggagtgaaacagtgatttattttaaccaaacattcaccaaagcaaagaacggtttcagacctttgaactggtatggtttggcagaatagttttaaattttgctgtatttgattacttagagataggaatttttaaaaatcaaaacaaaaaataccacagcttagtgtaaatgacaatttggcggttttatgtctttagaaatgttttgcctttctaagccttgtgctaaaggcgtataacggtggtgcctatctacttaagggggcattctagtcttaacttaaaagttgtctaaactgtccctccctggctttttttggtttggggtagacctaagggtgtttgttagtctcaaaactgtgaagtgacatgtcagaacagtccagactggtaagaaaattaatggcttcacttgaatttaaaccagctctagataggaaaaaaatcagtctcctcatttgctttttaaatggagtagtacatcccatattttagaacaagtaggggtgccttgcttaaataaaaatagcatttaatgtataattgtgtgaagggtttatggataaagctgtacttctgtcacaatgtggcagtactttctgctttaatattaaacagcttgttatttaaatattggacaaaatggctggcttcaaaatatagtcattaataaactaactttatgtgcacctgtgtaggagaatc

SEQ ID NO: 279695 - DNA, 1765 bp, Artificial Sequence
  derived and/or modified sequence
acccgcccccgtccaccctgtgctcctattgggccctggaacaagggaagctctcccaggcgtcgggtcttctgcttgttttgttctcgcctcgagtctctggtcggttgggcagtgtaagtgtggctggggtgaatgttgaggccttgttccccgcctggcccatggagtccaaaactacttacctggaagaccttccaccaccccctgagtatgaattggccccgtccaagttagaagaggaagtggatgatgtctttctcattcgagctcaaggactgccctggtcatgcactatggaagatgtgcttaactttttttcagactgcagaatccgcaacggtgagaatggaatacattttctcctaaacagagatgggaaacgaaggggtgatgccttaattgaaatggagtcagagcaggatgtgcagaaagccttagagaagcaccgcatgtacatgggccagcggtatgtggaagtatatgagataaacaatgaagatgtggatgccttaatgaagagcttgcaggtcaaatcttcgcctgtggtaaatgatggtgtggttcgtttgagaggacttccttatagttgcaatgagaaagacattgtagacttctttgcaggactgaatatagttgacattacttttgtgatggactatagagggaggcgaaaaacaggggaagcctatgtgcaatttgaagaaccagaaatggccaaccaagccctgttgaaacacagggaagaaattggtaatcgatacatcgagatatttccaagcagaaggaatgaagttcgaacacatgtcggttcttataagggaaagaaaatcgcatcttttcctactgctaagtatataactgagccagaaatggtctttgaagaacatgaagtaaatgaggatattcaacccatgacagcttttgaaagtgagaaggaaatagaattgcctaaggaggtgccagaaaagcttccagaggctgctgattttggaactacgtcttctctgcattttgtccacatgagaggattacctttccaagccaatgcccaagacattataaacttttttgctccactcaagcctgttagaatcaccatggaatacagctccagtgggaaggccactggagaagctgatgtgcactttgagacccatgaggatgctgttgcagcgatgctcaaggatcggtcccacgttcatcataggtatattgaactgttcctgaattcatgtccaaaaggaaaataagactctaggggctccagataataagggtgaagcaagaagcatttcatttgcacatctttcttggacttgggatatacagttccagtttattagcagcaactgctagggaaatgattttggtgttttgggttaattgcttctaagaaaagtttcatagtggactgtttagaagaagaaatgaaagatccagtttgggattatgaaataaaccacaaattaaaatttttgtttaaactgtccaggatctgatttaaaaatatggtctttgttttatatgattaaatggtttgttttcatagatgatatgttactcattgtaaagaccacatatttttattcagcagtgttctttaaacggtttcatttaaaaagtaactttttttttttgcctgtgaattgagtgctctgatgtaaaacttctcatggagtgaaacagtgatttattttaaccaaacattcaccaaagcaaagaacggtttcagacctttgaactggtatggtttggcagaata

SEQ ID NO: 279696 - DNA, 1738 bp, Artificial Sequence
  derived and/or modified sequence
attgggccctggaacaagggaagctctcccaggcgtcgggtcttctgcttgttttgttctcgcctcgagtctctggtcggttgggcagtgtaagtgtggctggggtgaatgttgaggccttgttccccgcctggcccatggagtccaaaactacttacctggaagaccttccaccaccccctgagtatgaattggccccgtccaagttagaagaggaagtggatgatgtctttctcattcgagctcaaggactgccctggtcatgcactatggaagatgtgcttaactttttttcagactgcagaatccgcaacggtgagaatggaatacattttctcctaaacagagatgggaaacgaaggggtgatgccttaattgaaatggagtcagagcaggatgtgcagaaagccttagagaagcaccgcatgtacatgggccagcggtatgtggaagtatatgagataaacaatgaagatgtggatgccttaatgaagagcttgcaggtcaaatcttcgcctgtggtaaatgatggtgtggttcgtttgagaggacttccttatagttgcaatgagaaagacattgtagacttctttgcaggactgaatatagttgacattacttttgtgatggactatagagggaggcgaaaaacaggggaagcctatgtgcaatttgaagaaccagaaatggccaaccaagccctgttgaaacacagggaagaaattggtaatcgatacatcgagatatttccaagcagaaggaatgaagttcgaacacatgtcggttcttataagggaaagaaaatcgcatcttttcctactgctaagtatataactgagccagaaatggtctttgaagaacatgaagtaaatgaggatattcaacccatgacagcttttgaaagtgagaaggaaatagaattgcctaaggaggtgccagaaaagcttccagaggctgctgattttggaactacgtcttctctgcattttgtccacatgagaggattacctttccaagccaatgcccaagacattataaacttttttgctccactcaagcctgttagaatcaccatggaatacagctccagtgggaaggccactggagaagctgatgtgcactttgagacccatgaggatgctgttgcagcgatgctcaaggatcggtcccacgttcatcataggtatattgaactgttcctgaattcatgtccaaaaggaaaataagactctaggggctccagataataagggtgaagcaagaagcatttcatttgcacatctttcttggacttgggatatacagttccagtttattagcagcaactgctagggaaatgattttggtgttttgggttaattgcttctaagaaaagtttcatagtggactgtttagaagaagaaatgaaagatccagtttgggattatgaaataaaccacaaattaaaatttttgtttaaactgtccaggatctgatttaaaaatatggtctttgttttatatgattaaatggtttgttttcatagatgatatgttactcattgtaaagaccacatatttttattcagcagtgttctttaaacggtttcatttaaaaagtaactttttttttttgcctgtgaattgagtgctctgatgtaaaacttctcatggagtgaaacagtgatttattttaaccaaacattcaccaaagcaaagaacggtttcagacctttgaactggtatggtttggcagaata

SEQ ID NO: 279697 - DNA, 1362 bp, Artificial Sequence
  derived and/or modified sequence
gctgctgctgtgcccaccaggagctacagccaggtgcggggcagaagagagggccctggggcccggagcctgcccggccgggtgcacgccccaccccggcccagcgtgcccccctgtgccccccggggccacgcccggggcagcgccaccctggccgcccaccccccacccagcaccctgtgcagctactgggccctggagcagggcaagctgagccaggccagcggcctgctgctggtgctcttcagcccccgggtgtctggccgcctgggcagcgagagcaagaccacctacctggaggacctgcccccacctccagaatatgagctggcccccagcaagctggaggaggaggtggatgatgtgttcctgatccgggcccagggcctgccctggagctgcaccatggaggatgtgctgaacttcttcagtgactgccgcatcagaaatggagaaaatggcatccacttcctgctgaacagagatggcaagagaagaggagatgccctgattgagatggagagcgagcaggatgtgcagaaggccctggagaagcacaggatgtacatgggccagcgctacgtggaggtgtatgagatcaacaatgaagatgtggatgccctgatgaagagcctgcaggtgaagagcagccctgtggtgaatgatggagtggtgcggctgcggggcctgccctacagctgcaatgagaaggacatcgtggacttctttgctggcctgaacatcgtggacatcacctttgtgatggactaccggggccgcaggaagacaggagaggcctacgtgcagtttgaggagcctgagatggccaaccaggccctgctgaagcaccgggaggagatcggcaaccgctacatcgagatcttccccagcagaagaaatgaggtgaggacccacgtgggcagctacaagggcaagaagatcgccagcttccccacagccaagtacatcacagagcctgagatggtgtttgaggagcacgaggtgaatgaagacatccagcccatgacagcctttgaaagtgagaaggagattgagctgcccaaggaggtgcctgagaagctgcctgaggccgctgactttggcaccaccagcagcctgcactttgtgcacatgaggggcctgcccttccaggccaatgcccaggacatcatcaacttctttgcccccctgaagcctgtgcgcatcaccatggagtacagcagcagcggcaaggccactggagaggctgatgtgcactttgagacccatgaagatgctgtggccgccatgctgaaggacaggagccacgtgcaccaccgctacatcgagctgttcctgaacagctgccccaagggcaagtag

SEQ ID NO: 279698 - DNA, 1254 bp, Artificial Sequence
  derived and/or modified sequence
tgaccaccacccagcaccctgtgcagctactgggccctggagcagggcaagctgagccaggccagcggcctgctgctggtgctcttcagcccccgggtgtctggccgcctgggctctgtgtctgtggccggcgtgaatgtggaggccctcttccctgcctggcccatggagagcaagaccacctacctggaggacctgcccccacctccagaatatgagctggcccccagcaagctggaggaggaggtggatgatgtgttcctgatccgggcccagggcctgccctggagctgcaccatggaggatgtgctgaacttcttcagtgactgccgcatcagaaatggagaaaatggcatccacttcctgctgaacagagatggcaagagaagaggagatgccctgattgagatggagagcgagcaggatgtgcagaaggccctggagaagcacaggatgtacatgggccagcgctacgtggaggtgtatgagatcaacaatgaagatgtggatgccctgatgaagagcctgcaggtgaagagcagccctgtggtgaatgatggagtggtgcggctgcggggcctgccctacagctgcaatgagaaggacatcgtggacttctttgctggcctgaacatcgtggacatcacctttgtgatggactaccggggccgcaggaagacaggagaggcctacgtgcagtttgaggagcctgagatggccaaccaggccctgctgaagcaccgggaggagatcggcaaccgctacatcgagatcttccccagcagaagaaatgaggtgaggacccacgtgggcagctacaagggcaagaagatcgccagcttccccacagccaagtacatcacagagcctgagatggtgtttgaggagcacgaggtgaatgaagacatccagcccatgacagcctttgaaagtgagaaggagattgagctgcccaaggaggtgcctgagaagctgcctgaggccgctgactttggcaccaccagcagcctgcactttgtgcacatgaggggcctgcccttccaggccaatgcccaggacatcatcaacttctttgcccccctgaagcctgtgcgcatcaccatggagtacagcagcagcggcaaggccactggagaggctgatgtgcactttgagacccatgaagatgctgtggccgccatgctgaaggacaggagccacgtgcaccaccgctacatcgagctgttcctgaacagctgccccaagggcaagtag

SEQ ID NO: 279699 - DNA, 1362 bp, Artificial Sequence
  derived and/or modified sequence
gccgccgccgtgcccacccggagctacagccaggtgcggggccggagggaaggacccggtgcaaggtccctgcccggaagggtgcacgcccctcctcgaccctctgttcctccttgcgccccacgcggccatgcccggggatcagcaaccctggctgcccatccaccaccatccacactgtgctcatactgggccctggagcagggtaaactgagccaagcttcagggctgcttcttgtcctgttctcacccagagtgtccggcaggctgggatcagagagtaagaccacgtatctcgaggacttgccaccgcctcctgagtacgagcttgctcctagcaagctggaggaggaagtagacgacgtgtttctgattagggcccagggcctcccatggtcctgcacaatggaggacgtcctaaacttcttcagtgattgccgtatccgcaacggcgagaacggcatccattttctgctgaaccgggacggaaagagaaggggagacgccctgattgagatggaatccgaacaggacgtgcagaaagcactcgagaagcaccgtatgtatatgggacagagatatgtggaggtctacgaaattaacaacgaggacgttgacgcattaatgaaatctctgcaggtgaagtcaagcccagtggtgaacgatggggtagtaagacttcggggactgccatactcttgtaacgagaaagatatcgtcgatttctttgcggggctgaatatcgtcgacatcacatttgtgatggactataggggaaggcggaaaacaggtgaagcttacgtgcaattcgaagagcccgaaatggccaaccaagctcttcttaaacatagggaagaaatcggaaatagatatatcgaaatcttcccttcgcgccggaacgaggtccgtacacacgtgggatcatataagggcaaaaagatcgccagctttcccacagccaagtatattaccgaaccagaaatggtgttcgaagagcacgaagtcaatgaggatatacaaccaatgaccgcatttgaatctgaaaaagaaatcgagctacccaaggaggtccctgaaaagctcccagaggcggccgatttcggcaccacctcctcactgcacttcgtacatatgagggggctgccttttcaggccaacgctcaggacatcatcaatttttttgctccgttgaagccagtgcgcattacaatggagtactctagctctgggaaagctacaggggaggctgacgtgcattttgagacccacgaggacgccgtcgccgccatgctaaaagatcggtcccatgtccatcacaggtacatcgaactcttcttgaatagttgtcccaaaggaaaatag

SEQ ID NO: 279700 - DNA, 1254 bp, Artificial Sequence
  derived and/or modified sequence
tgacccccccccagcaccctgtgcagctactgggccctggagcagggtaaactgagtcaggccagtgggctcctgctggtgctcttctctcctagagtcagtggccgacttggaagtgtgtccgttgccggtgtgaatgtcgaagccctgtttcccgcctggcccatggaaagcaagactacctacttagaagacctgcccccgccccccgagtacgaactggcaccttctaaactcgaggaggaggtcgacgatgtcttcctcattagagcccagggtctgccctggtcctgtactatggaggacgttcttaattttttttccgactgccggatccggaatggcgagaatgggatccactttttgctgaaccgggatggcaaaaggagaggcgacgccctcatcgagatggaatctgagcaagacgtccaaaaggcattggaaaagcaccgtatgtacatgggacagcgatacgttgaggtatacgagattaacaacgaggatgtggacgctctgatgaaatcactccaagtaaaaagttctccagtcgtgaatgatggcgtcgtccgcctaaggggtctaccctatagctgtaatgaaaaagatatagtggattttttcgctgggctgaacattgtcgatatcacctttgtcatggactaccggggaaggcggaaaaccggcgaggcatacgtacagttcgaagagcctgagatggccaatcaggcattgctcaaacaccgtgaggagattggcaatcgatacatcgaaatcttcccctctcgccgcaatgaagtccggacccatgttgggagttacaagggcaagaaaatcgctagctttccaaccgccaagtacattaccgagcccgaaatggtctttgaagaacatgaagttaatgaagacattcaacctatgacagcgtttgagtcggaaaaagaaatagaactgcccaaggaagtgccagagaagctgccagaagctgcagatttcggcaccacctccagtctccatttcgttcacatgcgcggcctcccttttcaagccaatgcccaggatatcatcaatttttttgcccccctgaaaccggtgcgaattaccatggaatattcctcgagtggtaaagcaacaggcgaggccgatgttcactttgaaacacacgaagacgccgtggctgcaatgctgaaggatcggtcccatgtgcaccatcggtatattgagctctttctaaatagttgccctaaaggcaagtag

SEQ ID NO: 279701 - DNA, 1362 bp, Artificial Sequence
  derived and/or modified sequence
gcagctgccgtgcccactcgatcttattcccaggttcgaggtagacgggaaggccctggtgccaggtctctgccaggacgagttcacgcaccgcctcgcccaagcgtccccccttgcgcgccacggggtcatgctcgcggaagcgcaactttggctgcacacccccctccttcaacactgtgtagctattgggctttagaacaggggaaactgagtcaggcctctggattgctgctggtgctgtttagtccacgtgtgtcaggacggctcggctctgaaagcaagacgacgtatctggaagacctgcctcctccaccagagtatgaattggcaccttctaaactggaagaagaggtcgacgatgtgttcttaatacgagcccaaggactcccttggagctgcacaatggaggacgtactcaattttttcagcgactgccgaatcagaaatggcgaaaacggaattcacttccttctgaaccgtgatggaaaaagacgcggagacgctctgatcgaaatggagtccgaacaggatgtgcagaaggcgctagagaagcatcgcatgtatatgggtcagcgatatgtggaagtctacgaaataaataatgaagatgtggacgctcttatgaagtctctgcaggtgaagagttcccccgtggtgaatgatggtgtcgtgaggctcaggggtctgccatacagctgtaacgagaaagacatcgtggatttctttgccggattgaacattgtcgacattacctttgtcatggattatcgcggacggaggaaaacaggcgaggcttacgtgcagttcgaggaacctgagatggcaaaccaggctctcctcaagcaccgggaggaaattgggaatagatacatcgaaatattcccttcgaggaggaatgaggtccgcactcatgtgggctcctacaaggggaagaaaatcgcctccttcccaacggcaaaatacattactgaacctgagatggtgtttgaggaacacgaagtcaatgaggacatccagcccatgacagctttcgaatccgagaaagaaatagaacttcctaaagaagttcccgaaaagttaccagaagcagcagatttcggaacaactagcagcctgcacttcgtgcatatgcgcggactccctttccaggcaaacgcccaggatatcataaatttttttgcacctctgaagcccgttcggatcaccatggagtattcctcttctggaaaagctaccggtgaggcagatgtgcacttcgagacccacgaggacgccgttgcagcgatgcttaaagacagatcgcatgttcaccaccggtacatcgaactgttcctgaactcatgccccaagggcaaatag

SEQ ID NO: 279702 - DNA, 1254 bp, Artificial Sequence
  derived and/or modified sequence
tgaccaccaccgtccaccctctgttcctattgggcattagaacaaggaaaactttctcaggcgtccgggctcttactagtgctattttccccacgtgtgagtggtaggctggggtccgtatcggttgccggtgtgaatgtcgaagctctgttccccgcttggcctatggagtctaagaccacgtaccttgaggacctgcctccaccccctgagtacgaattagccccaagtaaactggaggaggaggtggatgacgtatttctaattcgtgcacaagggctcccatggtcttgcactatggaagacgtgctgaattttttctccgattgccggattcggaacggagagaacggcatccattttttgctgaaccgggatggcaaacggagaggcgacgctctgatcgaaatggaatccgagcaggatgtgcaaaaggccctggagaagcaccgaatgtacatggggcagcgctatgtggaggtgtacgagatcaataacgaggatgtggacgccttaatgaaatcactgcaggttaaatcttctccggtggtaaatgacggcgtggtcagactgcgcggtttgccatatagctgtaatgaaaaggacatcgtagacttctttgctggtctcaacatcgtggacatcaccttcgtgatggattaccgtggtcgcagaaagacgggagaggcttatgtgcagttcgaggagcccgaaatggctaaccaggcgctgctgaaacaccgagaagagattgggaacaggtacattgagatcttccctagccgtagaaacgaggtgcggacccacgtaggctcttataagggcaaaaaaattgcttcgttccctaccgcaaagtacattacagaacccgagatggtttttgaagaacatgaagttaacgaggatatccagccgatgacagctttcgaaagcgagaaggagatagagctccccaaggaagtgcccgaaaaattaccggaagccgcagactttggtacaactagttcccttcactttgttcacatgcgcggactccctttccaggcaaacgctcaagacattataaacttttttgcccctttgaaaccagtccggatcacaatggagtacagtagttctgggaaggcaactggcgaagctgatgtgcacttcgagacacacgaggacgctgtcgccgcaatgctcaaggatcgatcacacgtccaccatcggtatatagaactgtttctgaactcgtgtcccaaagggaagtag

SEQ ID NO: 279703 - DNA, 1362 bp, Artificial Sequence
  derived and/or modified sequence
gccgccgccgtgcccaccagaagctacagccaggtgagaggcagaagagagggccccggcgccagaagcctgcccggcagagtgcacgccccccccagacccagcgtgcccccctgcgcccccagaggccacgccagaggcagcgccaccctggccgcccaccccccccccagcaccctgtgcagctactgggccctggagcagggcaagctgagccaggccagcggcctgctgctggtgctgttcagccccagagtgagcggcagactgggcagcgagagcaagaccacctacctggaggacctgccccccccccccgagtacgagctggcccccagcaagctggaggaggaggtggacgacgtgttcctgatcagagcccagggcctgccctggagctgcaccatggaggacgtgctgaacttcttcagcgactgcagaatcagaaacggcgagaacggcatccacttcctgctgaacagagacggcaagagaagaggcgacgccctgatcgagatggagagcgagcaggacgtgcagaaggccctggagaagcacagaatgtacatgggccagagatacgtggaggtgtacgagatcaacaacgaggacgtggacgccctgatgaagagcctgcaggtgaagagcagccccgtggtgaacgacggcgtggtgagactgagaggcctgccctacagctgcaacgagaaggacatcgtggacttcttcgccggcctgaacatcgtggacatcaccttcgtgatggactacagaggcagaagaaagaccggcgaggcctacgtgcagttcgaggagcccgagatggccaaccaggccctgctgaagcacagagaggagatcggcaacagatacatcgagatcttccccagcagaagaaacgaggtgagaacccacgtgggcagctacaagggcaagaagatcgccagcttccccaccgccaagtacatcaccgagcccgagatggtgttcgaggagcacgaggtgaacgaggacatccagcccatgaccgccttcgagagcgagaaggagatcgagctgcccaaggaggtgcccgagaagctgcccgaggccgccgacttcggcaccaccagcagcctgcacttcgtgcacatgagaggcctgcccttccaggccaacgcccaggacatcatcaacttcttcgcccccctgaagcccgtgagaatcaccatggagtacagcagcagcggcaaggccaccggcgaggccgacgtgcacttcgagacccacgaggacgccgtggccgccatgctgaaggacagaagccacgtgcaccacagatacatcgagctgttcctgaacagctgccccaagggcaagtag

SEQ ID NO: 279704 - DNA, 1254 bp, Artificial Sequence
  derived and/or modified sequence
tgacccccccccagcaccctgtgcagctactgggccctggagcagggcaagctgagccaggccagcggcctgctgctggtgctgttcagccccagagtgagcggcagactgggcagcgtgagcgtggccggcgtgaacgtggaggccctgttccccgcctggcccatggagagcaagaccacctacctggaggacctgccccccccccccgagtacgagctggcccccagcaagctggaggaggaggtggacgacgtgttcctgatcagagcccagggcctgccctggagctgcaccatggaggacgtgctgaacttcttcagcgactgcagaatcagaaacggcgagaacggcatccacttcctgctgaacagagacggcaagagaagaggcgacgccctgatcgagatggagagcgagcaggacgtgcagaaggccctggagaagcacagaatgtacatgggccagagatacgtggaggtgtacgagatcaacaacgaggacgtggacgccctgatgaagagcctgcaggtgaagagcagccccgtggtgaacgacggcgtggtgagactgagaggcctgccctacagctgcaacgagaaggacatcgtggacttcttcgccggcctgaacatcgtggacatcaccttcgtgatggactacagaggcagaagaaagaccggcgaggcctacgtgcagttcgaggagcccgagatggccaaccaggccctgctgaagcacagagaggagatcggcaacagatacatcgagatcttccccagcagaagaaacgaggtgagaacccacgtgggcagctacaagggcaagaagatcgccagcttccccaccgccaagtacatcaccgagcccgagatggtgttcgaggagcacgaggtgaacgaggacatccagcccatgaccgccttcgagagcgagaaggagatcgagctgcccaaggaggtgcccgagaagctgcccgaggccgccgacttcggcaccaccagcagcctgcacttcgtgcacatgagaggcctgcccttccaggccaacgcccaggacatcatcaacttcttcgcccccctgaagcccgtgagaatcaccatggagtacagcagcagcggcaaggccaccggcgaggccgacgtgcacttcgagacccacgaggacgccgtggccgccatgctgaaggacagaagccacgtgcaccacagatacatcgagctgttcctgaacagctgccccaagggcaagtag

SEQ ID NO: 279705 - protein, 17 aa, Artificial Sequence
  derived and/or modified sequence
ATKKNGRKLCLDLQAAL

SEQ ID NO: 279706 - protein, 279 aa, Artificial Sequence
  derived and/or modified sequence
MKIIILLGFLGATLSAPLIPQRLMSASNSNELLLNLNNGQLLPLQLQGPLNSWIPPFSGILQQQQQAQIPGLSQFSLSALDQFAGLLPNQIPLTGEASFAQGAQAGQVDPLQLQTPPQTQPGPSHVMPYVFSFKMPQEQGQMFQYYPVYMVLPWEQPQQTVPRSPQQTRQQQYEEQIPFYAQFGYIPQLAEPAISGGQQQLAFDPQLGTAPEIAVMSTGEEIPYLQKEAINFRHDSAGVFMPSTSPKPSTTNVFTSAVDQTITPELPEEKDKTDSLREP

SEQ ID NO: 279707 - DNA, 1319 bp, Artificial Sequence
  derived and/or modified sequence
ttataaagctaaagatcacaacttattttctagatatatcatacgaaaatgaaaattataattcttcttggattcctgggagccacattgtcagccccacttatcccacagcgtctcatgtctgccagcaatagcaatgagttacttcttaatcttaataatggtcaacttttgccactacaacttcagggcccacttaattcatggattccacctttctctggaattttacaacagcagcagcaggctcaaattccaggactctcccagttctctttatcagctctagaccagtttgctggactgctcccaaatcagatacccttaacaggagaggccagttttgcccaaggagcccaggcaggccaagttgatcccttacagcttcaaacaccgcctcagacacaaccaggccccagtcacgtgatgccctatgtattctccttcaaaatgcctcaagagcaaggacagatgtttcaatactatccagtttacatggtcctaccctgggaacaacctcagcaaacagttccaaggtcacctcaacaaacaagacagcaacagtatgaggagcagataccattctatgctcaatttggatacattccacaactagcagaacctgctatatcaggaggacagcagcaactagcttttgatccccaactaggcacagctcctgaaattgctgtgatgtcaacaggagaagagataccatatttacaaaaagaagcgatcaactttagacatgacagtgcaggagttttcatgccctcaacttcaccaaaacccagcacaaccaatgttttcacttctgctgtagaccaaactattaccccagagctcccagaagagaaggacaagactgacagcctaagggaaccataagaagttgccctgatcattcagacattttgggaaaaagatgtggccatgccttggatataattttaggctattagcttcctcaatactagtatcagttctttggaatacatgaaatatcttgactcttctcctaaatttgtttttacttatacatgttattaaactctttaaatatgtcatagaaaataatacaatcatgtaatgagtcttgtcttacaaaattatatgtctcttcaaatatcctatcattgtataatatggaatataataacacagaataaagctagtatcattaaatcaattggataattgcattagtaaatgatgcctctgcaaaatggtagtacccatgaagatatgtatattgtcattggatgtatgatgagtgttgtgattggaactgatgaagtaaaataagtatctagatttga

SEQ ID NO: 279708 - DNA, 906 bp, Artificial Sequence
  derived and/or modified sequence
atgaagttccagttcaccagaaacaacaacggcgccagcatgaagagcagaatcgagagcgtgctgagacagatgctgaacaacagcggcaacctggagatcaaccccagcaccgagatcaccagcctgaccgaccaggccgccgccaactggctgatcaacgagtgcggcgccggccccgacctgatcaccctgagcgagcagagaatcctgggcggcaccgaggccgaggagggcagctggccctggcaggtgagcctgagactgaacaacgcccaccactgcggcggcagcctgatcaacaacatgtggatcctgaccgccgcccactgcttcagaagcaacagcaaccccagagactggatcgccaccagcggcatcagcaccaccttccccaagctgagaatgagagtgagaaacatcctgatccacaacaactacaagagcgccacccacgagaacgacatcgccctggtgagactggagaacagcgtgaccttcaccaaggacatccacagcgtgtgcctgcccgccgccacccagaacatcccccccggcagcaccgcctacgtgaccggctggggcgcccaggagtacgccggccacaccgtgcccgagctgagacagggccaggtgagaatcatcagcaacgacgtgtgcaacgccccccacagctacaacggcgccatcctgagcggcatgctgtgcgccggcgtgccccagggcggcgtggacgcctgccagggcgacagcggcggccccctggtgcaggaggacagcagaagactgtggttcatcgtgggcatcgtgagctggggcgaccagtgcggcctgcccgacaagcccggcgtgtacaccagagtgaccgcctacctggactggatcagacagcagaccggcatctag

SEQ ID NO: 279709 - DNA, 906 bp, Artificial Sequence
  derived and/or modified sequence
atgaaatttcaattcacgcgtaacaacaacggcgcgtcaatgaaaagccgcattgagagcgtcctgaggcagatgctgaacaatagtgggaatcttgagatcaatccaagcacagaaattaccagtctcactgaccaagccgccgccaattggctcatcaatgagtgtggcgccggccccgacttgatcactctgagcgaacagcgtatcctgggaggaacggaagcagaggagggaagctggccatggcaggtgagtctgcgattgaataatgcccatcattgcgggggcagcctcatcaacaacatgtggatcctgactgcagcgcactgctttaggtccaatagcaacccacgtgattggattgcaacatcaggcatcagcaccacctttcccaagcttaggatgcgggtccgcaatatactgatccacaataattataaatccgccacccacgagaacgacatcgcgttggtcagactcgagaattccgttaccttcactaaagatattcacagcgtgtgcctacctgcagccacgcagaatattccaccagggtctacagcctatgtcacagggtggggggcccaggaatatgcgggacataccgtccccgaactaagacagggacaagtgagaattatcagcaacgacgtgtgtaacgcaccgcattcttacaacggtgctatcttaagtggcatgttgtgcgctggggtaccgcagggcggggtcgacgcatgccagggagactctgggggtcctttggtccaagaggatagccgaaggttgtggtttatcgtgggcattgtatcctggggagaccagtgtggtttaccagataaaccaggagtgtacacccgggtgaccgcttatctggactggatacgtcaacagaccggaatctag

SEQ ID NO: 279710 - DNA, 906 bp, Artificial Sequence
  derived and/or modified sequence
atgaagttccagttcaccaggaacaacaacggggcctccatgaagagccgcatcgagagcgtgctgcggcagatgctgaacaacagcggcaacctggagatcaaccccagcacagagatcaccagcctgacagaccaggccgccgccaactggctgatcaatgaatgtggggccggccctgacctgatcaccctgtctgagcagaggatcctgggcggcacagaggccgaggagggctcctggccctggcaggtgtccctgcggctgaacaatgcccaccactgcggcggcagcctcatcaacaacatgtggatcctgacagctgcccactgcttccgcagcaacagcaacccccgggactggatcgccaccagcggcatcagcaccaccttccccaagctgaggatgagggtgaggaacatcctgatccacaacaactacaagagcgccacccatgaaaatgacatcgccctggtgcggctggagaacagcgtgaccttcaccaaggacatccacagcgtgtgcctgcctgctgccacccagaacatccccccaggcagcacagcctacgtgacaggctggggcgcccaggagtatgccggccacacagtgcctgagctgcggcagggccaggtgcgcatcatcagcaatgatgtgtgcaatgccccccacagctacaatggagccatcctgagcggcatgctgtgtgccggcgtgccccagggcggcgtggatgcctgccagggcgacagcggcggccccctggtgcaggaggacagccggcggctgtggttcatcgtgggcatcgtgtcctggggagaccagtgtggcctgcctgacaagccaggagtgtacaccagggtgacagcctacctggactggatccggcagcagacaggcatctag

SEQ ID NO: 279711 - DNA, 906 bp, Artificial Sequence
  derived and/or modified sequence
atgaagttccagttcacccggaacaacaacggcgccagcatgaagagtagaattgagtcggtgctgcgccaaatgctaaataattctggcaacctggagatcaaccccagcaccgaaatcactagtctgaccgaccaggccgccgccaattggcttattaacgaatgtggggccggccccgacctgataaccttgtctgagcagaggatccttgggggcactgaagccgaagaaggtagttggccctggcaggtatctctgcgtctgaacaacgcccaccactgtggaggttcccttattaataacatgtggattcttacagccgcacactgtttcagatctaacagtaatccccgggactggatcgcaacatcaggcatatccacgactttccccaaactgagaatgcgggtgaggaacattctgatccataataactataaatccgccacccacgagaatgatattgccttagtgcgcctcgagaattccgtgacattcacgaaagacatccactccgtgtgtttacccgccgctactcagaacatccctcccggttctacggcatacgttactggatggggagctcaagagtacgccggccataccgttccagagttgcgccagggccaggtccggatcatatcgaatgatgtttgtaacgcacctcattcctataatggtgccatactctccggaatgttatgtgcaggtgttccccagggcggggtcgacgcctgtcagggcgactctggcggtccactggtgcaagaggattcccggcggctgtggttcatagtggggattgttagttggggagaccaatgcggacttcccgacaaaccaggggtgtacaccagagtcaccgcttatttagattggattcgacagcagacggggatctag

SEQ ID NO: 279712 - DNA, 906 bp, Artificial Sequence
  derived and/or modified sequence
atgaaattccagtttacgcgtaacaacaacggtgcttcaatgaagtctcgaattgaatcagtgctccgccagatgctgaataattcagggaacctggagattaacccctccacggagattacatctctaacagaccaagccgctgctaactggctgataaatgagtgtggcgctggacccgacttgataactctgagcgaacaacgcatattggggggaacagaagccgaagaaggtagttggccatggcaagtctcgctgcgccttaataatgcccaccattgcggagggagtctcatcaataacatgtggatccttacagccgctcactgtttccgtagcaactcaaatcccagggattggattgctacctcaggaatttctacaacatttcctaagctgagaatgcgggttagaaacatacttattcataacaactataagagcgctacgcacgaaaacgacatcgcccttgtgcgattagagaacagtgttacctttaccaaagacatccactccgtttgtttgcccgcagcaacgcaaaacataccccctggtagtaccgcttacgttaccgggtggggagcccaagaatacgctggtcacaccgtgcccgaacttcgccaggggcaggtcaggattatttccaacgatgtatgcaacgctccccacagctacaacggcgctatcctgtccggcatgctgtgtgcgggtgtgccacagggtggggtggacgcgtgtcagggagattctgggggtccactggtacaagaggacagtcggaggctgtggtttatagtgggcattgtcagctggggcgatcagtgtggccttccagacaagcccggagtgtacacacgcgtgaccgcatacctggattggatccgccagcagactgggatttag

SEQ ID NO: 279713 - DNA, 906 bp, Artificial Sequence
  derived and/or modified sequence
atgaagttccaattcacacgtaataataatggcgcctcaatgaagagtcgcattgagtccgttctgagacagatgctcaacaactcagggaatctggaaattaatccctctaccgaaatcaccagcctgaccgatcaggccgcagcaaactggctcatcaacgaatgcggcgcaggaccagacttgataaccttatctgaacagagaattctgggcgggacagaggctgaggagggcagttggccttggcaggtgagcctgagactaaataatgcgcatcattgcggcggttccctaattaataatatgtggatattaacggcagctcactgcttcagatcaaacagtaatccaagggactggatcgccacatccggtatttccacaacatttcccaaattacggatgcgggtgcgcaacattctgattcataacaattataagtccgcaactcacgagaacgatatcgccttggtgcgactcgagaattccgttacctttactaaggacattcactccgtgtgcttacccgcagctactcagaatatacctccaggatccacagcatacgtgactggctggggagcacaggaatatgccggacacacagttcccgaattgaggcagggacaagtgagaattatctctaacgatgtttgcaacgccccacattcctacaatggcgctatcctctcaggtatgctctgtgctggcgtaccgcaaggaggtgtggacgcctgtcaaggagatagcggcgggccacttgtccaagaagattccagacgcctgtggtttattgtgggaattgtaagctggggggatcaatgcggcctcccagacaaacccggcgtgtacaccagggtgaccgcctatttagactggatccgtcagcagacgggcatctag

SEQ ID NO: 279714 - DNA, 906 bp, Artificial Sequence
  derived and/or modified sequence
atgaagttccaattcacacgtaataataatggcgcctcaatgaagagtcgcattgagtccgttctgagacagatgctcaacaactcagggaatctggaaattaatccctctaccgaaatcaccagcctgaccgatcaggccgcagcaaactggctcatcaacgaatgcggcgcaggaccagacttgataaccttatctgaacagagaattctgggcgggacagaggctgaggagggcagttggccttggcaggtgagcctgagactaaataatgcgcatcattgcggcggttccctaattaataacatgtggattctaacagccgcccactgcttccgttcaaactctaacccacgggattggatcgccacctccggtatctctacaaccttcccaaaactcagaatgcgggtgaggaacatattgattcacaataattataagtctgccacccacgaaaacgatatcgccctagtcaggttggaaaactcggtaacgttcaccaaggacattcactcggtctgtctgccagccgccacacagaatatcccacccggatccactgcttatgtgactggctggggagcacaggaatatgccggacacactgttcctgagttacggcaaggacaggtgagaatcataagcaatgatgtgtgtaacgccccccattcttataacggggccatactgagtgggatgttgtgtgcgggcgtgccacagggcggtgtggatgcttgccaaggggactccggaggacccctggtgcaagaggattcgagacggctttggttcatagtggggatagtttcctggggcgaccagtgcggactccctgacaaacctggggtctacacaagagtgacggcatacttagactggattagacagcagacgggaatctag

SEQ ID NO: 279715 - RNA, 906 nt, Artificial Sequence
  derived and/or modified sequence
augaaguuccaauucacacguaauaauaauggcgccucaaugaagagucgcauugaguccguucugagacagaugcucaacaacucagggaaucuggaaauuaaucccucuaccgaaaucaccagccugaccgaucaggccgcagcaaacuggcucaucaacgaaugcggcgcaggaccagacuugauaaccuuaucugaacagagaauucugggcgggacagaggcugaggagggcaguuggccuuggcaggugagccugagacuaaauaaugcgcaucauugcggcgguucccuaauuaauaauauguggauauuaacggcagcucacugcuucagaucaaacaguaauccaagggacuggaucgccacauccgguauuuccacaacauuucccaaauuacggaugcgggugcgcaacauucugauucauaacaauuauaaguccgcaacucacgagaacgauaucgccuuggugcgacucgagaauuccguuaccuuuacuaaggacauucacuccgugugcuuacccgcagcuacucagaauauaccuccaggauccacagcauacgugacuggcuggggagcacaggaauaugccggacacacaguucccgaauugaggcagggacaagugagaauuaucucuaacgauguuugcaacgccccacauuccuacaauggcgcuauccucucagguaugcucugugcuggcguaccgcaaggagguguggacgccugucaaggagauagcggcgggccacuuguccaagaagauuccagacgccugugguuuauugugggaauuguaagcuggggggaucaaugcggccucccagacaaacccggcguguacaccagggugaccgccuauuuagacuggauccgucagcagacgggcaucuag

SEQ ID NO: 279716 - RNA, 906 nt, Artificial Sequence
  derived and/or modified sequence
augaaguuccaauucacacguaauaauaauggcgccucaaugaagagucgcauugaguccguucugagacagaugcucaacaacucagggaaucuggaaauuaaucccucuaccgaaaucaccagccugaccgaucaggccgcagcaaacuggcucaucaacgaaugcggcgcaggaccagacuugauaaccuuaucugaacagagaauucugggcgggacagaggcugaggagggcaguuggccuuggcaggugagccugagacuaaauaaugcgcaucauugcggcgguucccuaauuaauaacauguggauucuaacagccgcccacugcuuccguucaaacucuaacccacgggauuggaucgccaccuccgguaucucuacaaccuucccaaaacucagaaugcgggugaggaacauauugauucacaauaauuauaagucugccacccacgaaaacgauaucgcccuagucagguuggaaaacucgguaacguucaccaaggacauucacucggucugucugccagccgccacacagaauaucccacccggauccacugcuuaugugacuggcuggggagcacaggaauaugccggacacacuguuccugaguuacggcaaggacaggugagaaucauaagcaaugauguguguaacgccccccauucuuauaacggggccauacugagugggauguugugugcgggcgugccacagggcgguguggaugcuugccaaggggacuccggaggaccccuggugcaagaggauucgagacggcuuugguucauaguggggauaguuuccuggggcgaccagugcggacucccugacaaaccuggggucuacacaagagugacggcauacuuagacuggauuagacagcagacgggaaucuag

SEQ ID NO: 279717 - DNA, 219 bp, Artificial Sequence
  derived and/or modified sequence
atgtcataccagcagcagcagtgtaagcagccctgccaaccaccgcctgtgtgtccaacgccaaagtgtccagaaccttgtccccctcctaagtgcccagagccctgtcctcctccaaagtgccctcagccatgtcctccacagcagtgtcaacaaaaataccctccagttaccccatctccaccatgtcaacctaagtatcctcccaaaagtaagtag

SEQ ID NO: 279718 - protein, 1098 aa, Artificial Sequence
  derived and/or modified sequence
MTLQELVHKAASCYMDRVAVCFDECNNQLPVYYTYKTVVNAASELSNFLLLHCDFQGIREIGLYCQPGIDLPSWILGILQVPAAYVPIEPDSPPSLSTHFMKKCNLKYILVEKKQINKFKSFHETLLNYDTFTVEHNDLVLFRLHWKNTEVNLMLNDGKEKYEKEKIKSISSEHVNEEKAEEHMDLRLKHCLAYVLHTSGTTGIPKIVRVPHKCIVPNIQHFRVLFDITQEDVLFLASPLTFDPSVVEIFLALSSGASLLIVPTSVKLLPSKLASVLFSHHRVTVLQATPTLLRRFGSQLIKSTVLSATTSLRVLALGGEAFPSLTVLRSWRGEGNKTQIFNVYGITEVSSWATIYRIPEKTLNSTLKCELPVQLGFPLLGTVVEVRDTNGFTIQEGSGQVFLGGRNRVCFLDDEVTVPLGTMRATGDFVTVKDGEIFFLGRKDSQIKRHGKRLNIELVQQVAEELQQVESCAVTWYNQEKLILFMVSKDASVKEYIFKELQKYLPSHAVPDELVLIDSLPFTSHGKIDVSELNKIYLNYINLKSENKLSGKEDLWEKLQYLWKSTLNLPEDLLRVPDESLFLNSGGDSLKSIRLLSEIEKLVGTSVPGLLEIILSSSILEIYNHILQTVVPDEDVTFRKSCATKRKLSDINQEEASGTSLHQKAIMTFTCHNEINAFVVLSRGSQILSLNSTRFLTKLGHCSSACPSDSVSQTNIQNLKGLNSPVLIGKSKDPSCVAKVSEEGKPAIGTQKMELHVRWRSDTGKCVDASPLVVIPTFDKSSTTVYIGSHSHRMKAVDFYSGKVKWEQILGDRIESSACVSKCGNFIVVGCYNGLVYVLKSNSGEKYWMFTTEDAVKSSATMDPTTGLIYIGSHDQHAYALDIYRKKCVWKSKCGGTVFSSPCLNLIPHHLYFATLGGLLLAVNPATGNVIWKHSCGKPLFSSPQCCSQYICIGCVDGNLLCFTHFGEQVWQFSTSGPIFSSPCTSPSEQKIFFGSHDCFIYCCNMKGHLQWKFETTSRVYATPFAFHNYNGSNEMLLAAASTDGKVWILESQSGQLQSVYELPGEVFSSPVVLESMLIIGCRDNYVYCLDLLGGNQK

SEQ ID NO: 279719 - DNA, 91 bp, Artificial Sequence
  derived and/or modified sequence
gaatcaacccgagcggaaaggaatggaatggaatggaatcaacacgaatggaatggaacggaatggaatgggatgggatgaaatggaatgg

SEQ ID NO: 279720 - DNA, 3297 bp, Artificial Sequence
  derived and/or modified sequence
atgaccttacaagaactcgttcacaaagccgcatcttgctacatggacagagtggcagtgtgcttcgacgagtgcaataatcaactgcccgtatattacacctacaagacagtggtgaacgcagcttccgagctttccaactttctgcttctccactgtgacttccagggaatcagagaaattggcctttattgtcagccaggtatcgatcttccctcgtggatactcggcattctgcaggttccggctgcatatgttcccattgaacctgatagtccaccatcgctgagcacccatttcatgaaaaagtgtaatctcaaatatatcctcgtggagaaaaagcagatcaacaagttcaaatcttttcatgagacccttctgaactacgacacattcactgttgaacacaacgatttggtgctatttagattacactggaagaacactgaggtgaatctgatgctaaacgacggcaaggagaagtacgaaaaggaaaagatcaaatccatatcaagcgagcatgttaacgaagagaaagcagaggagcacatggacctgagacttaagcactgtcttgcctacgtcctgcataccagcggtacaactggtatacccaagatcgtgcgcgttccgcataagtgtatagtgcctaacattcagcactttcgggttttgttcgacatcacccaggaagatgtactgtttcttgcttcaccgctcacattcgatccgtccgtggtggagatctttttggcactgtcatctggtgcaagtctcctgatcgtgcctacctctgttaaattactgcctagtaaactcgctagtgtgctcttttcacaccaccgtgtgactgtcttgcaagccactcccacccttctcagacggttcggaagtcaattgatcaaatctactgtactctccgcaaccacctcacttcgtgtcctggctctcggaggtgaggcctttccttcgctgactgtgctaaggagctggaggggcgagggaaataagacacagatcttcaacgtgtatggcatcacagaggtttcatcatgggctaccatctacagaattccagaaaaaactttaaattctactctgaagtgcgagctccccgtgcaactggggtttccactgttagggacagtcgtcgaagtaagggacacgaacgggttcactattcaggaaggaagtggacaggtcttcttaggcggtcgaaatcgagtatgctttcttgacgacgaagtgaccgtacccctgggcaccatgagagcaacgggggacttcgttaccgtcaaagatggtgaaatcttttttttagggaggaaagactcacagattaagcgtcatgggaaacggctgaacattgaactggtgcagcaggttgcggaggaattgcagcaagtggaatcttgtgctgtcacctggtataaccaggaaaaattgattctgttcatggtcagcaaggatgcctcagtgaaagagtatatttttaaggaactccagaagtatctcccgtctcatgcagtgccagacgagctggtgctgattgactccttaccattcacctcccatgggaagattgacgtgtctgagctgaataaaatctaccttaactacattaacctcaagagcgagaacaaactgtctgggaaggaagatttatgggaaaaactgcagtatctctggaagagtactcttaacttaccagaggatctcctgcgcgtgccggatgaaagccttttcctgaactctgggggagactcacttaaatccattcgcctcctgtcagaaatcgaaaaattggtaggcaccagcgtacccggactattggaaattatactctcttctagtattctggagatatacaaccacatcctgcagaccgtagtgcccgacgaggacgtgacttttcggaagtcttgtgccaccaagagaaagttgtctgatattaaccaggaagaggcctctgggacgagcctacatcagaaagctattatgacatttacctgccacaacgagattaacgccttcgtggtgctctctagggggtcccagattttgtcactcaattccacgcgcttcttgactaaattgggacattgttcttcagcctgtccctccgatagcgtaagtcagaccaacatccagaatttgaaaggcctaaactctcctgtgcttattgggaaaagtaaggatcctagctgtgttgctaaggtgtcagaggagggtaagcccgctatcggtacacagaagatggagctgcatgtgcggtggaggagtgacactgggaagtgtgttgacgccagccctttggttgttatccctaccttcgacaaaagcagcacaaccgtctatattggtagtcactcccatcgtatgaaggctgtggatttttacagcggtaaggtaaaatgggaacagattctgggggatcggatcgagtctagcgcatgtgttagcaagtgcggcaattttatcgtggtagggtgctataacggattagtttacgtgcttaaatcaaattcaggggagaaatactggatgttcaccacagaagacgccgtcaagtcatctgcgacaatggaccccaccaccggacttatctacatcggtagtcatgatcagcacgcatacgctctcgatatctatcgtaaaaagtgcgtgtggaaatcgaagtgcggcggtactgtgttttcctctccctgtctgaacctgatccctcatcatctgtattttgccactctggggggactcctgcttgccgtgaacccagcaactggcaacgtgatctggaagcattcttgcgggaagcccctgtttagcagccctcagtgttgcagtcagtatatctgtataggctgcgtggacggtaacctactgtgtttcacacacttcggagaacaggtttggcagttctccacatcagggccaattttcagttccccctgtacttctccttcggaacagaagatttttttcggaagtcatgactgtttcatttattgttgtaacatgaaaggccaccttcagtggaagttcgaaaccacttccagagtctacgccaccccttttgcgttccataattataatggatctaatgagatgctgcttgcggcagcttccaccgatgggaaagtgtggatactcgagtctcagtccggtcaacttcaatctgtgtatgaactccctggagaggtgtttagttcccctgtagtacttgagagtatgcttatcatagggtgtagggacaactacgtgtactgtctggacctcctcggtggcaatcagaagtag

SEQ ID NO: 279721 - DNA, 3297 bp, Artificial Sequence
  derived and/or modified sequence
atgaccctgcaggagctggtgcacaaggccgccagctgctacatggacagagtggccgtgtgcttcgacgagtgcaacaaccagctgcccgtgtactacacctacaagaccgtggtgaacgccgccagcgagctgagcaacttcctgctgctgcactgcgacttccagggcatcagagagatcggcctgtactgccagcccggcatcgacctgcccagctggatcctgggcatcctgcaggtgcccgccgcctacgtgcccatcgagcccgacagcccccccagcctgagcacccacttcatgaagaagtgcaacctgaagtacatcctggtggagaagaagcagatcaacaagttcaagagcttccacgagaccctgctgaactacgacaccttcaccgtggagcacaacgacctggtgctgttcagactgcactggaagaacaccgaggtgaacctgatgctgaacgacggcaaggagaagtacgagaaggagaagatcaagagcatcagcagcgagcacgtgaacgaggagaaggccgaggagcacatggacctgagactgaagcactgcctggcctacgtgctgcacaccagcggcaccaccggcatccccaagatcgtgagagtgccccacaagtgcatcgtgcccaacatccagcacttcagagtgctgttcgacatcacccaggaggacgtgctgttcctggccagccccctgaccttcgaccccagcgtggtggagatcttcctggccctgagcagcggcgccagcctgctgatcgtgcccaccagcgtgaagctgctgcccagcaagctggccagcgtgctgttcagccaccacagagtgaccgtgctgcaggccacccccaccctgctgagaagattcggcagccagctgatcaagagcaccgtgctgagcgccaccaccagcctgagagtgctggccctgggcggcgaggccttccccagcctgaccgtgctgagaagctggagaggcgagggcaacaagacccagatcttcaacgtgtacggcatcaccgaggtgagcagctgggccaccatctacagaatccccgagaagaccctgaacagcaccctgaagtgcgagctgcccgtgcagctgggcttccccctgctgggcaccgtggtggaggtgagagacaccaacggcttcaccatccaggagggcagcggccaggtgttcctgggcggcagaaacagagtgtgcttcctggacgacgaggtgaccgtgcccctgggcaccatgagagccaccggcgacttcgtgaccgtgaaggacggcgagatcttcttcctgggcagaaaggacagccagatcaagagacacggcaagagactgaacatcgagctggtgcagcaggtggccgaggagctgcagcaggtggagagctgcgccgtgacctggtacaaccaggagaagctgatcctgttcatggtgagcaaggacgccagcgtgaaggagtacatcttcaaggagctgcagaagtacctgcccagccacgccgtgcccgacgagctggtgctgatcgacagcctgcccttcaccagccacggcaagatcgacgtgagcgagctgaacaagatctacctgaactacatcaacctgaagagcgagaacaagctgagcggcaaggaggacctgtgggagaagctgcagtacctgtggaagagcaccctgaacctgcccgaggacctgctgagagtgcccgacgagagcctgttcctgaacagcggcggcgacagcctgaagagcatcagactgctgagcgagatcgagaagctggtgggcaccagcgtgcccggcctgctggagatcatcctgagcagcagcatcctggagatctacaaccacatcctgcagaccgtggtgcccgacgaggacgtgaccttcagaaagagctgcgccaccaagagaaagctgagcgacatcaaccaggaggaggccagcggcaccagcctgcaccagaaggccatcatgaccttcacctgccacaacgagatcaacgccttcgtggtgctgagcagaggcagccagatcctgagcctgaacagcaccagattcctgaccaagctgggccactgcagcagcgcctgccccagcgacagcgtgagccagaccaacatccagaacctgaagggcctgaacagccccgtgctgatcggcaagagcaaggaccccagctgcgtggccaaggtgagcgaggagggcaagcccgccatcggcacccagaagatggagctgcacgtgagatggagaagcgacaccggcaagtgcgtggacgccagccccctggtggtgatccccaccttcgacaagagcagcaccaccgtgtacatcggcagccacagccacagaatgaaggccgtggacttctacagcggcaaggtgaagtgggagcagatcctgggcgacagaatcgagagcagcgcctgcgtgagcaagtgcggcaacttcatcgtggtgggctgctacaacggcctggtgtacgtgctgaagagcaacagcggcgagaagtactggatgttcaccaccgaggacgccgtgaagagcagcgccaccatggaccccaccaccggcctgatctacatcggcagccacgaccagcacgcctacgccctggacatctacagaaagaagtgcgtgtggaagagcaagtgcggcggcaccgtgttcagcagcccctgcctgaacctgatcccccaccacctgtacttcgccaccctgggcggcctgctgctggccgtgaaccccgccaccggcaacgtgatctggaagcacagctgcggcaagcccctgttcagcagcccccagtgctgcagccagtacatctgcatcggctgcgtggacggcaacctgctgtgcttcacccacttcggcgagcaggtgtggcagttcagcaccagcggccccatcttcagcagcccctgcaccagccccagcgagcagaagatcttcttcggcagccacgactgcttcatctactgctgcaacatgaagggccacctgcagtggaagttcgagaccaccagcagagtgtacgccacccccttcgccttccacaactacaacggcagcaacgagatgctgctggccgccgccagcaccgacggcaaggtgtggatcctggagagccagagcggccagctgcagagcgtgtacgagctgcccggcgaggtgttcagcagccccgtggtgctggagagcatgctgatcatcggctgcagagacaactacgtgtactgcctggacctgctgggcggcaaccagaagtag

SEQ ID NO: 279722 - DNA, 3297 bp, Artificial Sequence
  derived and/or modified sequence
atgacgctacaagagttagtgcacaaagctgccagctgctatatggatcgcgtggccgtgtgttttgacgaatgtaacaatcagctgcctgtgtactatacgtacaaaactgtggtgaatgctgctagcgagttaagcaatttcttgttgctccactgcgatttccagggcattcgggaaatcggtttatactgtcagcctggcattgatctgccctcttggatcctcggtatactccaagtgcccgcagcttatgtcccaatcgagcctgactctccccctagcctgtccacccattttatgaaaaagtgcaatctgaagtatatccttgtggaaaagaaacagatcaacaaatttaagagctttcacgagaccttactgaactacgacactttcacagtggaacacaacgaccttgtgctctttcgcctgcactggaaaaatacagaagtgaatctgatgctcaatgatgggaaggagaagtacgagaaggaaaagattaagtccatctcttccgagcatgtaaacgaggaaaaagctgaggagcacatggacctgaggctcaaacattgtctcgcgtacgtactccacactagcggtaccacaggcatcccgaagattgttcgcgtacctcacaagtgtatcgttcctaatatccagcatttccgcgttcttttcgacattacacaagaagatgtcctctttctcgcaagcccgctaacctttgacccttccgtggtggagatctttctcgccctgtcctcgggcgcaagccttctgatcgttcctacttctgttaaactgctgccctcaaaactggcctctgtgctcttctctcatcaccgcgttacagtgctgcaggcaactccaactctgctaagacggtttggatcccagctgataaaatccactgtgctctctgccactacgtccctccgagttctcgcgctgggtggcgaggccttcccctcgctcacagtgctcagatcatggaggggagagggaaataaaacccagatctttaatgtgtacggaattactgaagtgtcgagttgggcaaccatttatcgaatacccgagaagactctcaactcaactttgaaatgtgagcttccagtgcagctcggattccccctgctggggactgtcgtcgaagtgcgggacaccaatggctttactatccaggaggggagtggacaagtctttctagggggtcgaaatcgcgtgtgtttcttggacgacgaggtcactgttccccttggtacaatgcgagccacaggcgattttgtcacagtcaaagacggcgaaattttcttcctgggtaggaaagatagtcagatcaaacggcatggtaagcggctgaacatcgaactggtgcagcaggttgccgaggagctgcagcaggtcgaaagttgcgctgttacgtggtataaccaggagaagctgatcttattcatggtctccaaagacgcatccgtgaaggagtatatctttaaagagctgcagaagtacctccctagccatgccgttcccgacgaattggtgcttattgattctctgccgtttacttcgcacggcaaaattgatgtatcggaattgaacaagatctacttgaattacattaatttgaagtctgagaacaagctgtcaggtaaggaagacctttgggagaagctacagtatctatggaagtccaccctaaatctccctgaggacctgctgcgcgtgccagacgagtctctgttcctgaattccggaggagacagcctgaaatctatccgcctgctatcagagatagagaaactggtgggcactagtgtgccggggctgttagaaatcatactgagcagcagtattctggaaatctacaaccacattctgcagaccgtggtgccagacgaagatgtcacgtttaggaagagttgcgccaccaagagaaagctgtctgacattaatcaggaagaggcctcaggcacatccttgcatcagaaggcgattatgaccttcacatgccacaacgagattaacgccttcgtggtgttgtcccggggatcccagatcttgtccctcaattcaacccggtttcttacaaagctgggccactgttcttcagcctgcccgtcagactcagtgtcccagactaatatacagaatcttaaaggacttaactcgcccgtcctgatcgggaagagcaaagatcccagttgcgtggctaaggtcagcgaggaaggcaagccagcgataggtacacagaagatggagctgcacgtacgctggcgcagtgacacaggcaaatgtgtggacgcttctccattggtcgtcatccctacgttcgacaaaagttctactactgtgtacatcggaagccatagtcacaggatgaaagcggttgatttttatagcgggaaggttaaatgggagcagattttgggtgaccgcatagagtcttcagcgtgtgtctccaagtgcggaaacttcatagtcgtgggatgttataacggacttgtctacgtgctgaagtcaaattcaggcgagaaatactggatgtttactactgaagatgcagtaaaatcctcagcaacgatggaccccactacgggtctcatctacataggctcccacgatcagcacgcctatgcactcgacatctatcgaaaaaagtgtgtatggaaatcaaaatgcggcggaaccgtgttctcctccccctgccttaacctgattccccaccatttgtacttcgccaccttggggggcctgctgctggccgttaaccccgccactggcaacgtcatttggaagcacagttgtggcaagccgctgttctcttcccctcagtgttgctcccagtatatctgcatcggatgcgttgacggcaacctgctgtgtttcacacattttggcgagcaggtgtggcagttttctacgtcaggtcctatcttttccagcccgtgtacctctccctcagagcagaagatattttttggcagccatgattgctttatatactgctgcaatatgaaaggccatttacagtggaagtttgagacgactagtcgggtatacgccacccctttcgcctttcacaattacaacggaagcaacgagatgttgctcgctgctgccagtacggacggaaaggtttggatcttggagtcccaatcaggccagctgcaatctgtctacgaactccctggggaggtattctccagccccgtggtacttgagtctatgctcattataggctgcagagacaactatgtttattgcttggatctgctcggaggcaatcagaagtag

SEQ ID NO: 279723 - DNA, 3297 bp, Artificial Sequence
  derived and/or modified sequence
atgaccctgcaggagctggtgcacaaggccgccagctgctacatggacagagtggccgtgtgctttgatgagtgcaacaaccagctgcctgtgtactacacctacaagacagtggtgaatgctgccagcgagctgagcaacttcctgctgctgcactgtgacttccagggcatccgggagatcggcctgtactgccagcccggcatcgacctgcccagctggatcctgggcatcctgcaggtgcctgctgcctacgtgcccatcgagccagacagcccccccagcctgagcacccacttcatgaagaagtgcaacctgaagtacatcctggtggagaagaagcagatcaacaagttcaagagcttccacgagaccctgctgaactatgacaccttcaccgtggagcacaatgacctggtgctcttccggctgcactggaagaacacagaggtgaacctgatgctgaatgatggcaaggagaagtatgagaaggagaagatcaagagcatcagcagcgagcacgtgaatgaggagaaggccgaggagcacatggacctgcggctgaagcactgcctggcctacgtgctgcacaccagcggcaccaccggcatccccaagatcgtgcgggtgccccacaagtgcatcgtgcccaacatccagcacttccgggtgctgtttgacatcacccaggaggatgtgctcttcctggccagccccctgacctttgaccccagcgtggtggagatcttcctggccctgagcagcggggccagcctgctgattgtgcccacctctgtgaagctgctgcccagcaagctggcctctgtgctcttcagccaccaccgggtgacagtgctgcaggccacccccaccctgctgcggcgcttcggcagccagctgatcaagagcacagtgctgagcgccaccaccagcctgcgggtgctggccctgggcggggaggccttccccagcctgactgtgctgcgctcctggagaggagagggcaacaagacccagatcttcaacgtgtatggcatcacagaggtgtcctcctgggccaccatctaccgcatccctgagaagaccctgaacagcaccctgaagtgtgagctgcctgtgcagctgggcttccccctgctgggcaccgtggtggaggtgcgggacaccaacggcttcaccatccaggagggcagcggccaggtgttcctgggcggcaggaacagagtgtgcttcctggatgatgaggtgacagtgcccctgggcaccatgagggccaccggggactttgtgacagtgaaggatggagagatcttcttcctgggcaggaaggacagccagatcaagagacatggcaagaggctgaacatcgagctggtgcagcaggtggccgaggagctgcagcaggtggagagctgtgctgtgacctggtacaaccaggagaagctgatcctcttcatggtgtccaaggatgcctctgtgaaggagtacatcttcaaggagctgcagaagtacctgcccagccatgctgtgcctgatgagctggtgctgattgacagcctgcccttcaccagccacggcaagattgatgtgtctgagctgaacaagatctacctgaactacatcaacctgaagtctgagaacaagctgagcggcaaggaggacctgtgggagaagctgcagtacctgtggaagagcaccctgaacctgcctgaggacctgctgcgggtgcctgatgagagcctcttcctgaacagcggcggggacagcctgaagagcatccggctgctgtctgaaattgagaagctggtgggcacctctgtgcccggcctgctggagatcatcctgagcagcagcatcctggagatctacaaccacatcctgcagacagtggtgcctgatgaagatgtgaccttcaggaagagctgtgccaccaagaggaagctgagtgacatcaaccaggaggaggccagcggcaccagcctgcaccagaaggccatcatgaccttcacctgccacaatgagatcaatgcctttgtggtgctgagccggggcagccagatcctgagcctgaacagcacccgcttcctgaccaagctgggccactgcagcagcgcctgccccagcgacagcgtgtcccagaccaacatccagaacctgaagggcctgaacagccctgtgctgattggcaagagcaaggaccccagctgtgtggccaaggtgtctgaggagggcaagccagccatcggcacccagaagatggagctgcacgtgcgctggaggagtgacacaggaaaatgtgtggatgccagccccctggtggtgatccccacctttgacaagagcagcaccaccgtgtacatcggcagccacagccacaggatgaaggctgtggacttctacagcggcaaggtgaagtgggagcagatcctgggggaccgcatcgagagcagcgcctgtgtgtccaaatgtggcaacttcatcgtggtgggctgctacaacggcctggtgtatgtgctgaagagcaacagcggggagaagtactggatgttcaccacagaagatgctgtgaagagcagcgccaccatggaccccaccaccggcctcatctacatcggcagccatgaccagcacgcctatgccctggacatctacaggaagaagtgtgtgtggaagagcaaatgtggcggcaccgtcttcagcagcccctgcctgaacctgatcccccaccacctgtactttgccaccctgggcggcctgctgctggccgtgaacccagccactggaaatgtcatctggaagcacagctgtgggaagcccctcttcagcagcccccagtgctgcagccagtacatctgcatcggctgtgtggatggcaacctgctgtgcttcacccactttggagagcaggtgtggcagttcagcaccagcggccccatcttcagcagcccctgcaccagccccagcgagcagaagatcttcttcggcagccatgactgcttcatctactgctgcaacatgaagggccacctgcagtggaagtttgagaccaccagccgggtgtatgccaccccatttgccttccacaactacaacggcagcaatgagatgctgctggccgccgccagcacagatggcaaggtgtggatcctggagagccagagcggccagctgcagagcgtgtatgagctgcccggggaggtgttcagcagccctgtggtgctggagagcatgctgatcatcggctgccgggacaactacgtgtactgcctggacctgctgggcggcaaccagaagtag

SEQ ID NO: 279724 - DNA, 3297 bp, Artificial Sequence
  derived and/or modified sequence
atgaccctgcaggagctggtgcacaaggccgccagctgctacatggatagggtggccgtctgtttcgacgaatgtaataatcagctccccgtttactatacctacaagacagtggttaatgccgccagtgagctcagcaatttccttctcctgcattgcgattttcagggaatccgcgagatcggactgtattgtcagcctgggatcgatctcccaagctggattttggggatacttcaggtgcctgctgcctatgtgcccatagaaccagattcaccaccctccctatctacccactttatgaagaaatgtaaccttaagtatatactggtcgagaagaagcagattaacaaatttaagagtttccacgaaactctgttgaactatgacacttttacagtcgaacataatgatctggttctgtttcgccttcattggaaaaacacagaggtcaatctaatgcttaacgacggaaaagagaagtacgagaaagaaaaaataaagtcaatcagcagtgagcacgtcaacgaggagaaagcagaggagcacatggacctgagactaaaacattgtctggcgtatgtgttgcacacctcaggaacgaccggtatacctaagatagtccgagtcccccataaatgtatcgtaccaaacatccagcacttccgcgttctgttcgatatcacacaagaggacgtgctcttcctggcttcaccactgacatttgatccgagtgttgtcgagatttttttagcattgtcctccggtgcttcactgctgattgtccccacctctgtgaagctcctgccctccaagctggcgtccgtccttttctcgcaccatagagtgaccgtcctgcaggctacgcccacacttttgcggcgctttgggtctcagcttattaagtcgacggtcctttcagcaactacatcactccgtgtcctcgcccttggaggtgaagccttcccctccctcacagtcctgcggtcctggcgcggtgagggaaataagacacagatttttaatgtttacggcattacagaggtgagcagctgggctaccatctatcggatccccgaaaagaccctgaacagcaccctcaaatgtgagctgccagtgcagttaggctttccacttctgggaaccgtggttgaagtgcgggatacaaacggttttacgatacaagaggggagcggccaagtctttctgggagggagaaatcgggtctgcttcctggatgacgaagtgaccgtacccctcgggacaatgagggccacaggggattttgtgacagtgaaggatggtgagattttttttcttggcaggaaagactcccagatcaaacgtcacggtaagcgactgaacatcgagttggtacagcaagtcgccgaagagctacaacaggtcgagtcttgcgctgtcacctggtacaaccaggagaaattgatcctctttatggtctcgaaagacgcctcagtcaaggagtacattttcaaagagctccagaagtatctgccaagccatgccgtaccggacgagctggtcttaattgattcactgccctttaccagccacggaaagatcgatgtttctgagctgaataagatttatttaaattacataaacctcaaatctgaaaataagctgagcggcaaggaagacctgtgggagaagttgcagtatttatggaaaagtacccttaatctgccagaagatctcctcagagtgccagacgaatccctgtttctcaattctgggggcgactccctcaagtccatccgcttgttgtccgagatcgaaaaattggttggcacgagtgtgccagggttactggaaattatcctgtctagctctattctcgaaatctataatcacattctgcagacagtcgtcccggacgaagatgtaacctttcgcaagtcttgcgctacgaaacgcaagctgtctgatattaatcaagaagaggccagcggaacgagcctgcatcaaaaggcaatcatgacttttacctgccataacgaaattaacgcgttcgttgtgctttcccgcgggagtcagatcttgtcactcaacagcacacgcttcttgaccaaactgggccattgctcgtcagcatgtccctccgactcggtcagccagactaacatacagaatctaaaaggcctaaacagtcccgtgttaataggaaagagcaaggatccctcctgcgtagccaaggtgagcgaagaaggcaaacctgccatcggaactcagaaaatggagcttcacgtgcgatggagatctgataccggaaagtgtgtggacgcttcgccgctggttgtcattcctacctttgacaagtctagcactaccgtatacatcggctctcattctcacaggatgaaggccgttgatttctattcggggaaggtcaagtgggaacagatcctgggagataggatagagtccagcgcttgcgtctctaagtgcgggaacttcatagtggttggatgctataacggcctcgtgtatgtcctgaagagcaactctggcgagaaatattggatgttcaccaccgaggatgcagtaaagtcctcggctaccatggaccctacaactggactcatttacatcggcagccacgaccagcatgcttatgcactagatatctatagaaagaaatgcgtgtggaagtctaaatgcgggggtacagtgtttagtagtccatgcctgaatctgatcccacaccacttatacttcgcgaccttgggaggacttttgctggccgtcaatcctgccaccggaaacgtaatctggaagcacagctgcggtaaaccattattctctagcccacaatgttgttctcagtatatctgtatcggatgtgtggacgggaacctcttatgctttactcattttggtgagcaggtgtggcagttctccacaagcggcccgatattctcctcaccctgcaccagtccgtccgagcagaagatcttctttggatcacatgactgttttatttactgttgcaacatgaaagggcatctccagtggaagtttgagacaacaagcagagtctacgctacgcccttcgccttccataactataacggtagcaacgaaatgctcctggcagccgccagcacggatggaaaggtgtggattctggaaagtcagagtggccagctgcaatcggtttacgaactccccggtgaggtgtttagctcgcctgtggttctggagtcaatgctaataataggatgccgagacaactacgtatactgtctggacctgctggggggcaaccagaagtag

SEQ ID NO: 279725 - DNA, 2997 bp, Artificial Sequence
  derived and/or modified sequence
atgaagaagtgcaacctcaaatacattttagtggagaaaaaacagataaacaaattcaaatcattccatgaaacacttctgaattacgacacgtttaccgtggagcataatgacttggtcctcttcaggcttcactggaaaaacaccgaagtgaatcttatgctgaatgacggaaaggagaagtatgaaaaagagaagattaagagcatttcaagcgagcacgtgaacgaagagaaagccgaagaacacatggatctacgattgaagcactgcctcgcatatgtgctccatacaagtggcaccactggcattccgaaaatagtgcgagtaccccacaagtgtatcgtgccgaatattcagcacttccgcgtgctcttcgatattactcaggaggacgtgctctttctggctagccccctgacttttgatcctagcgttgtggagatttttctggccctcagctccggcgccagtctgcttatagtaccgacatcggtgaaactactgccctcaaagttggcctcagtcctgtttagtcaccaccgggtcactgtgctgcaggccactcccaccttgctgagaagattcgggagtcagttaattaaatcgactgtcctctcggctaccacctcactccgggtacttgccctagggggcgaagccttcccaagccttaccgttctgaggtcctggaggggggaggggaataaaacacagatcttcaatgtttacggaattacagaggtctcatcctgggcgactatatacaggattcctgagaaaacactcaacagtacccttaagtgcgagctcccggtgcagttagggttccccctcctgggtaccgttgtggaagtgagagacactaatgggtttacaatccaagaaggatcagggcaggtgtttttgggggggagaaatcgggtatgtttccttgacgacgaggtcactgtgccccttgggacaatgagggccaccggggatttcgtgaccgtgaaagacggggagatattctttctcggtagaaaggatagccagatcaaacgtcatggcaagaggctaaatattgaactcgtacagcaagttgccgaggagcttcagcaggtggaaagctgtgccgtgacatggtacaatcaggaaaaacttattctgttcatggtctccaaagatgccagtgtcaaagaatatatcttcaaggagcttcagaagtacctgccgtctcatgcagtcccagatgagcttgtgctgattgactcactgcctttcaccagccacggcaaaattgatgtttctgagctgaacaagatctatctgaactacatcaatctcaagtcagaaaataaactgagcggtaaagaggatttgtgggagaaactgcagtacttgtggaagagcacgttgaatctcccagaggacctgctccgcgttccagatgagtctctgtttctgaactctggcggagattcgcttaaatctataaggttgcttagcgagattgaaaagctggtgggcacaagcgtccccggactgcttgagattattttgtccagctctatcctggaaatctataatcatatattgcagacagtcgtccccgatgaagacgtcacatttcggaaatcatgtgccacaaaacgcaagctctcagatataaatcaggaggaggcctccgggacaagcctccaccagaaggccattatgacttttacctgtcacaacgaaatcaacgcattcgtggtgctgtctcgtggaagccaaatcctgtcactaaactcaaccaggttcctcacaaaattaggccattgtagttccgcttgtccctcggattctgtttcccagaccaatattcagaatctcaaggggttgaattcgcctgtgcttataggcaagtcaaaggatccctcatgtgtagccaaggtctcggaagagggaaagcctgccattggtactcaaaagatggagctgcacgttcgctggagaagcgatacgggaaaatgtgtggacgcatcccccctcgtggttatacccacttttgataagagcagtactactgtctatataggctctcacagtcacaggatgaaggcggtggatttctacagcggcaaggtgaagtgggaacagatcctgggcgaccggatcgagtcaagtgcctgcgtctcaaaatgcggaaacttcatcgtggtgggctgctacaacgggcttgtttacgtgctgaagagcaactctggcgagaagtactggatgttcactactgaggacgccgttaaatccagcgctacaatggaccccaccaccgggcttatttatattgggagccacgaccaacacgcttacgccctggacatctataggaaaaagtgtgtgtggaagtctaaatgtggaggcacggttttctctagcccatgcctaaatctgataccccaccacctatattttgcaacacttggcggactgctactggccgtcaatccagcaactggaaatgtcatctggaagcactcatgtggaaaaccgttgttctccagccctcagtgctgctcacaatatatttgtatcggctgcgtggatggcaacctgctgtgcttcacccattttggtgagcaggtctggcagttctccaccagtggccccatcttttctagcccctgtacctccccgagcgagcaaaagatcttcttcggctctcatgactgctttatctattgctgtaatatgaaaggccacttgcagtggaaattcgagaccacgtcgagagtgtatgccacgccatttgcttttcacaactataacggctctaacgaaatgctgctcgcagcggcaagcacggacggcaaagtgtggatcctggaatctcaaagtgggcagctgcagagcgtctacgaattgccaggagaagtcttcagttcacccgttgtgttggagtcgatgctaatcatcggctgccgcgataattatgtgtactgcctggacctgctagggggcaatcagaaatag

SEQ ID NO: 279726 - DNA, 2997 bp, Artificial Sequence
  derived and/or modified sequence
atgaagaagtgcaacctgaagtacatcctggtggagaagaagcagatcaacaagttcaagagcttccacgagaccctgctgaactatgacaccttcaccgtggagcacaatgacctggtgctcttccggctgcactggaagaacacagaggtgaacctgatgctgaatgatggcaaggagaagtatgagaaggagaagatcaagagcatcagcagcgagcacgtgaatgaggagaaggccgaggagcacatggacctgcggctgaagcactgcctggcctacgtgctgcacaccagcggcaccaccggcatccccaagatcgtgcgggtgccccacaagtgcatcgtgcccaacatccagcacttccgggtgctgtttgacatcacccaggaggatgtgctcttcctggccagccccctgacctttgaccccagcgtggtggagatcttcctggccctgagcagcggggccagcctgctgattgtgcccacctctgtgaagctgctgcccagcaagctggcctctgtgctcttcagccaccaccgggtgacagtgctgcaggccacccccaccctgctgcggcgcttcggcagccagctgatcaagagcacagtgctgagcgccaccaccagcctgcgggtgctggccctgggcggggaggccttccccagcctgactgtgctgcgctcctggagaggagagggcaacaagacccagatcttcaacgtgtatggcatcacagaggtgtcctcctgggccaccatctaccgcatccctgagaagaccctgaacagcaccctgaagtgtgagctgcctgtgcagctgggcttccccctgctgggcaccgtggtggaggtgcgggacaccaacggcttcaccatccaggagggcagcggccaggtgttcctgggcggcaggaacagagtgtgcttcctggatgatgaggtgacagtgcccctgggcaccatgagggccaccggggactttgtgacagtgaaggatggagagatcttcttcctgggcaggaaggacagccagatcaagagacatggcaagaggctgaacatcgagctggtgcagcaggtggccgaggagctgcagcaggtggagagctgtgctgtgacctggtacaaccaggagaagctgatcctcttcatggtgtccaaggatgcctctgtgaaggagtacatcttcaaggagctgcagaagtacctgcccagccatgctgtgcctgatgagctggtgctgattgacagcctgcccttcaccagccacggcaagattgatgtgtctgagctgaacaagatctacctgaactacatcaacctgaagtctgagaacaagctgagcggcaaggaggacctgtgggagaagctgcagtacctgtggaagagcaccctgaacctgcctgaggacctgctgcgggtgcctgatgagagcctcttcctgaacagcggcggggacagcctgaagagcatccggctgctgtctgaaattgagaagctggtgggcacctctgtgcccggcctgctggagatcatcctgagcagcagcatcctggagatctacaaccacatcctgcagacagtggtgcctgatgaagatgtgaccttcaggaagagctgtgccaccaagaggaagctgagtgacatcaaccaggaggaggccagcggcaccagcctgcaccagaaggccatcatgaccttcacctgccacaatgagatcaatgcctttgtggtgctgagccggggcagccagatcctgagcctgaacagcacccgcttcctgaccaagctgggccactgcagcagcgcctgccccagcgacagcgtgtcccagaccaacatccagaacctgaagggcctgaacagccctgtgctgattggcaagagcaaggaccccagctgtgtggccaaggtgtctgaggagggcaagccagccatcggcacccagaagatggagctgcacgtgcgctggaggagtgacacaggaaaatgtgtggatgccagccccctggtggtgatccccacctttgacaagagcagcaccaccgtgtacatcggcagccacagccacaggatgaaggctgtggacttctacagcggcaaggtgaagtgggagcagatcctgggggaccgcatcgagagcagcgcctgtgtgtccaaatgtggcaacttcatcgtggtgggctgctacaacggcctggtgtatgtgctgaagagcaacagcggggagaagtactggatgttcaccacagaagatgctgtgaagagcagcgccaccatggaccccaccaccggcctcatctacatcggcagccatgaccagcacgcctatgccctggacatctacaggaagaagtgtgtgtggaagagcaaatgtggcggcaccgtcttcagcagcccctgcctgaacctgatcccccaccacctgtactttgccaccctgggcggcctgctgctggccgtgaacccagccactggaaatgtcatctggaagcacagctgtgggaagcccctcttcagcagcccccagtgctgcagccagtacatctgcatcggctgtgtggatggcaacctgctgtgcttcacccactttggagagcaggtgtggcagttcagcaccagcggccccatcttcagcagcccctgcaccagccccagcgagcagaagatcttcttcggcagccatgactgcttcatctactgctgcaacatgaagggccacctgcagtggaagtttgagaccaccagccgggtgtatgccaccccatttgccttccacaactacaacggcagcaatgagatgctgctggccgccgccagcacagatggcaaggtgtggatcctggagagccagagcggccagctgcagagcgtgtatgagctgcccggggaggtgttcagcagccctgtggtgctggagagcatgctgatcatcggctgccgggacaactacgtgtactgcctggacctgctgggcggcaaccagaagtag

SEQ ID NO: 279727 - DNA, 3590 bp, Artificial Sequence
  derived and/or modified sequence
ggaagatttacgtatggtgcctcgctctgggatagctttacggcttctgggagctgctgcttcgctgtgagaagtatccgcgacgagctatccgggaaagggccgaatgcgatcaaacctaatccgcgagacttgctaaggttctgtgctacaaattgatgtttagataaacttcagtgaaatgactcttcaggaattggtgcataaggctgcctcctgttatatggacagagtagctgtatgttttgatgaatgcaacaaccagcttccagtttactacacctacaagactgtggttaatgctgcttctgaattatcaaattttctgctgttacactgtgactttcaaggaattcgggaaattggtctctactgccaacctgggatagacttaccctcttggattttaggaattctccaagtcccggctgcttatgtacctatcgagccagattcaccaccgtcattatcaactcattttatgaaaaaatgtaatctaaagtatatccttgttgaaaaaaaacaaattaataaatttaaatcttttcatgaaacattattgaactatgatacatttacagtggaacataatgacctagtgctcttcagacttcactggaaaaatactgaggtgaacttgatgctaaatgatggaaaagagaaatatgaaaaagaaaaaataaaaagcataagttctgagcatgtcaatgaagaaaaagcagaagaacacatggatctgaggctaaagcattgcttagcctatgttctacatacatcagggactacagggataccgaagattgtcagagtgcctcataagtgtatagtaccaaatatccagcattttcgggtactttttgacatcacacaagaagatgttttgtttctggcttcacctctgaccttcgatccttctgttgtggaaatatttcttgctctatcaagtggtgcctctctgcttattgtaccaacttccgtcaagttgctcccatcaaaattagccagcgttctcttttcccatcatagagtgactgttttgcaggcaacaccaacattgcttagaagatttggatctcagcttatcaagtcaactgttttgtcagccactacttctcttcgagtattagcccttggtggtgaagcgtttccatcattgacagttctcagaagctggagaggagaaggcaataaaacacaaatatttaatgtttatggtatcacagaggtatcaagttgggcgaccatttataggattccagagaagactcttaactctactctcaaatgtgaattgcctgtacaactgggatttccacttcttggaacagtagttgaagtcagagatactaatggcttcacaattcaggaaggcagtggccaagtatttttaggtggcagaaacagagtgtgttttcttgatgatgaagtgacagtaccacttggcacaatgcgagctacaggagactttgtgactgtgaaagatggagagattttttttttgggacgaaaagacagtcagatcaaacgtcatggcaaacgtcttaacattgaacttgtgcaacaggttgctgaagagcttcagcaagtggagtcttgtgcagttacatggtataatcaggaaaaattaattctcttcatggtgtctaaagatgcttcagtaaaagaatacatctttaaagaactgcagaaatatcttccaagtcatgcagtcccggatgagcttgtattgatcgactctctaccatttacatcccacggcaaaattgatgtttctgagttaaacaagatatatttaaactacataaacttgaagtctgagaataagctcagtgggaaagaggacctttgggaaaaattacagtatttgtggaagtctactctgaatctcccagaagatcttttgagggttcctgatgagtcactcttcttaaatagtggtggagattccttaaagtccatccggctcctcagtgagattgaaaaacttgttggtacatcagtacctgggcttctggaaattattctcagcagttccattttagagatttataatcacatccttcaaacagtggttccagatgaagatgtgacattcaggaagagttgtgccacaaaaaggaaactcagcgacattaatcaagaggaagccagtggaacatctttacatcagaaagccatcatgactttcacttgccacaatgagattaatgcttttgttgtactgagcagagggagtcaaattttgtctctgaattccactaggtttttaacaaagttaggacattgctcttcagcctgtccttctgactcagtttcacagaccaacattcaaaatttgaaaggcttaaattctccagttcttattgggaagtcaaaagatccatcctgtgttgcaaaagtttctgaagaggggaaacctgcgatagggactcagaaaatggagttacatgtgaggtggaggtcagacacaggcaaatgtgtagatgcttcaccgctggttgtaatacccacttttgataagtcatctacaactgtgtacattggttcccattctcatagaatgaaggcagttgacttttactctgggaaggtaaaatgggaacagattttgggagatcgaattgaatcctcagcatgtgtatctaagtgtggaaactttattgtggtgggctgttataatggattagtttatgttctgaaaagtaatagtggagaaaaatactggatgtttactactgaagatgctgtcaaaagctcggcaaccatggatccaaccacaggactcatttacattggatctcatgaccagcacgcatatgctttagatatttatagaaagaagtgtgtttggaagtcaaaatgtggaggaactgtcttttcctctccgtgtttgaacctgattccacatcatttgtattttgctacattgggaggacttttactggctgtaaatcctgctactgggaacgttatttggaaacattcctgtggaaaaccactcttctcttccccacaatgttgctcacagtatatttgtattggctgtgtagatgggaatttactctgctttactcactttggagaacaggtttggcagttctctaccagtggaccaatcttttcatccccgtgtacctcaccatcagagcaaaaaatattttttggttcccatgattgctttatctactgttgtaacatgaaaggtcacctgcagtggaaatttgaaactacttcaagggtctatgcaacaccgtttgctttccataactacaatggcagcaatgaaatgttgctggcagcagcatctactgatgggaaagtgtggatcttggaatctcagagtggacaattgcaaagtgtttatgaacttcctggagaagtcttctcttctcctgtggtcctggaatcaatgctcattattgggtgtagagataattatgtttattgtctggatttattgggtggcaatcaaaaataatcaaatacagtccttatttgtataacaaatgtgagatatttgaaaatattttaccattatacatcatgtggacttattttatattaaagaagattatattttggctaagaaa

SEQ ID NO: 279728 - DNA, 3241 bp, Artificial Sequence
  derived and/or modified sequence
ccgcgacgagctatccgggaaagggccgaatgcgatcaaacctaatccgcgagacttgctaaaattctccaagtcccggctgcttatgtacctatcgagccagattcaccaccgtcattatcaactcattttatgaaaaaatgtaatctaaagtatatccttgttgaaaaaaaacaaattaataaatttaaatcttttcatgaaacattattgaactatgatacatttacagtggaacataatgacctagtgctcttcagacttcactggaaaaatactgaggtgaacttgatgctaaatgatggaaaagagaaatatgaaaaagaaaaaataaaaagcataagttctgagcatgtcaatgaagaaaaagcagaagaacacatggatctgaggctaaagcattgcttagcctatgttctacatacatcagggactacagggataccgaagattgtcagagtgcctcataagtgtatagtaccaaatatccagcattttcgggtactttttgacatcacacaagaagatgttttgtttctggcttcacctctgaccttcgatccttctgttgtggaaatatttcttgctctatcaagtggtgcctctctgcttattgtaccaacttccgtcaagttgctcccatcaaaattagccagcgttctcttttcccatcatagagtgactgttttgcaggcaacaccaacattgcttagaagatttggatctcagcttatcaagtcaactgttttgtcagccactacttctcttcgagtattagcccttggtggtgaagcgtttccatcattgacagttctcagaagctggagaggagaaggcaataaaacacaaatatttaatgtttatggtatcacagaggtatcaagttgggcgaccatttataggattccagagaagactcttaactctactctcaaatgtgaattgcctgtacaactgggatttccacttcttggaacagtagttgaagtcagagatactaatggcttcacaattcaggaaggcagtggccaagtatttttaggtggcagaaacagagtgtgttttcttgatgatgaagtgacagtaccacttggcacaatgcgagctacaggagactttgtgactgtgaaagatggagagattttttttttgggacgaaaagacagtcagatcaaacgtcatggcaaacgtcttaacattgaacttgtgcaacaggttgctgaagagcttcagcaagtggagtcttgtgcagttacatggtataatcaggaaaaattaattctcttcatggtgtctaaagatgcttcagtaaaagaatacatctttaaagaactgcagaaatatcttccaagtcatgcagtcccggatgagcttgtattgatcgactctctaccatttacatcccacggcaaaattgatgtttctgagttaaacaagatatatttaaactacataaacttgaagtctgagaataagctcagtgggaaagaggacctttgggaaaaattacagtatttgtggaagtctactctgaatctcccagaagatcttttgagggttcctgatgagtcactcttcttaaatagtggtggagattccttaaagtccatccggctcctcagtgagattgaaaaacttgttggtacatcagtacctgggcttctggaaattattctcagcagttccattttagagatttataatcacatccttcaaacagtggttccagatgaagatgtgacattcaggaagagttgtgccacaaaaaggaaactcagcgacattaatcaagaggaagccagtggaacatctttacatcagaaagccatcatgactttcacttgccacaatgagattaatgcttttgttgtactgagcagagggagtcaaattttgtctctgaattccactaggtttttaacaaagttaggacattgctcttcagcctgtccttctgactcagtttcacagaccaacattcaaaatttgaaaggcttaaattctccagttcttattgggaagtcaaaagatccatcctgtgttgcaaaagtttctgaagaggggaaacctgcgatagggactcagaaaatggagttacatgtgaggtggaggtcagacacaggcaaatgtgtagatgcttcaccgctggttgtaatacccacttttgataagtcatctacaactgtgtacattggttcccattctcatagaatgaaggcagttgacttttactctgggaaggtaaaatgggaacagattttgggagatcgaattgaatcctcagcatgtgtatctaagtgtggaaactttattgtggtgggctgttataatggattagtttatgttctgaaaagtaatagtggagaaaaatactggatgtttactactgaagatgctgtcaaaagctcggcaaccatggatccaaccacaggactcatttacattggatctcatgaccagcacgcatatgctttagatatttatagaaagaagtgtgtttggaagtcaaaatgtggaggaactgtcttttcctctccgtgtttgaacctgattccacatcatttgtattttgctacattgggaggacttttactggctgtaaatcctgctactgggaacgttatttggaaacattcctgtggaaaaccactcttctcttccccacaatgttgctcacagtatatttgtattggctgtgtagatgggaatttactctgctttactcactttggagaacaggtttggcagttctctaccagtggaccaatcttttcatccccgtgtacctcaccatcagagcaaaaaatattttttggttcccatgattgctttatctactgttgtaacatgaaaggtcacctgcagtggaaatttgaaactacttcaagggtctatgcaacaccgtttgctttccataactacaatggcagcaatgaaatgttgctggcagcagcatctactgatgggaaagtgtggatcttggaatctcagagtggacaattgcaaagtgtttatgaacttcctggagaagtcttctcttctcctgtggtcctggaatcaatgctcattattgggtgtagagataattatgtttattgtctggatttattgggtggcaatcaaaaataatcaaatacagtccttatttgtataacaaatgtgagatatttgaaaatattttaccattatacatcatgtggacttattttatattaaagaagattatattttggctaagaaa

SEQ ID NO: 279729 - DNA, 2997 bp, Artificial Sequence
  derived and/or modified sequence
atgaagaagtgcaacctgaagtacatcctggtggagaagaagcagataaataagttcaagagtttccatgaaaccttactgaattacgacacttttactgtagagcacaacgatctggtgctgttccggttgcactggaaaaatactgaggtcaatctcatgttaaatgatggcaaagagaagtacgagaaagagaaaattaagtcgatttccagcgaacacgtcaacgaagagaaagcggaagaacacatggaccttagactgaagcactgtctcgcttatgttttacataccagcggcaccacagggatcccgaagatagtgagggtgcctcataaatgcatcgtccccaacattcaacactttagggtgctgttcgatattacccaggaagatgtactgtttctggcatcaccccttactttcgatcctagcgtggtggaaatcttcctggcactctcctcaggcgcttctctgctcatcgttcccacatctgttaaactgctgcccagcaagctcgcgtctgtgcttttttctcatcacagggtgacagtgctccaggcaacccctaccctcctgaggcgctttggatcacagcttatcaagtccactgtgcttagtgccactacaagcctgagggtccttgcattaggcggtgaagcttttccctctctgactgtcctcaggtcatggagaggagagggaaacaagacacagatcttcaacgtctatgggataaccgaagtctcttcctgggctaccatctacagaatcccggagaaaacgctgaacagtaccctaaagtgcgaactcccagttcagttagggtttcccctcctagggacagttgtggaggtccgggatacaaacggatttaccattcaagaaggttcagggcaggtcttcctgggtggacgcaacagggtttgctttttggatgacgaagtgactgttcccttggggactatgagggccacaggcgatttcgtcacggtgaaggatggtgagattttctttttgggccgcaaggattcccagataaagcgacatggcaagaggcttaacattgaacttgtgcaacaggtagcagaagagctgcagcaggtcgagagctgcgctgttacttggtataaccaagaaaaacttatactgttcatggtatctaaagacgctagcgtgaaggagtatatattcaaagagttacagaagtatttaccatctcatgccgtgcctgatgaactggtgcttatcgacagcctgccctttaccagccacggaaaaattgacgtcagcgagcttaataagatctacctcaattacattaacttgaaatctgaaaacaagttatccggcaaagaggatttgtgggaaaagcttcagtacctctggaaatccaccctgaacctgccggaagacctcctgcgcgtgccagatgagtcactgtttttgaacagcggaggggattctctgaagagcataaggcttttatctgaaatcgaaaagctggtcggcacaagcgttccggggctgcttgaaatcatactgtcatcttctattctggagatctataaccacattctacagacggtggtacccgacgaggacgtaacttttcgcaaaagctgcgccaccaagagaaagctctccgacataaaccaggaagaggcatctggtacatcactgcatcagaaagcaataatgacatttacctgtcataacgaaatcaacgcgttcgtggtgttgagccgagggtcacaaatcctctcccttaattccacaagatttctgacgaagctaggtcattgcagctccgcctgcccctctgatagtgtgtctcagacaaacattcagaatctaaaggggctgaatagtccagtcctcattggaaagtccaaggacccatcatgtgttgccaaggtctctgaggagggtaaaccagctattgggacccaaaagatggaactgcatgttagatggagatccgacacaggtaagtgtgtagatgcaagcccattagtggtaatcccaacctttgacaagtcctccactacagtttacataggtagccatagccaccggatgaaggccgtggacttctatagcggaaaggtgaagtgggagcagatcctgggggatcggattgaatcctccgcttgcgtgtcaaagtgcggaaattttatcgttgtaggctgttataatggccttgtctacgtgctaaaaagcaacagcggcgaaaagtactggatgttcaccacggaggacgctgtaaagtccagtgcgaccatggatccaacaacggggttgatctacattggcagccatgaccagcacgcatacgcactggacatttacagaaaaaagtgcgtgtggaagtctaagtgcggcggaacagtgtttagcagcccttgtcttaacctgatccctcaccatctatatttcgccactctgggaggcctcttgctggcagtaaatcctgccactggcaatgtgatatggaaacatagctgcggaaaaccactgtttagctcgccacagtgctgttcacagtacatttgtataggctgtgtcgatggtaacctcttatgctttacacatttcggagaacaggtttggcagtttagtacatccggaccaattttcagctccccctgtactagtccatccgaacagaagatcttttttggctctcacgactgtttcatttactgctgcaacatgaagggacacctgcagtggaagtttgagactacatcaagggtatatgctacgccgtttgcattccataattacaatggctccaacgagatgcttctggccgctgcgagcacggatggaaaggtgtggatacttgagagccagtccggtcagctccagtcagtctacgaacttcccggagaggtgttctcatcccctgtggtgctggagtccatgctcatcattggatgtagagacaattacgtgtattgtttggatctcctggggggcaaccagaagtag

SEQ ID NO: 279730 - DNA, 2997 bp, Artificial Sequence
  derived and/or modified sequence
atgaagaagtgcaatctgaaatatattttagtcgaaaaaaaacagatcaacaaatttaaatcttttcatgagaccctgctgaactacgacacattcacagttgaacacaatgatctggtccttttcaggctgcactggaaaaataccgaggtaaacctgatgcttaatgatggtaaagaaaagtacgagaaagagaagattaagagtatctcatctgagcacgtaaatgaggaaaaggcggaagaacatatggacctccgcctgaagcactgcctggcttatgttcttcacaccagtgggacgaccggcatccctaagattgtgcgggtacctcacaaatgtatcgtgccaaacattcagcactttagagttttatttgatattactcaggaggacgtcttgtttcttgcttcccctctgaccttcgatccaagtgtggtggagatcttcctggcgctgtcttcgggcgcatcattgttaattgtacctacctccgtgaagctgcttccctccaagctcgcctctgtcctttttagtcaccaccgggtgaccgttcttcaggcgacccctaccctcctaaggcgatttggcagtcagctcatcaaaagcaccgtgctgagtgccacgaccagtttgcgcgtgctcgcgctcgggggagaggccttcccgtctctcacggtgttaaggagctggaggggagagggcaataaaactcaaatcttcaacgtatacgggatcactgaggtctcatcgtgggccacgatttatcgcatccctgagaaaactttaaactcgaccctgaaatgcgagttacctgttcaacttggtttccctctgctcggtacagtagttgaagtcagggataccaatggctttacaatccaggaagggagcggacaggttttcttgggcggacgcaatcgcgtgtgcttcttggacgacgaggtcactgtaccattggggacaatgagagctaccggtgatttcgtgacagttaaagatggtgaaatcttcttcctagggagaaaagactcccagataaagagacatggaaaacgtctaaacattgagctggtccagcaagtggccgaagagctgcagcaggtggaatcctgcgccgttacctggtacaatcaggaaaaactcattctgttcatggttagtaaggacgcgtcagtgaaagaatacattttcaaggagctgcaaaaatatctcccatctcacgctgttccagacgagctcgtccttatcgatagcctgccttttacgagtcacggtaaaattgatgtgagcgagttgaataaaatatacctcaattacattaacctgaaaagcgaaaataagcttagtgggaaagaggatctgtgggagaagctgcagtacttgtggaagagcactctcaacctccccgaggaccttctgagagttcctgatgaaagtctgttcttgaatagcggtggtgactcactgaagagtatacggctgttgagcgagattgagaaattggtcggcacttcggttccgggactgttggagattatccttagttcaagcattctggagatatacaatcatatacttcagacggtcgtccctgacgaggacgtaaccttcagaaaaagctgtgccaccaagcgtaaattatccgatatcaaccaggaggaagctagcggtacatctttgcatcagaaggctatcatgacattcacctgccataacgaaatcaatgcattcgtggtcctgagccggggatcccaaattctgagcctgaactcgacaagatttctgactaagttggggcattgcagctccgcctgtccctccgatagtgtcagtcagacaaatattcagaatcttaaggggctgaattcacctgtgcttatcggaaagagcaaggacccctcttgcgtggccaaagtgagtgaagaaggcaagccagcgatcggcacccagaaaatggagttacatgtccgctggaggagcgatactggcaagtgtgtcgacgccagtccactcgttgtgattcccacatttgacaagtcaagcaccacagtctacatcggatctcattcccatcgaatgaaggcggtggacttctacagtggcaaggtgaaatgggagcagatcctgggggaccgcatcgagtccagcgcctgcgtctcaaagtgcgggaatttcatagttgtgggctgttataatggactggtttacgtgctgaaatctaactcaggcgagaagtattggatgttcaccactgaagatgccgtcaaatcaagcgcaacgatggatcccacaactggtctcatctacattggaagtcatgatcaacacgcctacgccctcgacatctacagaaagaagtgcgtgtggaaatccaagtgcggtggaaccgtgttcagttcaccttgcctcaacttgatcccgcaccacctttactttgcgactctggggggactgctgctcgctgtcaacccagccactggaaatgtaatttggaaacattcttgcggcaaacccctattcagttcacctcagtgctgtagccaatacatttgtattggctgtgtggacggaaatctcttgtgcttcacacactttggcgagcaagtctggcaattctcaacttcgggacccatcttctcctctccctgcacctctcccagcgaacagaagattttttttggttcacatgattgctttatctactgctgcaacatgaagggacatctccagtggaaattcgagacgacaagccgcgtatacgcgacccctttcgcctttcataattataacggcagtaatgaaatgctgctggccgcagctagtaccgacggcaaggtgtggattctcgagtcacagtccggccagctgcagagcgtttatgagcttccaggagaagtattttcatctcccgtggtccttgagagtatgttgatcattgggtgccgcgataactatgtgtactgcctggatctgctcgggggtaatcaaaaatag

SEQ ID NO: 279731 - DNA, 2997 bp, Artificial Sequence
  derived and/or modified sequence
atgaagaagtgcaacctgaagtacatcctggtggagaagaagcagatcaacaagttcaagagcttccacgagaccctgctgaactacgacaccttcaccgtggagcacaacgacctggtgctgttcagactgcactggaagaacaccgaggtgaacctgatgctgaacgacggcaaggagaagtacgagaaggagaagatcaagagcatcagcagcgagcacgtgaacgaggagaaggccgaggagcacatggacctgagactgaagcactgcctggcctacgtgctgcacaccagcggcaccaccggcatccccaagatcgtgagagtgccccacaagtgcatcgtgcccaacatccagcacttcagagtgctgttcgacatcacccaggaggacgtgctgttcctggccagccccctgaccttcgaccccagcgtggtggagatcttcctggccctgagcagcggcgccagcctgctgatcgtgcccaccagcgtgaagctgctgcccagcaagctggccagcgtgctgttcagccaccacagagtgaccgtgctgcaggccacccccaccctgctgagaagattcggcagccagctgatcaagagcaccgtgctgagcgccaccaccagcctgagagtgctggccctgggcggcgaggccttccccagcctgaccgtgctgagaagctggagaggcgagggcaacaagacccagatcttcaacgtgtacggcatcaccgaggtgagcagctgggccaccatctacagaatccccgagaagaccctgaacagcaccctgaagtgcgagctgcccgtgcagctgggcttccccctgctgggcaccgtggtggaggtgagagacaccaacggcttcaccatccaggagggcagcggccaggtgttcctgggcggcagaaacagagtgtgcttcctggacgacgaggtgaccgtgcccctgggcaccatgagagccaccggcgacttcgtgaccgtgaaggacggcgagatcttcttcctgggcagaaaggacagccagatcaagagacacggcaagagactgaacatcgagctggtgcagcaggtggccgaggagctgcagcaggtggagagctgcgccgtgacctggtacaaccaggagaagctgatcctgttcatggtgagcaaggacgccagcgtgaaggagtacatcttcaaggagctgcagaagtacctgcccagccacgccgtgcccgacgagctggtgctgatcgacagcctgcccttcaccagccacggcaagatcgacgtgagcgagctgaacaagatctacctgaactacatcaacctgaagagcgagaacaagctgagcggcaaggaggacctgtgggagaagctgcagtacctgtggaagagcaccctgaacctgcccgaggacctgctgagagtgcccgacgagagcctgttcctgaacagcggcggcgacagcctgaagagcatcagactgctgagcgagatcgagaagctggtgggcaccagcgtgcccggcctgctggagatcatcctgagcagcagcatcctggagatctacaaccacatcctgcagaccgtggtgcccgacgaggacgtgaccttcagaaagagctgcgccaccaagagaaagctgagcgacatcaaccaggaggaggccagcggcaccagcctgcaccagaaggccatcatgaccttcacctgccacaacgagatcaacgccttcgtggtgctgagcagaggcagccagatcctgagcctgaacagcaccagattcctgaccaagctgggccactgcagcagcgcctgccccagcgacagcgtgagccagaccaacatccagaacctgaagggcctgaacagccccgtgctgatcggcaagagcaaggaccccagctgcgtggccaaggtgagcgaggagggcaagcccgccatcggcacccagaagatggagctgcacgtgagatggagaagcgacaccggcaagtgcgtggacgccagccccctggtggtgatccccaccttcgacaagagcagcaccaccgtgtacatcggcagccacagccacagaatgaaggccgtggacttctacagcggcaaggtgaagtgggagcagatcctgggcgacagaatcgagagcagcgcctgcgtgagcaagtgcggcaacttcatcgtggtgggctgctacaacggcctggtgtacgtgctgaagagcaacagcggcgagaagtactggatgttcaccaccgaggacgccgtgaagagcagcgccaccatggaccccaccaccggcctgatctacatcggcagccacgaccagcacgcctacgccctggacatctacagaaagaagtgcgtgtggaagagcaagtgcggcggcaccgtgttcagcagcccctgcctgaacctgatcccccaccacctgtacttcgccaccctgggcggcctgctgctggccgtgaaccccgccaccggcaacgtgatctggaagcacagctgcggcaagcccctgttcagcagcccccagtgctgcagccagtacatctgcatcggctgcgtggacggcaacctgctgtgcttcacccacttcggcgagcaggtgtggcagttcagcaccagcggccccatcttcagcagcccctgcaccagccccagcgagcagaagatcttcttcggcagccacgactgcttcatctactgctgcaacatgaagggccacctgcagtggaagttcgagaccaccagcagagtgtacgccacccccttcgccttccacaactacaacggcagcaacgagatgctgctggccgccgccagcaccgacggcaaggtgtggatcctggagagccagagcggccagctgcagagcgtgtacgagctgcccggcgaggtgttcagcagccccgtggtgctggagagcatgctgatcatcggctgcagagacaactacgtgtactgcctggacctgctgggcggcaaccagaagtag

SEQ ID NO: 279732 - DNA, 2959 bp, Artificial Sequence
  derived and/or modified sequence
atagctttacggcttctgggagctgctgcttcgctgtgagaagtatccgcgacgagctatccgggaaagggccgaatgcgatcaaacctaatccgcgagacttgctaaggttctgtgctacaaattgatgtttagataaacttcagtgaaatgactcttcaggaattggtgcataaggctgcctcctgttatatggacagagtagctgtatgttttgatgaatgcaacaaccagcttccagtttactacacctacaagactgtggttaatgctgcttctgaattatcaaattttctgctgttacactgtgactttcaaggaattcgggaaattggtctctactgccaacctgggatagacttaccctcttggattttaggaattctccaagtcccggctgcttatgtacctatcgagccagattcaccaccgtcattatcaactcattttatgaaaaaatgtaatctaaagtatatccttgttgaaaaaaaacaaattaatggtactttttgacatcacacaagaagatgttttgtttctggcttcacctctgaccttcgatccttctgttgtggaaatatttcttgctctatcaagtggtgcctctctgcttattgtaccaacttccgtcaagttgctcccatcaaaattagccagcgttctcttttcccatcatagagtgactgttttgcaggcaacaccaacattgcttagaagatttggatctcagcttatcaagtcaactgttttgtcagccactacttctcttcgagtattagcccttggtggtgaagcgtttccatcattgacagttctcagaagctggagaggagaaggcaataaaacacaaatatttaatgtttatggtatcacagaggtatcaagttgggcgaccatttataggattccagagaagactcttaactctactctcaagttgctgaagagcttcagcaagtggagtcttgtgcagttacatggtataatcaggaaaaattaattctcttcatggtgtctaaagatgcttcagtaaaagaatacatctttaaagaactgcagaaatatcttccaagtcatgcagtcccggatgagcttgtattgatcgactctctaccatttacatcccacggcaaaattgatgtttctgagttaaacaagatatatttaaactacataaacttgaagtctgagaataagctcagtgggaaagaggacctttgggaaaaattacagtatttgtggaagtctactctgaatctcccagaagatcttttgagggttcctgatgagtcactcttcttaaatagtggtggagattccttaaagtccatccggctcctcagtgagattgaaaaacttgttggtacatcagtacctgggcttctggaaattattctcagcagttccattttagagatttataatcacatccttcaaacagtggttccagatgaagatgtgacattcaggaagagttgtgccacaaaaaggaaactcagcgacattaatcaagaggaagccagtggaacatctttacatcagaaagccatcatgactttcacttgccacaatgagattaatgcttttgttgtactgagcagagggagtcaaattttgtctctgaattccactaggtttttaacaaagttaggacattgctcttcagcctgtccttctgactcagtttcacagaccaacattcaaaatttgaaaggcttaaattctccagttcttattgggaagtcaaaagatccatcctgtgttgcaaaagtttctgaagaggggaaacctgcgatagggactcagaaaatggagttacatgtgaggtggaggtcagacacaggcaaatgtgtagatgcttcaccgctggttgtaatacccacttttgataagtcatctacaactgtgtacattggttcccattctcatagaatgaaggcagttgacttttactctgggaaggtaaaatgggaacagattttgggagatcgaattgaatcctcagcatgtgtatctaagtgtggaaactttattgtggtgggctgttataatggattagtttatgttctgaaaagtaatagtggagaaaaatactggatgtttactactgaagatgctgtcaaaagctcggcaaccatggatccaaccacaggactcatttacattggatctcatgaccagcacgcatatgctttagatatttatagaaagaagtgtgtttggaagtcaaaatgtggaggaactgtcttttcctctccgtgtttgaacctgattccacatcatttgtattttgctacattgggaggacttttactggctgtaaatcctgctactgggaacgttatttggaaacattcctgtggaaaaccactcttctcttccccacaatgttgctcacagtatatttgtattggctgtgtagatgggaatttactctgctttactcactttggagaacaggtttggcagttctctaccagtggaccaatcttttcatccccgtgtacctcaccatcagagcaaaaaatattttttggttcccatgattgctttatctactgttgtaacatgaaaggtcacctgcagtggaaatttgaaactacttcaagggtctatgcaacaccgtttgctttccataactacaatggcagcaatgaaatgttgctggcagcagcatctactgatgggaaagtgtggatcttggaatctcagagtggacaattgcaaagtgtttatgaacttcctggagaagtcttctcttctcctgtggtcctggaatcaatgctcattattgggtgtagagataattatgtttattgtctggatttattgggtggcaatcaaaaataatcaaatacagtccttatttgtataacaaatgtgagatatttgaaaatattttaccattatacatcatgtggacttattttatattaaagaagattatattttggctaag

SEQ ID NO: 279733 - protein, 879 aa, Artificial Sequence
  derived and/or modified sequence
MTAIKHALQRDIFTPNDERLLSIVNVCKAGKKKKNCFLCATVTTERPVQVKVVKVKKSDKGDFYKRQIAWALRDLAVVDAKDAIKENPEFDLHFEKIYKWVASSTAEKNAFISCIWKLNQRYLRKKIDFVNVSSQLLEESVPSGENQSVTGGDEEVVDEYQELNAREEQDIEIMMEGCEYAISNAEAFAEKLSRELQVLDGANIQSIMASEKQVNILMKLLDEALKEVDQIELKLSSYEEMLQSVKEQMDQISESNHLIHLSNTNNVKLLSEIEFLVNHMDLAKGHIKALQEGDLASSRGIEACTNAADALLQCMNVALRPGHDLLLAVKQQQQRFSDLRELFARRLASHLNNVFVQQGHDQSSTLAQHSVELTLPNHHPFHRDLLRYAKLMEWLKSTDYGKYEGLTKNYMDYLSRLYEREIKDFFEVAKIKMTGTTKESKKFGLHGSSGKLTGSTSSLNKLSVQSSGNRRSQSSSLLDMGNMSASDLDVADRTKFDKIFEQVLSELEPLCLAEQDFISKFFKLQQHQSMPGTMAEAEDLDGGTLSRQHNCGTPLPVSSEKDMIRQMMIKIFRCIEPELNNLIALGDKIDSFNSLYMLVKMSHHVWTAQNVDPASFLSTTLGNVLVTVKRNFDKCISNQIRQMEEVKISKKSKVGILPFVAEFEEFAGLAESIFKNAERRGDLDKAYTKLIRGVFVNVEKVANESQKTPRDVVMMENFHHIFATLSRLKISCLEAEKKEAKQKYTDHLQSYVIYSLGQPLEKLNHFFEGVEARVAQGIREEEVSYQLAFNKQELRKVIKEYPGKEVKKGLDNLYKKVDKHLCEEENLLQVVWHSMQDEFIRQYKHFEGLIARCYPGSGVTMEFTIQDILDYCSSIAQSH

SEQ ID NO: 279734 - DNA, 3248 bp, Artificial Sequence
  derived and/or modified sequence
atccggtctccgttttggaagacccgcctcggcacagccaggctcagtccggccttgcgctgagaaaagatgacagcaatcaagcatgcattacaaagagacatttttacaccaaatgatgaacgcctgctgagcattgtgaatgtctgcaaagcaggaaaaaagaaaaagaactgttttttatgtgccacagtgacaactgaacgccctgtgcaggttaaggtggtcaaagtcaagaaatccgataagggagatttctacaaaaggcagattgcatgggcccttcgagatcttgctgtggtagatgccaaagatgctatcaaagaaaatcctgaatttgatttacactttgaaaaaatatataaatgggttgccagcagcactgctgaaaagaatgcatttatttcatgcatttggaaattgaatcagcgatatctccggaagaaaattgattttgtcaatgttagctcacagcttttggaagaatctgttccaagtggagaaaatcagagtgtgacaggaggtgatgaagaagtagtagatgaataccaagagttaaatgcaagagaagaacaggatatcgaaataatgatggaaggctgtgaatatgcaatctcgaatgcggaagcctttgcagaaaaattgtccagagagctgcaggtgctagatggggctaacatccagtcaatcatggcatctgaaaaacaagtcaacatcctgatgaaattgctagatgaggctctaaaggaggtagatcagattgaattgaaactgagcagttatgaggaaatgctccaaagtgtaaaagaacaaatggatcagatctctgaaagcaaccacctaattcatcttagtaacactaataatgtaaaactcctatctgagatagagttccttgtgaaccacatggacttggccaaaggtcatataaaggcccttcaggaaggagatcttgcttcttccagaggcattgaggcctgcaccaatgctgctgatgcccttctgcagtgcatgaatgtagctcttcgaccaggccatgacttgcttctggcagtcaaacagcaacagcagcgattcagtgatttgcgagagctttttgcccggagactggccagtcacctcaacaatgtttttgttcaacagggtcatgatcagagttcgactcttgcccaacactctgttgaactgactttacccaatcatcatccatttcatagagatttgctccgatatgccaagctgatggagtggctaaagagtacagattatggaaaatatgaaggactaacaaagaattacatggattatttatcccgactatatgaaagagaaatcaaagatttctttgaagttgcaaagatcaagatgactggcacaactaaagaaagcaagaagtttggtcttcatggaagttcggggaaattaactggatctacttctagtctaaataagctcagtgttcagagttcagggaatcgcagatctcagtcatcttccctgttggatatgggaaacatgtctgcctctgatctcgatgttgctgacaggaccaaatttgataagatctttgaacaggtactaagtgaactggagcccctatgtctggcagaacaggacttcataagtaaatttttcaaactacagcaacatcaaagtatgcctggaactatggctgaagcagaggacctggatggaggaacattatcacggcaacataattgtggcacaccactgcctgtttcatctgagaaagatatgatccgccaaatgatgattaaaatatttcgctgcattgagccagagctgaacaacctaattgcattaggagacaaaattgatagctttaactctctttatatgttagtcaaaatgagtcatcatgtgtggactgcacaaaatgtggaccctgcttctttcctaagtactacattgggaaatgttttggtgactgtcaaaaggaactttgacaaatgcattagtaaccaaataaggcaaatggaagaagtaaagatctcaaaaaagagtaaagttggaattcttccatttgttgctgaatttgaagaatttgctggacttgcagaatcaatcttcaaaaatgctgagcgtcgtggagacctggataaagcatacaccaaacttatcagaggagtatttgttaatgtggagaaagtagcaaatgaaagccagaagacccccagggatgtggttatgatggaaaactttcaccatatttttgcaactctttctcgattgaaaatctcatgtctagaagcagaaaaaaaagaagccaaacaaaaatacacagatcaccttcagtcttatgtcatttactctttaggacaacctcttgaaaaactaaatcatttctttgaaggtgttgaagctcgcgtggcacagggcataagggaggaggaagtaagttaccaacttgcatttaacaaacaagaacttcgtaaagtcattaaggagtaccctggaaaggaagtaaaaaaaggtctagataacctctacaagaaagttgataaacatttatgtgaagaagagaacttacttcaggtggtgtggcactccatgcaagatgaatttatacgccagtataagcactttgaaggtttgatagctcgctgttatcctggatctggtgttacaatggaattcactattcaggacattctggattattgttccagcattgcacagtcccactaaaccttgtgaaagaagaaaagataactgaatgaagcatttgagtataacagacactataccaaaataccaagcaactgttttgagaacccagacttaaaattttatgtattattaaatgttagataaatgggtagtaccatactacaaatatttaaatgcaaaattaccaacctatatagcagttttatttgccctataggttgcatactaacttaagcattcatgtcaccataaaatgcctttagcatttctcaatgactggatgggaaattttcctttattgcctagctgcttgtgtttgagtggttgtcctatgagcaatgcatttggagttcttcagctttcactacttctctgttgcttgctaatcatgtaactactaaaatactgtacaaaattgttttttcacactaacaaatgtgtatatggagaagagggctcatgtgatgatcatttgtgaacttagatttttgaggattatgtgactagtaataaatgtgaaataaattttcaaaaaagttgacatttgataatatttt

SEQ ID NO: 279735 - DNA, 2640 bp, Artificial Sequence
  derived and/or modified sequence
atgacggccatcaagcatgctctacagagggacatctttactcccaacgacgaacgtctgcttagtatcgtcaacgtctgcaaagctggtaagaagaagaaaaactgttttctatgcgccactgttacgacggagcgcccggtgcaggtaaaggtagtgaaggtaaaaaagtctgataagggggatttttacaagcggcagatcgcttgggccctgagggatcttgcggtggtggatgcaaaggatgccattaaagagaatccagaattcgatctacacttcgagaagatctataagtgggtggcctcctctaccgccgagaagaacgctttcatctcctgcatctggaaactgaaccagcggtacttgcgcaaaaaaatcgattttgttaacgtgagctctcagttgctggaagagtctgtaccaagcggggagaaccagagcgtgacgggaggcgatgaagaggtggtggacgagtatcaagaattaaacgcacgagaggagcaggatatcgaaataatgatggaggggtgtgagtatgctatttcgaatgctgaagcctttgctgaaaaattgagtcgcgaactccaggtgctcgatggagcaaatatacagtccataatggccagcgagaagcaagtcaacattctgatgaagctgttggacgaagcactgaaggaggtggatcaaatcgaactgaagctgtcgtcctatgaagagatgctgcagtcggtcaaagagcagatggaccaaatatctgagagcaatcacttgatccacctatccaacaccaataacgtgaagctgctatcagaaattgaattcctcgtgaaccacatggacctcgccaaaggacacatcaaagcacttcaggaaggcgacctggccagcagccggggtatagaagcttgtaccaacgcagctgacgctcttctacagtgcatgaacgtggccttacgtcctgggcatgatctcctcctcgcagtaaagcagcaacagcagagattcagtgatttgcgcgaactctttgcaagacgcctggctagccatctgaacaatgtctttgtacagcaagggcatgatcagtcctccacgctggcccagcattctgtggagctgacactgcccaatcaccacccgttccacagggacttgctgaggtacgcaaagctgatggaatggttgaagagcactgattatgggaaatacgagggcctgactaagaactatatggattacctgagtagactgtacgaacgcgagattaaggatttcttcgaagtggctaaaattaagatgaccgggacgaccaaagagtccaagaaatttggtctgcacggcagttcaggcaagctcactggaagcacctcttcactgaataagctaagcgtccagtcatccggcaatcgacgctcacaatcaagttccctactggatatggggaacatgagcgcgtcagatttagatgtggctgatcggacaaagttcgacaaaatatttgagcaggtgctctcagaactagagcctctgtgcttagctgagcaagactttattagtaaattcttcaaattacaacaacaccaatccatgccagggactatggccgaggcagaagacctggatggaggcaccctcagtcgacagcataattgcgggactcccctgcccgtgtcctccgaaaaggatatgattagacagatgatgatcaaaatctttagatgcatcgaacctgagctgaacaatctcatcgctctcggggataaaatagatagtttcaattcattgtatatgctggtaaagatgagccatcacgtgtggaccgcacagaacgtggatcccgcatccttcttaagtaccactttagggaacgtcctggttacagtgaaaagaaactttgataagtgcatctcaaatcagatcagacagatggaggaagtgaagatatccaaaaaatcgaaggtaggcatccttcctttcgtagccgagttcgaggagtttgcaggactagcggaatcaatctttaagaatgcggaacggcgcggagacctcgataaggcatacaccaagttaatccgtggagttttcgtgaatgtggaaaaggtagcaaacgagtctcagaaaacacctagagatgtggttatgatggagaatttccaccatatcttcgctacgctgagccgcctcaagatttcttgtctggaagctgagaaaaaggaggctaagcagaaatacactgatcaccttcaatcatacgtgatatactcgttgggccagcctctggaaaagctcaaccatttttttgaaggcgtcgaggcaagagtggcccaggggatcagagaagaagaagtgtcctaccagctagcgtttaacaagcaggaactcaggaaagtgatcaaggagtatcccgggaaggaggtcaagaagggtttagacaatctctataagaaggttgataagcatttatgcgaagaagagaaccttttacaagtggtgtggcattccatgcaagacgaatttatccgtcagtataaacacttcgaaggcctaatagctaggtgctaccccggctccggagtcaccatggagttcaccatccaagatatcttagattattgcagctccattgcccagagtcactag

SEQ ID NO: 279736 - DNA, 2640 bp, Artificial Sequence
  derived and/or modified sequence
atgacagccatcaagcacgccctgcagagggacatcttcaccccaaatgatgagcggctgctgagcatcgtgaatgtgtgcaaggccggcaagaagaagaagaactgcttcctgtgtgccaccgtgaccacagagaggcctgtgcaggtgaaggtggtgaaggtgaagaagagtgacaagggggacttctacaagaggcagatcgcctgggccctgcgggacctggccgtggtggatgccaaggatgccatcaaggagaaccctgagtttgacctgcactttgagaagatctacaagtgggtggccagcagcacagctgagaagaatgccttcatcagctgcatctggaagctgaaccagcgctacctgaggaagaagattgactttgtgaatgtgagcagccagctgctggaggagagcgtgcccagcggggagaaccagagcgtgactggaggagatgaggaggtggtggatgagtaccaggagctgaatgcccgggaggagcaggacatcgagatcatgatggagggctgtgaatatgccatcagcaatgctgaggcctttgctgagaagctgagccgggagctgcaggtgctggatggagccaacatccagagcatcatggccagcgagaagcaggtgaacatcctgatgaagctgctggatgaggccctgaaggaggtggaccagatcgagctgaagctgagcagctatgaggagatgctgcagagcgtgaaggagcagatggaccagatcagcgagagcaaccacctgatccacctgagcaacaccaacaacgtgaagctgctgtctgaaattgagttcctggtgaaccacatggacctggccaagggccacatcaaggccctgcaggagggggacctggccagcagccggggcatcgaggcctgcaccaatgctgctgatgccctgctgcagtgcatgaatgtggccctgcggcccggccatgacctgctgctggccgtgaagcagcagcagcagcgcttcagtgacctgcgggagctgtttgcccggcggctggccagccacctgaacaacgtgtttgtgcagcagggccatgaccagagcagcaccctggcccagcacagcgtggagctgaccctgcccaaccaccaccccttccaccgggacctgctgcgctatgccaagctgatggagtggctgaagagcacagattatggcaagtatgagggcctgaccaagaactacatggactacctgagccggctgtatgaaagagagatcaaggacttctttgaggtggccaagatcaagatgacaggcaccaccaaggagagcaagaagtttggcctgcacggcagcagcggcaagctgaccggcagcaccagcagcctgaacaagctgtctgtgcagagcagcggcaacagaagaagccagagcagcagcctgctggacatgggcaacatgtctgccagtgacctggatgtggccgacaggaccaagtttgacaagatctttgagcaggtgctgtctgagctggagcccctgtgcctggccgagcaggacttcatcagcaagttcttcaagctgcagcagcaccagagcatgcctggcaccatggccgaggccgaggacctggatggcggcaccctgagccggcagcacaactgtggcacccccctgcctgtgtcctctgagaaggacatgatccggcagatgatgatcaagatcttccgctgcatcgagcctgagctgaacaacctgattgccctgggggacaagattgacagcttcaacagcctgtacatgctggtgaagatgagccaccacgtgtggacagcccagaatgtggaccctgccagcttcctgagcaccaccctgggcaatgtgctggtgacagtgaagaggaactttgacaagtgcatcagcaaccagatccggcagatggaggaggtgaagatcagcaagaagagcaaggtgggcatcctgccctttgtggccgagtttgaggagtttgctggcctggccgagagcatcttcaagaatgctgagaggagaggagacctggacaaggcctacaccaagctgatccggggcgtgtttgtgaatgtggagaaggtggccaatgaaagccagaagaccccaagagatgtggtgatgatggagaacttccaccacatctttgccaccctgagccggctgaagatcagctgcctggaggccgagaagaaggaggccaagcagaagtacacagaccacctgcagagctatgtgatctacagcctgggccagcccctggagaagctgaaccacttctttgaaggagtggaggcccgggtggcccagggcatccgggaggaggaggtgtcctaccagctggccttcaacaagcaggagctgaggaaggtgatcaaggagtacccaggcaaggaggtgaagaagggcctggacaacctgtacaagaaggtggacaagcacctgtgtgaggaggagaacctgctgcaggtggtgtggcacagcatgcaggatgagttcatccggcagtacaagcactttgagggcctcatcgcccgctgctacccaggcagcggcgtgaccatggagttcaccatccaggacatcctggactactgcagcagcatcgcccagagccactag

SEQ ID NO: 279737 - DNA, 2640 bp, Artificial Sequence
  derived and/or modified sequence
atgaccgccatcaagcacgccctgcagcgggacatcttcacccccaacgacgagaggctgctctctatcgtcaatgtgtgcaaggcagggaagaagaaaaagaattgcttcttgtgtgctacagttaccaccgaaagacccgtgcaggtgaaggtcgttaaagttaagaagtcggataagggtgatttctacaaaagacagatagcatgggccctgagggatctggctgtggtggatgcaaaggatgccattaaggagaaccccgagtttgacctccacttcgagaaaatttacaagtgggtcgcttcatcaactgccgagaagaacgcatttatcagctgtatatggaagcttaaccagcgttacctgaggaagaaaatcgactttgttaacgtgtcaagccagctactagaggagagtgtgccatctggcgagaatcaaagcgtcaccggcggagacgaggaagtggtggacgaatatcaagagctcaatgcccgagaggaacaggatatcgagattatgatggagggctgtgaatacgctattagtaatgctgaggcatttgcagaaaaattgtcacgagagctgcaggtgctggatggtgcaaatattcagtctatcatggcatcagaaaagcaggtgaacattctcatgaagctgctggacgaggccctgaaggaagtagaccagattgaactcaagctaagctcctacgaagagatgctgcagagcgtgaaggagcagatggaccagatcagcgaatctaaccatctgattcacctgagcaatacaaacaacgtgaaactgttaagcgaaatagagttcctcgtgaaccatatggacttggctaagggacacatcaaggcattgcaggagggggacctggcatctagcagggggatcgaagcttgtacgaacgctgccgacgcattgctccagtgcatgaatgtggccctacggccaggccacgacctcctccttgcggttaaacagcagcagcagcggttctctgacctcagggagttatttgcgcgccgactggcgtcacacctcaacaacgtcttcgttcaacaagggcacgaccaaagtagtaccctcgcccagcactccgttgagctgactctgcccaaccatcatccatttcatcgtgatctgctgaggtacgccaagcttatggaatggctgaaatccactgactatggaaagtatgagggactgaccaaaaactacatggattatttgtcacggctgtacgaacgtgagatcaaagacttcttcgaggtagcaaaaatcaagatgaccgggacgaccaaggagagtaaaaaattcggtttacacgggagctctggcaaactgaccggctctacatcctctcttaataaactcagcgtccagtcctccgggaacagaagaagccagtcatcgtcactgctggacatgggcaacatgagcgcgagtgacctggatgtggccgacaggactaagttcgataaaatctttgagcaggtgcttagcgagcttgagcctctttgcttggccgagcaggactttatctctaagtttttcaagttgcagcaacaccagagcatgccggggaccatggcggaagcagaagatctcgacggtgggacactgtcgaggcaacataattgtgggactcccctgcctgtaagctctgagaaggacatgatacgccagatgatgataaagattttccgctgtatagaacccgagctgaacaaccttatagctctcggggacaagatcgacagttttaattctctgtatatgcttgtgaaaatgtcccatcatgtttggacagcccagaatgtcgatccggcgtcatttctgtcgacgaccttgggaaacgttctcgtgacggtaaaaagaaacttcgacaagtgtatatctaatcaaatccggcagatggaagaggtcaaaatctctaagaagtccaaagtgggcatcctccccttcgtagctgagtttgaagaatttgccggcttagccgagagtatttttaaaaatgccgagcgccgtggagatctggataaggcctacaccaagctgattagaggagtgtttgtgaacgtggaaaaagtcgccaatgagagccagaaaactccccgggacgttgtcatgatggaaaacttccaccatatcttcgcaacgcttagtcgtctcaagatctcctgtctagaggctgagaagaaggaagccaagcaaaagtacacagaccacctccagtcctatgtgatttatagcctgggtcaacccctcgagaaactgaaccactttttcgagggagtggaggcacgagtagcacagggaatcagagaggaagaggtgagctaccagttggcatttaacaaacaggagctcaggaaggtgattaaggagtatccgggaaaagaggtgaagaagggtctggataatctttacaaaaaggtggataagcacttgtgcgaggaagaaaacctgctgcaggtggtgtggcactctatgcaggacgagtttatccgccagtacaagcacttcgaaggtctcatcgcccgctgctaccctggcagcggggtcacaatggagtttacaatacaggatattctcgactattgttcatccatagcccagtcgcattag

SEQ ID NO: 279738 - DNA, 2640 bp, Artificial Sequence
  derived and/or modified sequence
atgaccgccatcaaacacgcactgcagcgtgacatctttaccccgaacgacgaacgcctcctgtctatcgttaacgtgtgcaaagccggaaagaaaaaaaagaattgctttctgtgtgcaactgtgactactgagagacccgtgcaggtgaaagttgtgaaagtgaagaagagtgacaagggagacttctacaagcggcagattgcttgggctctgagagacctggccgtggtcgatgctaaagatgctattaaggagaatcctgagttcgatctgcacttcgagaagatctacaaatgggtagcctcttcaacagctgagaaaaatgccttcatttcttgcatatggaaactgaatcagcgctacctcaggaaaaagattgacttcgtgaacgtcagctctcagttgctggaagagtcagtcccttcgggcgagaaccagagtgtgacggggggagatgaagaggtagtggacgagtatcaggaactcaacgctcgcgaggagcaagacattgagatcatgatggagggttgtgagtatgcgatcagtaacgccgaggcattcgccgagaagctgtctcgcgagctacaggtgcttgacggtgcaaatatccagtcaatcatggccagcgagaagcaggttaatatcctgatgaaactgctggatgaggccctaaaggaagtagatcaaatagaactaaaactgtccagctacgaagaaatgctgcagagcgtgaaagagcagatggaccagatctctgagagcaatcatttgattcacctatcaaacaccaataacgtcaagctcctgtctgagattgagtttctggtcaatcatatggatctcgccaaaggccacatcaaagcactgcaggagggtgacctggctagttcccgaggtattgaggcctgtaccaatgctgccgacgctttgctccaatgcatgaacgtcgcactccgcccaggccatgacctgctactggcagtgaagcagcagcagcagaggttttccgacctcagagagttattcgcaaggaggctggctagccatctaaacaacgtgttcgtgcagcaggggcacgatcagtcttctacgcttgcccagcattcagtcgaactgactttacctaaccatcaccctttccacagagatctgctccgctacgccaagctcatggagtggttgaaatctaccgactacggtaagtacgaagggctcacgaaaaattacatggactatcttagccggctctatgagcgtgagatcaaagatttctttgaagtggcaaagataaagatgacgggcacaaccaaggaatcaaagaagtttgggctgcacggatcctccggcaagctaaccggcagcacgtcatctctgaacaaattatccgtccagagttcaggaaataggaggagtcagtcaagcagcctccttgatatgggtaacatgtccgcatccgatctcgacgtagctgatagaaccaaattcgataagattttcgagcaggtgctgagtgagctggaacctctatgcttggccgaacaagattttatttccaaatttttcaaattgcagcaacatcagagcatgccgggaactatggcagaagccgaggaccttgatgggggtaccctgtcccggcagcataactgtgggacccctctcccagtctcttctgagaaggacatgatacgacagatgatgatcaagatctttcgctgcattgagcccgagcttaacaatctaatcgcactgggtgataagatcgactcattcaattcactctacatgctggtcaagatgagccatcatgtgtggacagcccagaatgtggaccccgcatcatttctgagcaccaccctggggaatgtgctggtaaccgtgaaaagaaacttcgacaagtgcatatccaaccagatccgccagatggaggaggtgaagatttctaagaaatccaaggtggggatcctgccatttgttgctgagttcgaagagtttgccggattagcggaatcaatcttcaagaatgcggagcggcgaggggacctggataaggcctataccaagctgataagaggtgtcttcgtcaatgtcgagaaagttgccaatgagagccagaagacgccacgagatgtcgtgatgatggagaatttccaccatatcttcgccaccctgagccgactcaaaatctcctgcctggaggccgagaaaaaagaggctaagcagaagtataccgatcacctacaaagttatgtcatctattccctgggccagcccttagagaagctcaatcattttttcgagggtgtcgaagcacgggttgcccagggaataagagaggaggaggtgagttaccagctggcatttaataagcaggagcttaggaaagtgatcaaagaatacccgggtaaagaggttaaaaagggcctcgataacttgtacaagaaagttgataagcacctgtgtgaagaggagaacttgctgcaggttgtgtggcacagcatgcaggacgagttcatacgccagtataagcacttcgagggtcttattgcaagatgctacccgggatccggagtcacaatggagttcacaattcaagacatcctggattattgcagctccattgctcagtcgcattag

SEQ ID NO: 279739 - DNA, 2640 bp, Artificial Sequence
  derived and/or modified sequence
atgaccgccatcaagcacgccctgcagagagacatcttcacccccaacgacgagagactgctgagcatcgtgaacgtgtgcaaggccggcaagaagaagaagaactgcttcctgtgcgccaccgtgaccaccgagagacccgtgcaggtgaaggtggtgaaggtgaagaagagcgacaagggcgacttctacaagagacagatcgcctgggccctgagagacctggccgtggtggacgccaaggacgccatcaaggagaaccccgagttcgacctgcacttcgagaagatctacaagtgggtggccagcagcaccgccgagaagaacgccttcatcagctgcatctggaagctgaaccagagatacctgagaaagaagatcgacttcgtgaacgtgagcagccagctgctggaggagagcgtgcccagcggcgagaaccagagcgtgaccggcggcgacgaggaggtggtggacgagtaccaggagctgaacgccagagaggagcaggacatcgagatcatgatggagggctgcgagtacgccatcagcaacgccgaggccttcgccgagaagctgagcagagagctgcaggtgctggacggcgccaacatccagagcatcatggccagcgagaagcaggtgaacatcctgatgaagctgctggacgaggccctgaaggaggtggaccagatcgagctgaagctgagcagctacgaggagatgctgcagagcgtgaaggagcagatggaccagatcagcgagagcaaccacctgatccacctgagcaacaccaacaacgtgaagctgctgagcgagatcgagttcctggtgaaccacatggacctggccaagggccacatcaaggccctgcaggagggcgacctggccagcagcagaggcatcgaggcctgcaccaacgccgccgacgccctgctgcagtgcatgaacgtggccctgagacccggccacgacctgctgctggccgtgaagcagcagcagcagagattcagcgacctgagagagctgttcgccagaagactggccagccacctgaacaacgtgttcgtgcagcagggccacgaccagagcagcaccctggcccagcacagcgtggagctgaccctgcccaaccaccaccccttccacagagacctgctgagatacgccaagctgatggagtggctgaagagcaccgactacggcaagtacgagggcctgaccaagaactacatggactacctgagcagactgtacgagagagagatcaaggacttcttcgaggtggccaagatcaagatgaccggcaccaccaaggagagcaagaagttcggcctgcacggcagcagcggcaagctgaccggcagcaccagcagcctgaacaagctgagcgtgcagagcagcggcaacagaagaagccagagcagcagcctgctggacatgggcaacatgagcgccagcgacctggacgtggccgacagaaccaagttcgacaagatcttcgagcaggtgctgagcgagctggagcccctgtgcctggccgagcaggacttcatcagcaagttcttcaagctgcagcagcaccagagcatgcccggcaccatggccgaggccgaggacctggacggcggcaccctgagcagacagcacaactgcggcacccccctgcccgtgagcagcgagaaggacatgatcagacagatgatgatcaagatcttcagatgcatcgagcccgagctgaacaacctgatcgccctgggcgacaagatcgacagcttcaacagcctgtacatgctggtgaagatgagccaccacgtgtggaccgcccagaacgtggaccccgccagcttcctgagcaccaccctgggcaacgtgctggtgaccgtgaagagaaacttcgacaagtgcatcagcaaccagatcagacagatggaggaggtgaagatcagcaagaagagcaaggtgggcatcctgcccttcgtggccgagttcgaggagttcgccggcctggccgagagcatcttcaagaacgccgagagaagaggcgacctggacaaggcctacaccaagctgatcagaggcgtgttcgtgaacgtggagaaggtggccaacgagagccagaagacccccagagacgtggtgatgatggagaacttccaccacatcttcgccaccctgagcagactgaagatcagctgcctggaggccgagaagaaggaggccaagcagaagtacaccgaccacctgcagagctacgtgatctacagcctgggccagcccctggagaagctgaaccacttcttcgagggcgtggaggccagagtggcccagggcatcagagaggaggaggtgagctaccagctggccttcaacaagcaggagctgagaaaggtgatcaaggagtaccccggcaaggaggtgaagaagggcctggacaacctgtacaagaaggtggacaagcacctgtgcgaggaggagaacctgctgcaggtggtgtggcacagcatgcaggacgagttcatcagacagtacaagcacttcgagggcctgatcgccagatgctaccccggcagcggcgtgaccatggagttcaccatccaggacatcctggactactgcagcagcatcgcccagagccactag

SEQ ID NO: 279740 - protein, 868 aa, Artificial Sequence
  derived and/or modified sequence
MGITESSDTPSSLSPLNLPGAGSEMEEKVAPVKPSRPKRHFSSAGTIESVNLDAIPLAIARLDNSAAKHKLAVKPKKQRVSKKHRRLAQDPQHEQGGLESRPCLDQNGHPGEDKPTWHEEEPNPLDSEEERRRQEDYWRELEAKCKRQKAEAAEKRRLEEQRLQALERRLWEENRRQELLEEEGEGQEPPLEAERAPREEQQRSLEAPGWEDAERREREERERLEAEEERRRLQAQAQAEERRRLEEDARLEERRRQEEEEGRCAEELKRQEEEEAEGWEELEQQEAEVQGPPEALEETGEGRRGAEEEDLGEEEEEGQAHLEDWRGQLSELLNDFEERLEDQERLKPEGQREHSEEPGICEEQNPEAERRREQQGRSGDFQGADRPGPEEKREEGDTEPLLKQEGPVEAAQPPVERKEAAALEQGRKVEELRWQEVDERQTMPRPYTFQVSSGGKQILFPKVNLSPVTPAKDTGLTAAPQEPKAPKASPVQHALPSSLSVPHTAILVTGAQLCGPAVNLSQIKDTACKSLLGLEEKKHAEAPAGENPPRGPGDARAGSGKAKPRQESPSSASALAEWASIRSRILKNAESDPRSSERDQLRPGDESTPRGRCDSRGNQRKTPPVNAKFSIMPAWQKFSDGGTETSKQSTEAESIRKRPMLGPSEETAPQPPPAGVRELGKGPEKSEMHREPADTTEGCKFAKDLPSFLVPSLPYPPQKVVAHTEFTTSSDSETANGIAKPDPVMPGGEEKASPFGIKLRRTNYSLRFNCDQQAEQKKKKRHSSTGDSADAGPPAAGSARGEKEMEGVALKHGPSLPQERKQAPSTRRDSAEPSSSRSVPVAHPGPPPASSQTPGPPVRPHQHPHFPN

SEQ ID NO: 279741 - protein, 728 aa, Artificial Sequence
  derived and/or modified sequence
MNQPESANDPEPLCAVCGQAHSLEENHFYSYPEEVDDDLICHICLQALLDPLDTPCGHTYCTLCLTNFLVEKDFCPMDRKPLVLQHCKKSSILVNKLLNKLLVTCPFREHCTQVLQRCDLEHHFQTSCKGASHYGLTKDRKRRSQDGCPDGCASLTATAPSPEVSAAATISLMTDEPGLDNPAYVSSAEDGQPAISPVDSGRSNRTRARPFERSTIRSRSFKKINRALSVLRRTKSGSAVANHADQGRENSENTTAPEVFPRLYHLIPDGEITSIKINRVDPSESLSIRLVGGSETPLVHIIIQHIYRDGVIARDGRLLPGDIILKVNGMDISNVPHNYAVRLLRQPCQVLWLTVMREQKFRSRNNGQAPDAYRPRDDSFHVILNKSSPEEQLGIKLVRKVDEPGVFIFNVLDGGVAYRHGQLEENDRVLAINGHDLRYGSPESAAHLIQASERRVHLVVSRQVRQRSPDIFQEAGWNSNGSWSPGPGERSNTPKPLHPTITCHEKVVNIQKDPGESLGMTVAGGASHREWDLPIYVISVEPGGVISRDGRIKTGDILLNVDGVELTEVSRSEAVALLKRTSSSIVLKALEVKEYEPQEDCSSPAALDSNHNMAPPSDWSPSWVMWLELPRCLYNCKDIVLRRNTAGSLGFCIVGGYEEYNGNKPFFIKSIVEGTPAYNDGRIRCGDILLAVNGRSTSGMIHACLARLLKELKGRITLTIVSWPGTFL

SEQ ID NO: 279742 - protein, 16 aa, Artificial Sequence
  derived and/or modified sequence
MNQPESANDPEPLCAV

SEQ ID NO: 279743 - protein, 99 aa, Artificial Sequence
  derived and/or modified sequence
MNQPESANDPEPLCAVCGQAHSLEENHFYSYPEEVDDDLICHICLQALLDPLDTPCGHTYCTLCLTNFLVEKDFCPMDRKPLVLQHCKKSSILVNKLLN

SEQ ID NO: 279744 - protein, 90 aa, Artificial Sequence
  derived and/or modified sequence
MNQPESANDPEPLCAVCGQAHSLEENHFYSYPEEVDDDLICHICLQALLDPLDTPCGHTYCTLCLTNFLVEKDFCPMDRKPLVLQHCKKS

SEQ ID NO: 279745 - protein, 126 aa, Artificial Sequence
  derived and/or modified sequence
MNQPESANDPEPLCAVCGQAHSLEENHFYSYPEEVDDDLICHICLQALLDPLDTPCGHTYCTLCLTNFLVEKDFCPMDRKPLVLQHCKKSSILVNKLLNKLLVTCPFREHCTQVLQRCDLEHHFQT

SEQ ID NO: 279746 - protein, 566 aa, Artificial Sequence
  derived and/or modified sequence
MAVQTAVRASQPRLPPLDNPAYVSSAEDGQPAISPVDSGRSNRTRARPFERSTIRSRSFKKINRALSVLRRTKSGSAVANHADQGRENSENTTAPEVFPRLYHLIPDGEITSIKINRVDPSESLSIRLVGGSETPLVHIIIQHIYRDGVIARDGRLLPGDIILKVNGMDISNVPHNYAVRLLRQPCQVLWLTVMREQKFRSRNNGQAPDAYRPRDDSFHVILNKSSPEEQLGIKLVRKVDEPGVFIFNVLDGGVAYRHGQLEENDRVLAINGHDLRYGSPESAAHLIQASERRVHLVVSRQVRQRSPDIFQEAGWNSNGSWSPGPGERSNTPKPLHPTITCHEKVVNIQKDPGESLGMTVAGGASHREWDLPIYVISVEPGGVISRDGRIKTGDILLNVDGVELTEVSRSEAVALLKRTSSSIVLKALEVKEYEPQEDCSSPAALDSNHNMAPPSDWSPSWVMWLELPRCLYNCKDIVLRRNTAGSLGFCIVGGYEEYNGNKPFFIKSIVEGTPAYNDGRIRCGDILLAVNGRSTSGMIHACLARLLKELKGRITLTIVSWPGTFL

SEQ ID NO: 279747 - DNA, 2187 bp, Artificial Sequence
  derived and/or modified sequence
atgaaccagcccgagagcgccaatgaccccgagccactgtgtgctgtgtgcggtcaggcccattccctggaagagaatcacttttacagttatcctgaggaggtcgacgacgatttgatttgtcatatctgtctccaagccctcttagatccattggacactccctgtgggcatacatattgtactctgtgcctgactaactttttggtggaaaaggacttttgtcctatggacaggaaacccctcgtcctgcaacattgtaaaaagtcaagcattttggttaacaagctactgaacaaattgttagttacatgccccttccgcgaacactgtacccaggtgctacagcgctgtgaccttgaacaccatttccagacatcctgcaagggcgccagccactacggcctgacaaaagaccggaaaagaagatcgcaggacggctgtccagatggctgtgcctcactcactgcaacagcgcccagtccagaggtgtcagcagctgctacaatctctctgatgaccgacgagcccggcctggacaaccctgcatacgtatcaagcgccgaagatggccaaccggctatatctccagtggacagcgggcgttccaatcgaactagagcaagaccattcgagaggtctacaatcaggtctcgaagttttaagaaaatcaacagggccctttcagtattaagacggactaagagcggctccgcagtcgcaaaccacgccgatcaaggacgcgaaaactctgagaacacaaccgccccggaggttttccccagactgtaccatctaattccagacggagaaataaccagtataaaaataaatagggtggaccctagcgaatcccttagcattcggctcgtaggaggctcagagactccgttggttcacattatcattcagcacatttacagggatggggtaatcgcacgagacggccgcctactccccggcgacattatattaaaggtgaacggaatggatattagcaacgtgccgcacaattacgccgtcaggcttctgagacaaccttgtcaggtgctctggctcacagtcatgcgagagcagaagtttaggagccggaataacggtcaggccccagacgcgtaccgccccagggacgactccttccatgtgattcttaataaatccagcccagaggagcaattgggcatcaagctcgtgcggaaggtggacgagcctggagttttcatctttaatgtgctcgacggtggcgtagcatacaggcatggacagctcgaggaaaatgacagggtgctggccatcaacgggcatgatttgcgctatggttctccagaaagcgcggctcacctgatacaggcttcagagaggcgggtgcacctagttgtgtccaggcaagtccgacagcggagccccgatatatttcaggaggctggatggaactctaatggatcctggtctccaggccccggcgaaagaagcaacacccccaaaccactacatcccaccatcacttgccatgagaaagtggtcaacatccagaaagaccctggcgaatcactgggcatgaccgtggcaggaggcgcgtcacaccgggagtgggaccttcctatttacgtgatcagtgtcgagccgggcggagtaatctcacgagatgggagaatcaagactggcgacatactcctaaatgtggacggtgtggaactaaccgaggtctccaggtctgaggccgtggcactactgaagcggacctcttcatctattgtcttgaaggctttggaagtgaaagagtacgagccgcaggaggactgctcttctcccgccgctctggacagcaaccataacatggctccgccaagtgattggtcaccatcctgggtcatgtggctggaattaccccgttgtctgtataattgtaaggacatagttctccgccgcaacaccgcgggaagcctgggattttgcatcgttggagggtatgaagaatacaacggtaacaaaccattctttatcaagtcgatcgtagagggtaccccggcatacaacgacggtcgcatccgatgcggagatattttactcgcagtgaacggaagatctaccagcggaatgatacacgcctgcttagctagactcctcaaagagctcaaaggccgcataacccttaccattgtttcttggcctgggacctttctgtag

SEQ ID NO: 279748 - DNA, 51 bp, Artificial Sequence
  derived and/or modified sequence
atgaatcagccagagtctgctaacgatccagaacccctgtgcgccgtctag

SEQ ID NO: 279749 - DNA, 300 bp, Artificial Sequence
  derived and/or modified sequence
atgaaccaacccgaatcagcaaatgatcctgaacccctttgcgccgtttgcggacaagcccactcactcgaagagaaccatttctactcctatcctgaagaagtggatgacgatctgatatgtcatatctgtctgcaagccttgctggatccactagacaccccatgcggtcatacgtattgtaccctgtgtctcactaattttctcgtggagaaagatttttgcccgatggaccgaaagcccctcgtgctccagcactgcaagaaatcaagcatcctcgtgaacaagctgctcaactag

SEQ ID NO: 279750 - DNA, 273 bp, Artificial Sequence
  derived and/or modified sequence
atgaatcagccagagtccgctaatgatcccgaaccgctctgcgccgtgtgcggtcaggcccacagcctggaggaaaaccacttttattcctacccagaggaggtggacgacgacctaatatgccacatttgtctgcaggccttgttagatccattggataccccatgcggacatacctactgcacactctgcctgacaaacttcctggtcgagaaagacttctgcccgatggaccggaagcccctcgtgctgcagcactgtaagaaatcttag

SEQ ID NO: 279751 - DNA, 381 bp, Artificial Sequence
  derived and/or modified sequence
atgaatcaacccgaatccgctaacgaccccgaacctctgtgtgcagtgtgtggtcaggcccactccctagaggaaaaccatttctactcgtatcccgaagaggtggatgacgacctcatatgtcacatttgtttgcaggctctactggaccccctcgataccccatgcggacatacatattgtactctctgcctcaccaatttcctggtggaaaaggacttttgtccgatggatcgcaagccattggtgcttcagcactgcaagaagtcttccattctggtgaacaagctcctcaataaattgctggtcacatgcccattcagagagcactgtacccaggtactgcaaaggtgcgaccttgagcaccactttcagacctag

SEQ ID NO: 279752 - DNA, 1701 bp, Artificial Sequence
  derived and/or modified sequence
atggcagtgcagacagcagtcagagcctcacagccaagattaccccccctggacaaccctgcctatgtgagctccgcagaggacgggcagcccgccatcagtcctgttgacagtgggcgttccaacagaacgagggctaggcctttcgagaggagtaccatccggagccggtcttttaaaaagatcaatcgtgcactgtcagtgctgaggcgcactaagtcaggtagtgccgtcgcaaatcacgctgaccaaggccgagagaattccgagaacacgacagccccagaagtgttccctagactctaccacttaatccccgacggggagattactagtatcaagatcaaccgggtagaccccagcgagtccctctccattaggcttgtgggcggctccgagacgcccttagtccatataataatccaacacatatacagggacggcgtaatagcccgagatggccggctgcttccaggggacattatactcaaggtgaatggaatggatatctcaaacgtcccacacaactacgcggtcaggctactccgacagccctgccaggtcctttggctgacagtaatgcgtgagcagaagttccgctctcgcaataacggtcaagcccctgacgcgtatcgcccaagggatgacagtttccacgttatccttaataagtcctctccggaagaacagttgggtataaaattggtgcgcaaagtggacgagccgggcgtgtttatcttcaatgtgttggatgggggggttgcctataggcacgggcagctggaagagaatgaccgcgttctggccatcaatggacacgacttaaggtatgggtctcctgagtcagccgctcacctgatccaggccagtgaacgtcgggtccacctggtggtctcccgacaggtaagacagcgctcccccgacatattccaagaggcaggctggaattctaatggatcttggtctcccggtccaggagagcgctcaaatacaccaaaacccctccatcccactattacatgccatgaaaaggtggtgaatatccagaaagaccccggcgagtcccttgggatgaccgtggctggaggagcgtcacaccgcgagtgggacctacctatttacgtgatctcagtcgagccagggggggtcatcagcagagatgggcgaatcaagaccggtgatatcctcctgaatgtagacggagtggagttaactgaggtatctcggtccgaggctgtggcccttctgaagagaacctcttcctcaatcgttctaaaggctctcgaagtgaaagagtatgaacctcaggaggactgttctagccccgctgccctcgactcgaaccacaatatggcccccccaagcgattggagcccttcatgggtcatgtggctggaactgcctcggtgtctgtataattgtaaggatattgtgctgcggaggaatacggcagggagcctcggtttttgtatcgttgggggctatgaggagtataatgggaataagcctttcttcattaagagcatagtggagggcacccctgcgtataacgacggccggatccggtgcggcgatattttacttgcagttaacgggcgcagtacttccggcatgatccatgcctgtctcgctcggttactgaaggagctgaaggggagaatcaccctaaccattgtctcatggcccggaactttcctgtag

SEQ ID NO: 279753 - DNA, 2187 bp, Artificial Sequence
  derived and/or modified sequence
atgaaccagcctgagagcgccaatgaccctgagcccctgtgtgctgtgtgtggccaggcccacagcctggaggagaaccacttctacagctacccagaggaggtggatgatgacctgatctgccacatctgcctgcaggccctgctggaccccctggacaccccctgtggccacacctactgcaccctgtgcctgaccaacttcctggtggagaaggacttctgccccatggacaggaagcccctggtgctgcagcactgcaagaagagcagcatcctggtgaacaagctgctgaacaagctgctggtgacctgccccttccgggagcactgcacccaggtgctgcagagatgtgacctggagcaccacttccagaccagctgcaagggggccagccactacggcctgaccaaggacaggaagaggaggagccaggacggctgcccagatggctgtgccagcctgacagccacagcccccagccctgaggtgtctgctgctgccaccatcagcctgatgacagatgagcccggcctggacaacccagcctacgtgtcctctgcagaagatggccagcctgccatcagccctgtggacagcggccgcagcaacagaacccgggcccggccctttgagaggagcaccatccgcagccgctccttcaagaagatcaacagagccctgtctgtgctgcggaggaccaagagcggcagcgctgtggccaaccacgccgaccagggcagagaaaattctgagaacaccacagcccctgaggtgttcccccggctgtaccacctgatcccagatggagagatcaccagcatcaagatcaacagagtggaccccagcgagagcctgagcatccggctggtgggcggcagcgagacccccctggtgcacatcatcatccagcacatctacagagatggagtcatcgccagagatggccgcctgctgcccggggacatcatcctgaaggtgaatggcatggacatcagcaatgtgccccacaactatgctgtgcggctgctgcggcagccctgccaggtgctgtggctgactgtgatgagggagcagaagttccgcagcaggaacaacggccaggccccagatgcctaccggcccagagatgacagcttccacgtgatcctgaacaagagcagccctgaggagcagctgggcatcaagctggtgaggaaggtggatgagcccggggtcttcatcttcaacgtgctggatggaggagtggcctaccgccacggccagctggaggagaatgacagagtgctggccatcaatggacatgacctgcgctatggcagccctgagagcgctgcccacctgatccaggccagcgagcggcgggtgcacctggtggtgtcccggcaggtgcggcagaggagcccagacatcttccaggaggccggctggaacagcaatggctcctggagccctggccctggagagaggagcaacacccccaagcccctgcaccccaccatcacctgccacgagaaggtggtgaacatccagaaggaccccggggagagcctgggcatgacagtggccggcggggccagccaccgggagtgggacctgcccatctacgtgatctctgtggagcccggcggcgtcatcagcagagatggccgcatcaagacaggagacatcctgctgaatgtggatggagtggagctgacagaggtgagccgctctgaggccgtggccctgctgaagaggaccagcagcagcatcgtgctgaaggccctggaggtgaaggagtatgagccccaggaggactgcagcagccctgctgccctggacagcaaccacaacatggcccccccaagtgactggagccccagctgggtgatgtggctggagctgccccgctgcctgtacaactgcaaggacatcgtgctgcggaggaacacagctggcagcctgggcttctgcatcgtgggcggctatgaggagtacaatggaaacaagcccttcttcatcaagagcatcgtggagggcaccccagcctacaatgatggccgcatccgctgtggggacatcctgctggccgtgaatggccgcagcaccagcggcatgatccacgcctgcctggcccggctgctgaaggagctgaagggccgcatcaccctgaccatcgtgtcctggccaggcaccttcctgtag

SEQ ID NO: 279754 - DNA, 51 bp, Artificial Sequence
  derived and/or modified sequence
atgaaccagcctgagagcgccaatgaccctgagcccctgtgtgctgtgtag

SEQ ID NO: 279755 - DNA, 300 bp, Artificial Sequence
  derived and/or modified sequence
atgaaccagcctgagagcgccaatgaccctgagcccctgtgtgctgtgtgtggccaggcccacagcctggaggagaaccacttctacagctacccagaggaggtggatgatgacctgatctgccacatctgcctgcaggccctgctggaccccctggacaccccctgtggccacacctactgcaccctgtgcctgaccaacttcctggtggagaaggacttctgccccatggacaggaagcccctggtgctgcagcactgcaagaagagcagcatcctggtgaacaagctgctgaactag

SEQ ID NO: 279756 - DNA, 273 bp, Artificial Sequence
  derived and/or modified sequence
atgaaccagcctgagagcgccaatgaccctgagcccctgtgtgctgtgtgtggccaggcccacagcctggaggagaaccacttctacagctacccagaggaggtggatgatgacctgatctgccacatctgcctgcaggccctgctggaccccctggacaccccctgtggccacacctactgcaccctgtgcctgaccaacttcctggtggagaaggacttctgccccatggacaggaagcccctggtgctgcagcactgcaagaagagctag

SEQ ID NO: 279757 - DNA, 381 bp, Artificial Sequence
  derived and/or modified sequence
atgaaccagcctgagagcgccaatgaccctgagcccctgtgtgctgtgtgtggccaggcccacagcctggaggagaaccacttctacagctacccagaggaggtggatgatgacctgatctgccacatctgcctgcaggccctgctggaccccctggacaccccctgtggccacacctactgcaccctgtgcctgaccaacttcctggtggagaaggacttctgccccatggacaggaagcccctggtgctgcagcactgcaagaagagcagcatcctggtgaacaagctgctgaacaagctgctggtgacctgccccttccgggagcactgcacccaggtgctgcagagatgtgacctggagcaccacttccagacctag

SEQ ID NO: 279758 - DNA, 1701 bp, Artificial Sequence
  derived and/or modified sequence
atggctgtgcagacagctgtgcgggccagccagccccggctgccccccctggacaacccagcctacgtgtcctctgcagaagatggccagcctgccatcagccctgtggacagcggccgcagcaacagaacccgggcccggccctttgagaggagcaccatccgcagccgctccttcaagaagatcaacagagccctgtctgtgctgcggaggaccaagagcggcagcgctgtggccaaccacgccgaccagggcagagaaaattctgagaacaccacagcccctgaggtgttcccccggctgtaccacctgatcccagatggagagatcaccagcatcaagatcaacagagtggaccccagcgagagcctgagcatccggctggtgggcggcagcgagacccccctggtgcacatcatcatccagcacatctacagagatggagtcatcgccagagatggccgcctgctgcccggggacatcatcctgaaggtgaatggcatggacatcagcaatgtgccccacaactatgctgtgcggctgctgcggcagccctgccaggtgctgtggctgactgtgatgagggagcagaagttccgcagcaggaacaacggccaggccccagatgcctaccggcccagagatgacagcttccacgtgatcctgaacaagagcagccctgaggagcagctgggcatcaagctggtgaggaaggtggatgagcccggggtcttcatcttcaacgtgctggatggaggagtggcctaccgccacggccagctggaggagaatgacagagtgctggccatcaatggacatgacctgcgctatggcagccctgagagcgctgcccacctgatccaggccagcgagcggcgggtgcacctggtggtgtcccggcaggtgcggcagaggagcccagacatcttccaggaggccggctggaacagcaatggctcctggagccctggccctggagagaggagcaacacccccaagcccctgcaccccaccatcacctgccacgagaaggtggtgaacatccagaaggaccccggggagagcctgggcatgacagtggccggcggggccagccaccgggagtgggacctgcccatctacgtgatctctgtggagcccggcggcgtcatcagcagagatggccgcatcaagacaggagacatcctgctgaatgtggatggagtggagctgacagaggtgagccgctctgaggccgtggccctgctgaagaggaccagcagcagcatcgtgctgaaggccctggaggtgaaggagtatgagccccaggaggactgcagcagccctgctgccctggacagcaaccacaacatggcccccccaagtgactggagccccagctgggtgatgtggctggagctgccccgctgcctgtacaactgcaaggacatcgtgctgcggaggaacacagctggcagcctgggcttctgcatcgtgggcggctatgaggagtacaatggaaacaagcccttcttcatcaagagcatcgtggagggcaccccagcctacaatgatggccgcatccgctgtggggacatcctgctggccgtgaatggccgcagcaccagcggcatgatccacgcctgcctggcccggctgctgaaggagctgaagggccgcatcaccctgaccatcgtgtcctggccaggcaccttcctgtag

SEQ ID NO: 279759 - DNA, 2953 bp, Artificial Sequence
  derived and/or modified sequence
tttcaatccctaaggtctcagcaatgctttatctgtcggggcttccgtgatgtcacccatttcctggtctggagcgaccaatgccgtcctccttcctccaggcacctgttcaccgaagttgaggctggtcacaactccggcggcccaaggagctgctcggttcacccacaaggaatgagagctgcctgcctgctgctgcttggagagccccagacagtcgcttgaagaggtgtgtggatgtctcctagatcttgacttgctcctgaggaaatattgtgtgactgagtttcctgttatactgctctccaatccatcatgaaccagccagagtctgccaacgatcctgaacccctgtgtgcagtgtgtggccaagcccactccttggaggaaaaccacttctacagctatccagaggaagtggatgatgacctcatctgccacatctgcctgcaggctttgctggaccccctggacactccgtgtggacacacctactgcaccctctgcctcaccaacttcctggtggagaaggacttctgtcccatggaccgcaagcctctggttctgcagcactgcaagaagtccagcatcctggtcaacaaactcctcaacaagctactggtgacctgcccattcagggagcactgcacccaggtgttgcagcgctgtgacctcgagcatcactttcaaaccagctgtaaaggtgcctcccactacggcctgaccaaagataggaagaggcgctcacaagatggctgtccagacggctgtgcgagcctcacagccacggctccctccccagaggtttctgcagctgccaccatctccttaatgacagacgagcctggcctagacaaccctgcctacgtgtcctcggcagaggacgggcagccagcaatcagcccagtggactctggccggagcaaccgaactagggcacggccctttgagagatccactattagaagcagatcatttaaaaaaataaatcgagctttgagtgttcttcgaaggacaaagagcgggagtgcagttgccaaccatgccgaccagggcagggaaaattctgaaaacaccactgcccctgaagtctttccaaggttgtaccacctgattccagatggtgaaattaccagcatcaagatcaatcgagtagatcccagtgaaagcctctctattaggctggtgggaggtagcgaaaccccactggtccatatcattatccaacacatttatcgtgatggggtgatcgccagagacggccggctactgccaggagacatcattctaaaggtcaacgggatggacatcagcaatgtccctcacaactacgctgtgcgtctcctgcggcagccctgccaggtgctgtggctgactgtgatgcgtgaacagaagttccgcagcaggaacaatggacaggccccggatgcctacagaccccgagatgacagctttcatgtgattctcaacaaaagtagccccgaggagcagcttggaataaaactggtgcgcaaggtggatgagcctggggttttcatcttcaatgtgctggatggcggtgtggcatatcgacatggtcagcttgaggagaatgaccgtgtgttagccatcaatggacatgatcttcgatatggcagcccagaaagtgcggctcatctgattcaggccagtgaaagacgtgttcacctcgtcgtgtcccgccaggttcggcagcggagccctgacatctttcaggaagccggctggaacagcaatggcagctggtccccagggccaggggagaggagcaacactcccaagcccctccatcctacaattacttgtcatgagaaggtggtaaatatccaaaaagaccccggtgaatctctcggcatgaccgtcgcagggggagcatcacatagagaatgggatttgcctatctatgtcatcagtgttgagcccggaggagtcataagcagagatggaagaataaaaacaggtgacattttgttgaatgtggatggggtcgaactgacagaggtcagccggagtgaggcagtggcattattgaaaagaacatcatcctcgatagtactcaaagctttggaagtcaaagagtatgagccccaggaagactgcagcagcccagcagccctggactccaaccacaacatggccccacccagtgactggtccccatcctgggtcatgtggctggaattaccacggtgcttgtataactgtaaagatattgtattacgaagaaacacagctggaagtctgggcttctgcattgtaggaggttatgaagaatacaatggaaacaaaccttttttcatcaaatccattgttgaaggaacaccagcatacaatgatggaagaattagatgtggtgatattcttcttgctgtcaatggtagaagtacatcaggaatgatacatgcttgcttggcaagactgctgaaagaacttaaaggaagaattactctaactattgtttcttggcctggcacttttttatagaatcaatgatgggtcagaggaaaacagaaaaatcacaaataggctaagaagttgaaacactatatttatcttgtcagtttttatatttaaagaaagaatacattgtaaaaatgtcaggaaaagtatgatcatctaatgaaagccagttacacctcagaaaatatgattccaaaaaaattaaaactactagttttttttcagtgtggaggatttctcattactctacaacattgtttatattttttctattcaataaaaagccctaaaacaactaaaatgatttgtataccccactgaattcaagctgatttaaatttaaaatttggtatatgctgaagtctgccaagggtacattatggccatttttaatttacagctaaaatattttttaaaatgcattgctgagaaacgttgctttcatcaaacaagaataaatatttttcagaagtta

SEQ ID NO: 279760 - DNA, 572 bp, Artificial Sequence
  derived and/or modified sequence
agaagagatttgtcactgatgctaatgcatgctgctctgcaggggaccactctccctcgaagctccccatagctgctctcagttttatggatctgctctactcaaagccttgcagaaggggcaggggatgcccaggttaacccccgcacgtacaaaggtggagcagttttcatgcatagctgggacgaagaacactggaaagagaaagaaaaattttccgagctactgctaagccagaaaagctcagctctcaaacggactatctcctgagacgtcacacagctgggaactgatccgcaatacagcaaaggcacctgttcaccgaagttgaggctggtcacaactccggcggcccaaggagctgctcggttcacccacaaggaatgagagctgcctgcctgctgctgcttggagagccccagacagtcgcttgaagaggtgtgtggatgtctcctagatcttgacttgctcctgaggaaatattgtgtgactgagtttcctgttatactgctctccaatccatcatgaaccagccagagtctgccaacgatcctgaacccctgtgtgcagtg

SEQ ID NO: 279761 - DNA, 731 bp, Artificial Sequence
  derived and/or modified sequence
aaggaagttcaggggcgtctcagccccatccaaaccagaagagatttgtcactgatgctaatgcatgctgctctgcaggggaccactctccctcgaagctccccatagctgctctcagttttatggatctgctctactcaaagccttgcagaaggggcaggggatgcccaggttaacccccgcacgtacaaaggtggagcagttttcatgcatagctgggacgaagaacactggaaagagaaagaaaaattttccgagctactgctaagccagaaaagctcagctctcaaacggactatctcctgagacgtcacacagctgggaactgatccgcaatacagcaaaggtgtgtggatgtctcctagatcttgacttgctcctgaggaaatattgtgtgactgagtttcctgttatactgctctccaatccatcatgaaccagccagagtctgccaacgatcctgaacccctgtgtgcagtgtgtggccaagcccactccttggaggaaaaccacttctacagctatccagaggaagtggatgatgacctcatctgccacatctgcctgcaggctttgctggaccccctggacactccgtgtggacacacctactgcaccctctgcctcaccaacttcctggtggagaaggacttctgtcccatggaccgcaagcctctggttctgcagcactgcaagaagtccagcatcctggtcaacaaactcctcaacaa

SEQ ID NO: 279762 - DNA, 603 bp, Artificial Sequence
  derived and/or modified sequence
acacggggctggacacgtgctgtgctcaggaaagaaagtaaattccacctggcaaattgctctaactgatttatttgtccacaaagagacgccacctacctgcttgcaggtattcaggcacctgttcaccgaagttgaggctggtcacaactccggcggcccaaggagctgctcggttcacccacaaggaatgagagctgcctgcctgctgctgcttggagagccccagacagtcgcttgaagaggtgtgtggatgtctcctagatcttgacttgctcctgaggaaatattgtgtgactgagtttcctgttatactgctctccaatccatcatgaaccagccagagtctgccaacgatcctgaacccctgtgtgcagtgtgtggccaagcccactccttggaggaaaaccacttctacagctatccagaggaagtggatgatgacctcatctgccacatctgcctgcaggctttgctggaccccctggacactccgtgtggacacacctactgcaccctctgcctcaccaacttcctggtggagaaggacttctgtcccatggaccgcaagcctctggttctgcagcactgcaagaagtccag

SEQ ID NO: 279763 - DNA, 1024 bp, Artificial Sequence
  derived and/or modified sequence
cgccatgtttctgaggcctccccagccatgtggaactcaggacactggggaaatagccgagttttgaagaatgtcagcagggagccaccagggatcatcctccccggtaagaagagacctccagagaccttcaggaagctggaaagaagcttccaatgattcccagtggtagaagtgtgtggtgcaaaggcacttaggtggacaggtttggccctcaacatgaacttgatgttgctaacacaggttagtctggcctattgaaccatcttttactgctgtgaccttcaaaaatgaaagctgtggttttgccctgagaagaagaaaaggagatttgaaatatgactcagattcttccctgcaaaaggctgggacccttgaaaactatctacgtggaaaagtgagagaacaaggggacacaagcaaagctgcccaggcacctgttcaccgaagttgaggctggtcacaactccggcggcccaaggagctgctcggttcacccacaaggaatgagagctgcctgcctgctgctgcttggagagccccagacagtcgcttgaagaggtgtgtggatgtctcctagatcttgacttgctcctgaggaaatattgtgtgactgagtttcctgttatactgctctccaatccatcatgaaccagccagagtctgccaacgatcctgaacccctgtgtgcagtgtgtggccaagcccactccttggaggaaaaccacttctacagctatccagaggaagtggatgatgacctcatctgccacatctgcctgcaggctttgctggaccccctggacactccgtgtggacacacctactgcaccctctgcctcaccaacttcctggtggagaaggacttctgtcccatggaccgcaagcctctggttctgcagcactgcaagaagtccagcatcctggtcaacaaactcctcaacaagctactggtgacctgcccattcagggagcactgcacccaggtgttgcagcgctgtgacctcgagcatcactttcaaac

SEQ ID NO: 279764 - DNA, 2336 bp, Artificial Sequence
  derived and/or modified sequence
atggctgtccagacggctgtgcgagcctcacagccacggctccctcccctagacaaccctgcctacgtgtcctcggcagaggacgggcagccagcaatcagcccagtggactctggccggagcaaccgaactagggcacggccctttgagagatccactattagaagcagatcatttaaaaaaataaatcgagctttgagtgttcttcgaaggacaaagagcgggagtgcagttgccaaccatgccgaccagggcagggaaaattctgaaaacaccactgcccctgaagtctttccaaggttgtaccacctgattccagatggtgaaattaccagcatcaagatcaatcgagtagatcccagtgaaagcctctctattaggctggtgggaggtagcgaaaccccactggtccatatcattatccaacacatttatcgtgatggggtgatcgccagagacggccggctactgccaggagacatcattctaaaggtcaacgggatggacatcagcaatgtccctcacaactacgctgtgcgtctcctgcggcagccctgccaggtgctgtggctgactgtgatgcgtgaacagaagttccgcagcaggaacaatggacaggccccggatgcctacagaccccgagatgacagctttcatgtgattctcaacaaaagtagccccgaggagcagcttggaataaaactggtgcgcaaggtggatgagcctggggttttcatcttcaatgtgctggatggcggtgtggcatatcgacatggtcagcttgaggagaatgaccgtgtgttagccatcaatggacatgatcttcgatatggcagcccagaaagtgcggctcatctgattcaggccagtgaaagacgtgttcacctcgtcgtgtcccgccaggttcggcagcggagccctgacatctttcaggaagccggctggaacagcaatggcagctggtccccagggccaggggagaggagcaacactcccaagcccctccatcctacaattacttgtcatgagaaggtggtaaatatccaaaaagaccccggtgaatctctcggcatgaccgtcgcagggggagcatcacatagagaatgggatttgcctatctatgtcatcagtgttgagcccggaggagtcataagcagagatggaagaataaaaacaggtgacattttgttgaatgtggatggggtcgaactgacagaggtcagccggagtgaggcagtggcattattgaaaagaacatcatcctcgatagtactcaaagctttggaagtcaaagagtatgagccccaggaagactgcagcagcccagcagccctggactccaaccacaacatggccccacccagtgactggtccccatcctgggtcatgtggctggaattaccacggtgcttgtataactgtaaagatattgtattacgaagaaacacagctggaagtctgggcttctgcattgtaggaggttatgaagaatacaatggaaacaaaccttttttcatcaaatccattgttgaaggaacaccagcatacaatgatggaagaattagatgtggtgatattcttcttgctgtcaatggtagaagtacatcaggaatgatacatgcttgcttggcaagactgctgaaagaacttaaaggaagaattactctaactattgtttcttggcctggcacttttttatagaatcaatgatgggtcagaggaaaacagaaaaatcacaaataggctaagaagttgaaacactatatttatcttgtcagtttttatatttaaagaaagaatacattgtaaaaatgtcaggaaaagtatgatcatctaatgaaagccagttacacctcagaaaatatgattccaaaaaaattaaaactactagttttttttcagtgtggaggatttctcattactctacaacattgtttatattttttctattcaataaaaagccctaaaacaactaaaatgatttgtataccccactgaattcaagctgatttaaatttaaaatttggtatatgctgaagtctgccaagggtacattatggccatttttaatttacagctaaaatattttttaaaatgcattgctgagaaacgttgctttcatcaaacaagaataaatatttttcagaagttatagttgtcttttagtatgtgatactaattaagattacttttgtattatcactatttaaaagatcctagtaatttattctttcaaataccatgttatttgttaccatcaccgatgaatacctcctaggcttatccctaaaaatgctcgctcagagaattaattataaacttgttttgtttttagt

SEQ ID NO: 279765 - DNA, 2187 bp, Artificial Sequence
  derived and/or modified sequence
atgaaccagcccgagagcgccaacgaccccgagcccctgtgcgccgtgtgcggccaggcacacagtctagaagagaatcatttctacagttaccccgaagaggttgatgatgaccttatttgccacatttgcctgcaggcactcctggaccctttagacacgccttgcggtcacacctactgcactctctgtctcaccaatttccttgtggaaaaggacttctgccctatggataggaagccactggtgctgcagcactgtaaaaaaagttctattctggtaaacaagttactcaataaactgctcgtcacatgtccgttccgggaacactgcacccaagtgctgcagagatgcgacttggaacaccactttcagacaagttgtaagggtgcctcccattatggcctgactaaggaccgtaagcgcaggtctcaggacggttgtcctgacggatgcgcctctcttactgcaacagcaccatccccagaagtctctgctgctgcgaccatctcattaatgacagatgagccagggctcgacaacccggcctatgtcagcagcgccgaggacggccaacccgctatctcacccgtcgacagcgggcgcagtaatcgaactcgggcccgtccttttgaaaggtccactattcgctctcggagcttcaaaaagatcaatagagccttaagcgtgctgcggcgcaccaaaagcggttccgcggttgccaatcacgccgaccagggaagggaaaattccgagaatacaactgctccggaagtcttcccacgactgtatcacctcatcccagacggcgaaattaccagcataaagatcaaccgggtggatccttcagagagcctgtctataaggctggtgggtggcagtgaaacgccgctggtccacatcataattcaacacatatatcgggatggagtaatcgcgcgcgacggtagactccttccaggggatatcatattgaaagtaaacggaatggatatttctaatgtcccgcacaattatgctgtacggttattgagacaaccatgccaggtcctctggctcaccgtgatgcgcgagcagaaattccgctcaagaaataacgggcaggccccagacgcttaccggcctagggacgatagctttcacgtaatcttgaataagagctcacctgaagagcaactgggaattaagctggttaggaaggttgatgaacctggcgttttcatctttaacgtcttggatgggggcgtagcctaccgacatgggcagctggaggaaaatgatcgtgtcctggccattaatggacacgatctccggtacggctcaccagagagtgccgcacatctgattcaggcgtctgagagacgcgtgcatctcgtcgtgagtcgccaggtccgccaacgatccccagatatatttcaggaagcgggctggaattccaacggtagctggtctcccggtccaggcgaaagatccaatacacctaaacccctccatccaaccatcacttgtcacgaaaaggtcgttaacattcaaaaagacccgggtgagtcactgggaatgaccgtcgctggcggcgctagtcacagggagtgggatcttcccatctacgtaatcagtgtcgagcccggaggtgtaatatcccgcgacggacgcataaagacgggagatatcctgctcaacgttgacggggtggagctgactgaggtgtctaggtcagaggctgtggctttgttgaagcggacaagctcgtccattgtgcttaaagcactcgaggtaaaagaatacgaacctcaggaagactgtagctcaccagccgccctcgattccaatcataacatggccccgcccagtgattggagcccaagttgggtcatgtggctcgagctacctcgttgcctatataattgtaaggacatcgttcttcgaagaaacaccgcaggttcactgggtttctgtatcgttggcgggtatgaggaatataatggaaataaaccattttttattaaatccattgtggaaggtacccctgcgtacaacgatggcagaatcagatgtggcgacattctcctcgccgtgaacggacgcagcacttcaggtatgatccatgcatgtttagcacggctccttaaagaactgaagggacgtatcacactcacgattgtctcttggcctggcaccttcctctag

SEQ ID NO: 279766 - DNA, 51 bp, Artificial Sequence
  derived and/or modified sequence
atgaaccagcccgagagcgccaacgaccccgagcccctgtgcgccgtctag

SEQ ID NO: 279767 - DNA, 300 bp, Artificial Sequence
  derived and/or modified sequence
atgaaccagcccgagagcgccaacgaccccgagcccctgtgcgccgtatgcggtcaggcacacagcctagaagagaaccacttctactcttaccccgaggaggttgacgatgacctgatctgccacatctgcctacaagcactgctcgacccactggacactccatgcggacacacatattgcactctgtgccttactaactttctagtcgagaaggatttctgtcctatggatcggaagcccctggttctgcagcattgtaaaaagtcatcgatcctggtgaataaactactgaattag

SEQ ID NO: 279768 - DNA, 273 bp, Artificial Sequence
  derived and/or modified sequence
atgaaccagcccgagagcgccaacgaccccgagcccctgtgcgccgtgtgcggacaggcgcattctctggaagagaaccacttctactcttacccagaggaagtcgacgatgatcttatctgtcacatctgtctgcaagcacttctggaccccctcgatactccgtgcgggcatacctactgtacactctgccttaccaactttttggttgaaaaagatttctgtcccatggacagaaaaccgctggtgcttcagcactgtaagaaatcctag

SEQ ID NO: 279769 - DNA, 381 bp, Artificial Sequence
  derived and/or modified sequence
atgaaccagcccgagagcgccaacgaccccgagcccctgtgcgccgtatgtgggcaggcccattccctggaagaaaaccacttttacagttaccccgaggaggtggatgacgatctgatctgccacatctgtcttcaggccctgttggaccctctggacacgccatgcggacacacatattgcactctgtgtcttaccaatttcctcgtagagaaagacttctgccccatggacagaaaacccttagtcctgcagcattgcaaaaaatcttccatactagtcaacaagctgttaaacaaactgctggtgacttgccctttcagggagcactgtacgcaggtactccagaggtgcgatctggagcaccacttccaaacttag

SEQ ID NO: 279770 - DNA, 1701 bp, Artificial Sequence
  derived and/or modified sequence
atggccgtgcagaccgccgtgcgggccagccagccccggctgccccccctggataacccagcttatgtgtcatccgccgaagatggccagccagctatttctcctgtggattcgggccgttctaaccgcacacgggcccgcccctttgaacggagtaccatcagaagccggtcgtttaagaagatcaatcgagccttgtccgtgttgagacgtaccaagtctggatccgccgtggctaaccatgctgatcaaggcagagaaaattcagagaataccactgctcctgaggtcttcccgcggctctaccacttaatacctgatggagagataacgagtatcaaaattaacagggtcgacccgagtgagtctctctccatcagactcgtggggggtagtgaaacgccgttagtccacatcattattcaacacatatatcgtgacggtgtcattgctagggatggccgcttacttccgggggatattatattaaaagtgaacggaatggacatcagcaacgtgccccacaactatgctgtgcgtctacttagacaaccgtgccaagttttgtggctgactgtcatgcgggaacaaaaattcagaagccgaaataacggtcaggccccggatgcgtatagacctagggatgatagttttcacgtgattcttaacaagtcttccccagaagagcagctgggaattaagctggtgcgaaaggtggatgagccaggcgtcttcattttcaacgtgctggatgggggtgtcgcttacagacacgggcaactggaagaaaatgaccgggtgcttgccatcaacggccatgatctgaggtacggaagccctgaatctgccgcacatcttatccaagcatctgagcgccgagtgcatctagtggtgagtcggcaggttcggcagcgtagccccgacatctttcaagaagccggatggaattctaatggttcatggagtcccgggccaggtgaaaggtccaatacccctaaaccattacaccccactatcacatgccatgaaaaggtagtgaacatccagaaagaccccggggagtccctgggcatgaccgtggccggcggggcgagtcaccgcgagtgggaccttcctatatacgtaatctctgtagagccggggggcgtgattagtcgggatggacgaatcaaaacgggcgacatcttgcttaacgtagatggcgtcgagctgacagaagtgtctaggagcgaggccgttgcgctcctgaagcgcacaagttcaagtattgtcctaaaagcgctcgaggtcaaggaatatgaacctcaggaggactgcagtagtccagccgcgctcgacagtaaccacaacatggctcccccttcagactggtcacctagttgggtaatgtggctggagctgcccagatgcctgtataattgcaaggacatcgtgctgagaagaaatactgctggctctcttggtttctgcatcgtaggagggtacgaggagtacaacggtaacaagccatttttcattaaaagtatcgttgagggaactccggcatacaacgatggtcgtattagatgcggcgacattcttctcgcagtgaacgggcggtcaacaagcggtatgatacacgcatgcctggcgagactcctcaaggagctgaaggggcgcattaccctgaccatcgtgagctggccagggaccttcctgtag

SEQ ID NO: 279771 - DNA, 2187 bp, Artificial Sequence
  derived and/or modified sequence
atgaaccagccagaaagcgccaatgaccctgagcctctgtgtgcggtctgtggacaagcacacagcctggaggagaatcacttttatagctatcccgaggaggtggatgatgatctgatctgtcacatctgcttgcaagcattactcgacccactcgacactccgtgtggtcatacatactgcacactgtgcttaacaaatttcctggtggagaaggatttttgtccgatggaccgcaaaccattggtcctgcagcattgtaagaagtcttctattctcgtcaataaactgctaaacaagttgctcgtcacttgtcctttcagagagcactgcacccaggtactccagcgctgcgacctggagcatcattttcagacatcctgtaaaggagcctctcattatggccttacaaaagatagaaagcggcgatcgcaggacgggtgtccagacggctgtgccagcttgaccgccaccgctccttcacctgaggtgagtgcagctgccacaatctcacttatgaccgacgaaccaggcctcgataaccctgcttatgtaagttccgcagaagacggccagccggctatctctccggtggacagcggaagatccaaccgaacccgcgctcggccatttgaaagatccaccatccgctcccgtagcttcaagaagataaaccgggctctatctgttcttagacgcacgaagtccggcagcgcggtcgccaatcacgccgaccagggcagagaaaatagcgaaaacaccactgccccagaagttttccccaggctgtatcacctcattcccgatggcgagattacttcaataaagatcaaccgcgtggaccctagtgagagtctctccatccgactggtgggcggatccgagacaccccttgttcacataattattcaacacatataccgcgacggggtgattgctcgcgacggaagacttcttcccggagacatcatccttaaagtgaacggaatggatatctccaacgtacctcataactatgctgtgcgactgctgcgccagccttgccaagtgctctggttaacggtgatgcgagaacagaaatttagatcaagaaacaatggccaagctcctgacgcctacaggccaagggacgacagcttccacgttatcctgaacaagtcctcccctgaagaacagctcggaattaaattggtgagaaaggtggacgagcccggtgtctttatttttaatgtcctcgacggaggggttgcctataggcatggtcagctagaggaaaatgaccgcgttctggccatcaatggacacgacttgcgatacggcagtcccgagagtgcggcacacctgattcaggcctccgaacgcagagtgcatctggttgtaagcaggcaggtgcgccagcggtccccagatatcttccaggaggcagggtggaactcaaatggctcttggagtccagggccaggggaaaggtccaataccccaaaacctctccatcctaccattacttgtcacgagaaagttgttaatatccaaaaggatccgggtgaatcccttggcatgactgtggccggtggggcttcgcacagagaatgggaccttcccatctacgttatctctgtcgaacccggtggggtaatttctcgcgacgggaggatcaagaccggggacattctgttgaacgtggacggagtcgaattaactgaggtttcaaggagtgaggctgttgcacttctgaagcgtacttcctccagcatcgtgctcaaagcgctcgaggtgaaggagtacgagccccaggaggactgtagttcaccagctgcccttgactctaatcacaacatggcacccccatcagactggtctccctcctgggtgatgtggttagagctgccccgatgcctgtataactgcaaggatatagttctgcgcaggaatacggcaggcagtttgggattctgcatagtgggtggatacgaggagtacaatgggaacaaacctttctttataaaatctattgtcgagggtactcctgcatacaatgatggtagaatccgctgcggagacatactcctcgccgttaatgggcgaagcacatcaggcatgatccatgcatgcttggccaggcttttaaaagaattaaaaggccgtattacactgaccattgtgagctggccaggaacttttctgtag

SEQ ID NO: 279772 - DNA, 51 bp, Artificial Sequence
  derived and/or modified sequence
atgaaccagccagaatctgccaacgaccctgagcccctgtgcgctgtgtag

SEQ ID NO: 279773 - DNA, 300 bp, Artificial Sequence
  derived and/or modified sequence
atgaatcagcccgagtccgcaaacgatcccgaacctctgtgtgctgtgtgtggccaggcacatagtctcgaggagaaccacttttattcctatcctgaggaggtggatgacgaccttatttgtcatatttgcctacaagccctccttgaccccttagacactccatgtggtcacacctactgcacattatgcctgactaattttctggtggagaaggatttttgccccatggaccgcaaaccgttggttctgcagcattgtaaaaaatcgtcgatcctcgtaaataaactgttgaactag

SEQ ID NO: 279774 - DNA, 273 bp, Artificial Sequence
  derived and/or modified sequence
atgaaccaacctgagtccgccaacgatccggagcctttgtgcgccgtttgcggacaggcccatagtctggaggagaatcatttctactcatacccagaagaggtggacgatgacctcatttgtcacatctgtctgcaggctctgctcgatccactggatacaccttgcgggcacacatactgtaccttatgcttaacaaatttcctggtggaaaaggatttttgcccgatggatcggaaacccctggtgctgcagcactgcaagaagtcttag

SEQ ID NO: 279775 - DNA, 381 bp, Artificial Sequence
  derived and/or modified sequence
atgaaccaacccgagagcgcaaacgatccggagccgctttgcgccgtttgtggccaggcccactcccttgaggagaatcatttctattcttacccagaggaggtggacgatgacctgatttgccacatttgtcttcaggccctgttggatccactagatactccttgtgggcacacttactgcactctatgccttacaaatttcctggtagagaaagatttctgccccatggacagaaagccactggtgctgcaacattgtaagaaatcatccatacttgtgaacaaactcctgaataagctgctggtcacatgccccttcagggaacactgtacacaagtgctgcagcggtgcgacctggagcatcactttcagacctag

SEQ ID NO: 279776 - DNA, 1701 bp, Artificial Sequence
  derived and/or modified sequence
atggccgtccagactgccgtgagagccagccagccccgactgccaccactggacaacccagcctacgtctctagcgcggaggatggccaacccgctatctcaccagtggactctggcaggtccaacagaacaagggctaggcccttcgagcgctcaactatccgatcgaggtcttttaagaaaatcaacagagcactgagtgttctgcggcgtacaaagagtgggtccgcggtggctaaccatgctgatcagggaagagaaaatagcgagaatacaactgcgccagaagtgttcccgaggctctaccatcttattccggatggcgaaatcacatcaattaaaatcaaccgcgtggatccgtcagagagcttatcaattcgcctagtcggcggaagtgaaacgcctctcgtccatatcattatccagcacatctacagggatggcgtgatcgccagagacggccgacttctcccaggggacattatactgaaggtgaacggcatggacatctccaacgtcccgcataattacgccgtacgtctcctaaggcaaccttgccaggtcctctggcttacagttatgcgcgaacagaagttcaggtccaggaacaacgggcaggcacctgacgcctatcggcctcgggatgatagtttccacgtcattctgaataagagtagccccgaggagcagctgggcattaagctggtacgaaaggttgacgagcctggggtgttcattttcaatgtgctggacggcggtgttgcctacagacatggtcaactggaggagaacgacagggtgctcgccattaatggacacgatctaagatacggcagccccgagtctgcagcccatttgatccaagcaagcgagcgtcgggttcatctggtcgtgagcaggcaggtccgtcagaggtctccggatatcttccaggaggccggttggaatagtaacggatcttggtctcccggaccaggagagagatcaaatacgcctaagcctctgcaccccacaattacctgccacgaaaaagtggtgaacattcagaaggaccccggtgagtctctgggcatgaccgtggccggtggggctagccacagagaatgggatttaccaatatacgtgataagtgttgaaccagggggtgtcatatcacgcgatggaagaataaagactggtgacatcttgcttaatgtcgacggagtcgaactgactgaagtgtcacgaagcgaggctgtcgcacttctaaagcgcactagcagctcgatcgttttgaaggcccttgaagtgaaggaatacgaacctcaggaggattgttcaagccccgcagccctcgactctaatcataacatggcccctccatccgattggtctccttcttgggtgatgtggctggaattaccccgatgcttgtataattgtaaggacattgttctgaggcgcaacactgcaggtagcttgggattctgcatcgtggggggttacgaagagtataacggtaataagcctttcttcatcaaatcaatcgtggagggcacgcccgcttacaatgacggcagaattcgctgcggagatattctgctggccgtcaacggccgatctacctccggtatgatccacgcctgcttagccaggcttctgaaggagttaaaaggcaggattacactgaccattgtatcctggcctgggacttttttgtag

SEQ ID NO: 279777 - DNA, 2187 bp, Artificial Sequence
  derived and/or modified sequence
atgaaccagcccgagagcgccaacgaccccgagcccctgtgcgccgtgtgcggccaggcccacagcctggaggagaaccacttctacagctaccccgaggaggtggacgacgacctgatctgccacatctgcctgcaggccctgctggaccccctggacaccccctgcggccacacctactgcaccctgtgcctgaccaacttcctggtggagaaggacttctgccccatggacagaaagcccctggtgctgcagcactgcaagaagagcagcatcctggtgaacaagctgctgaacaagctgctggtgacctgccccttcagagagcactgcacccaggtgctgcagagatgcgacctggagcaccacttccagaccagctgcaagggcgccagccactacggcctgaccaaggacagaaagagaagaagccaggacggctgccccgacggctgcgccagcctgaccgccaccgcccccagccccgaggtgagcgccgccgccaccatcagcctgatgaccgacgagcccggcctggacaaccccgcctacgtgagcagcgccgaggacggccagcccgccatcagccccgtggacagcggcagaagcaacagaaccagagccagacccttcgagagaagcaccatcagaagcagaagcttcaagaagatcaacagagccctgagcgtgctgagaagaaccaagagcggcagcgccgtggccaaccacgccgaccagggcagagagaacagcgagaacaccaccgcccccgaggtgttccccagactgtaccacctgatccccgacggcgagatcaccagcatcaagatcaacagagtggaccccagcgagagcctgagcatcagactggtgggcggcagcgagacccccctggtgcacatcatcatccagcacatctacagagacggcgtgatcgccagagacggcagactgctgcccggcgacatcatcctgaaggtgaacggcatggacatcagcaacgtgccccacaactacgccgtgagactgctgagacagccctgccaggtgctgtggctgaccgtgatgagagagcagaagttcagaagcagaaacaacggccaggcccccgacgcctacagacccagagacgacagcttccacgtgatcctgaacaagagcagccccgaggagcagctgggcatcaagctggtgagaaaggtggacgagcccggcgtgttcatcttcaacgtgctggacggcggcgtggcctacagacacggccagctggaggagaacgacagagtgctggccatcaacggccacgacctgagatacggcagccccgagagcgccgcccacctgatccaggccagcgagagaagagtgcacctggtggtgagcagacaggtgagacagagaagccccgacatcttccaggaggccggctggaacagcaacggcagctggagccccggccccggcgagagaagcaacacccccaagcccctgcaccccaccatcacctgccacgagaaggtggtgaacatccagaaggaccccggcgagagcctgggcatgaccgtggccggcggcgccagccacagagagtgggacctgcccatctacgtgatcagcgtggagcccggcggcgtgatcagcagagacggcagaatcaagaccggcgacatcctgctgaacgtggacggcgtggagctgaccgaggtgagcagaagcgaggccgtggccctgctgaagagaaccagcagcagcatcgtgctgaaggccctggaggtgaaggagtacgagccccaggaggactgcagcagccccgccgccctggacagcaaccacaacatggccccccccagcgactggagccccagctgggtgatgtggctggagctgcccagatgcctgtacaactgcaaggacatcgtgctgagaagaaacaccgccggcagcctgggcttctgcatcgtgggcggctacgaggagtacaacggcaacaagcccttcttcatcaagagcatcgtggagggcacccccgcctacaacgacggcagaatcagatgcggcgacatcctgctggccgtgaacggcagaagcaccagcggcatgatccacgcctgcctggccagactgctgaaggagctgaagggcagaatcaccctgaccatcgtgagctggcccggcaccttcctgtag

SEQ ID NO: 279778 - DNA, 51 bp, Artificial Sequence
  derived and/or modified sequence
atgaaccagcccgagagcgccaacgaccccgagcccctgtgcgccgtgtag

SEQ ID NO: 279779 - DNA, 300 bp, Artificial Sequence
  derived and/or modified sequence
atgaaccagcccgagagcgccaacgaccccgagcccctgtgcgccgtgtgcggccaggcccacagcctggaggagaaccacttctacagctaccccgaggaggtggacgacgacctgatctgccacatctgcctgcaggccctgctggaccccctggacaccccctgcggccacacctactgcaccctgtgcctgaccaacttcctggtggagaaggacttctgccccatggacagaaagcccctggtgctgcagcactgcaagaagagcagcatcctggtgaacaagctgctgaactag

SEQ ID NO: 279780 - DNA, 273 bp, Artificial Sequence
  derived and/or modified sequence
atgaaccagcccgagagcgccaacgaccccgagcccctgtgcgccgtgtgcggccaggcccacagcctggaggagaaccacttctacagctaccccgaggaggtggacgacgacctgatctgccacatctgcctgcaggccctgctggaccccctggacaccccctgcggccacacctactgcaccctgtgcctgaccaacttcctggtggagaaggacttctgccccatggacagaaagcccctggtgctgcagcactgcaagaagagctag

SEQ ID NO: 279781 - DNA, 381 bp, Artificial Sequence
  derived and/or modified sequence
atgaaccagcccgagagcgccaacgaccccgagcccctgtgcgccgtgtgcggccaggcccacagcctggaggagaaccacttctacagctaccccgaggaggtggacgacgacctgatctgccacatctgcctgcaggccctgctggaccccctggacaccccctgcggccacacctactgcaccctgtgcctgaccaacttcctggtggagaaggacttctgccccatggacagaaagcccctggtgctgcagcactgcaagaagagcagcatcctggtgaacaagctgctgaacaagctgctggtgacctgccccttcagagagcactgcacccaggtgctgcagagatgcgacctggagcaccacttccagacctag

SEQ ID NO: 279782 - DNA, 1701 bp, Artificial Sequence
  derived and/or modified sequence
atggccgtgcagaccgccgtgagagccagccagcccagactgccccccctggacaaccccgcctacgtgagcagcgccgaggacggccagcccgccatcagccccgtggacagcggcagaagcaacagaaccagagccagacccttcgagagaagcaccatcagaagcagaagcttcaagaagatcaacagagccctgagcgtgctgagaagaaccaagagcggcagcgccgtggccaaccacgccgaccagggcagagagaacagcgagaacaccaccgcccccgaggtgttccccagactgtaccacctgatccccgacggcgagatcaccagcatcaagatcaacagagtggaccccagcgagagcctgagcatcagactggtgggcggcagcgagacccccctggtgcacatcatcatccagcacatctacagagacggcgtgatcgccagagacggcagactgctgcccggcgacatcatcctgaaggtgaacggcatggacatcagcaacgtgccccacaactacgccgtgagactgctgagacagccctgccaggtgctgtggctgaccgtgatgagagagcagaagttcagaagcagaaacaacggccaggcccccgacgcctacagacccagagacgacagcttccacgtgatcctgaacaagagcagccccgaggagcagctgggcatcaagctggtgagaaaggtggacgagcccggcgtgttcatcttcaacgtgctggacggcggcgtggcctacagacacggccagctggaggagaacgacagagtgctggccatcaacggccacgacctgagatacggcagccccgagagcgccgcccacctgatccaggccagcgagagaagagtgcacctggtggtgagcagacaggtgagacagagaagccccgacatcttccaggaggccggctggaacagcaacggcagctggagccccggccccggcgagagaagcaacacccccaagcccctgcaccccaccatcacctgccacgagaaggtggtgaacatccagaaggaccccggcgagagcctgggcatgaccgtggccggcggcgccagccacagagagtgggacctgcccatctacgtgatcagcgtggagcccggcggcgtgatcagcagagacggcagaatcaagaccggcgacatcctgctgaacgtggacggcgtggagctgaccgaggtgagcagaagcgaggccgtggccctgctgaagagaaccagcagcagcatcgtgctgaaggccctggaggtgaaggagtacgagccccaggaggactgcagcagccccgccgccctggacagcaaccacaacatggccccccccagcgactggagccccagctgggtgatgtggctggagctgcccagatgcctgtacaactgcaaggacatcgtgctgagaagaaacaccgccggcagcctgggcttctgcatcgtgggcggctacgaggagtacaacggcaacaagcccttcttcatcaagagcatcgtggagggcacccccgcctacaacgacggcagaatcagatgcggcgacatcctgctggccgtgaacggcagaagcaccagcggcatgatccacgcctgcctggccagactgctgaaggagctgaagggcagaatcaccctgaccatcgtgagctggcccggcaccttcctgtag

SEQ ID NO: 279783 - protein, 586 aa, Artificial Sequence
  derived and/or modified sequence
MSATVVDAVNAAPLSGSKEMSLEEPKKMTREDWRKKKELEEQRKLGNAPAEVDEEGKDINPHIPQYISSVPWYIDPSKRPTLKHQRPQPEKQKQFSSSGEWYKRGVKENSIITKYRKGACENCGAMTHKKKDCFERPRRVGAKFTGTNIAPDEHVQPQLMFDYDGKRDRWNGYNPEEHMKIVEEYAKVDLAKRTLKAQKLQEELASGKLVEQANSPKHQWGEEEPNSQMEKDHNSEDEDEDKYADDIDMPGQNFDSKRRITVRNLRIREDIAKYLRNLDPNSAYYDPKTRAMRENPYANAGKNPDEVSYAGDNFVRYTGDTISMAQTQLFAWEAYDKGSEVHLQADPTKLELLYKSFKVKKEDFKEQQKESILEKYGGQEHLDAPPAELLLAQTEDYVEYSRHGTVIKGQERAVACSKYEEDVKIHNHTHIWGSYWKEGRWGYKCCHSFFKYSYCTGEAGKEIVNSEECIINEITGEESVKKPQTLMELHQEKLKEEKKKKKKKKKKHRKSSSDSDDEEKKHEKLKKALNAEEARLLHVKETMQIDERKRPYNSMYETREPTEEEMEAYRMKRQRPDDPMASFLGQ

SEQ ID NO: 279784 - protein, 124 aa, Artificial Sequence
  derived and/or modified sequence
MSATVVDAVNAAPLSGSKEMSLEEPKKMTREDWRKKKELEEQRKLGNAPAEVDEEGKDINPHIPQYISSVPWYIDPSKRPTLKHQRPQPEKQKQFSSSGEWYKRGVKENSIITKYRKGACENCG

SEQ ID NO: 279785 - protein, 101 aa, Artificial Sequence
  derived and/or modified sequence
MSATVVDAVNAAPLSGSKEMSLEEPKKMTREDWRKKKELEEQRKLGNAPAEVDEEGKDINPHIPQYISSVPWYIDPSKRPTLKHQRPQPEKQKQFSSSGEW

SEQ ID NO: 279786 - DNA, 577 bp, Artificial Sequence
  derived and/or modified sequence
attacgagattggcttggattctgtcggatggacttggggctagctgcggcggggctggatggtgctgtattgaatttttggacggtactgcattggaggattttaagcttgggcagtaggacattgtattaatctgttttcacattgccaatgaagacatagcccagacctgccaatttactaaagaaaggaggccagataaccatgtcagccacagttgtagatgcagttaatgctgcacccctatcggggtccaaagaaatgagtttggaagaaccaaagaagatgaccagagaggactggagaaagaagaaggagctagaagaacagcgaaaattgggcaatgctcctgcagaagttgatgaagaaggaaaagacatcaacccccatattcctcagtatatttcttcagtgccatggtatattgatccttcaaaaagacctactttaaaacaccagagaccacaaccagaaaaacaaaagcagttcagctcatctggagaatggtacaagaggggtgtaaaagagaattccataattactaagtaccgcaaaggagcatgtgaaaattgtggg

SEQ ID NO: 279787 - DNA, 807 bp, Artificial Sequence
  derived and/or modified sequence
attacgagattggcttggattctgtcggatggacttggggctagctgcggcggggctgggtaagaaaatattgttagaacttgcgggcgacggggagttggggaacctgagaaaatgagtcgaaggctcctaattattggatatatcttcacgggggtgatgagccctcaggtgttgagggagcgaggacgggggaccgaaaagccactgtcctgagacccattcatggcactcgtgccctgccaggccaggcctgcgtcttcagggaaacagtcgggataactatgagagtgtcgcctttgtggcggtgcctcgaagaccttgagcaatccccggactgcgagcagggaaagctgcttccagtacccaaattgacagactgtatttcctcgccagaaaaatttacttgagcttcagtttttcctgttaagtcgagatgatccgacttcagtggggtatcatgcgggtataaatgaaaacatctataggaggccagataaccatgtcagccacagttgtagatgcagttaatgctgcacccctatcggggtccaaagaaatgagtttggaagaaccaaagaagatgaccagagaggactggagaaagaagaaggagctagaagaacagcgaaaattgggcaatgctcctgcagaagttgatgaagaaggaaaagacatcaacccccatattcctcagtatatttcttcagtgccatggtatattgatccttcaaaaagacctactttaaaacaccagagaccacaaccagaaaaacaaaagcagttcagctcatctggagaatggta

SEQ ID NO: 279788 - DNA, 568 bp, Artificial Sequence
  derived and/or modified sequence
tttcttgcaaactttgtggcacgttttctgggaagaaaaaactaggatcgtgtaatattaaaaaataaatcgagaggctttttttttttgctctccatattattaagctgcatggactgagaggaggccagataaccatgtcagccacagttgtagatgcagttaatgctgcacccctatcggggtccaaagaaatgagtttggaagaaccaaagaagatgaccagagaggactggagaaagaagaaggagctagaagaacagcgaaaattgggcaatgctcctgcagaagttgatgaagaaggaaaagacatcaacccccatattcctcagtatatttcttcagtgccatggtatattgatccttcaaaaagacctactttaaaacaccagagaccacaaccagaaaaacaaaagcagttcagctcatctggagaatggtacaagaggggtgtaaaagagaattccataattactaagtaccgcaaaggagcatgtgaaaattgtggggccatgacacacaaaaagaaagactgctttgagagacctaggcgagttggagccaaatt

SEQ ID NO: 279789 - DNA, 3793 bp, Artificial Sequence
  derived and/or modified sequence
tagtcccctggtgaggcttaagctcttgtctgttctggtcttttttttttttttttaacttcctaaaattctccgattctaaaagaaagctcctaaatagaagccaaaaagtagccgcccaacttgaaactccccacaagccgggtaaatagcgcgatacgcagcagctagagttctcgcgtttcccacggcgcaggagcactggagggcccccctccgcccccggccccgccaggaaattagtgcgcatgtgccggtcatccggaagttaccgcagtggccgccggaattaggcgaaaagccggaagtaaacattacgagattggcttggattctgtcggatggacttggggctagctgcggcggggctggaggaggccagataaccatgtcagccacagttgtagatgcagttaatgctgcacccctatcggggtccaaagaaatgagtttggaagaaccaaagaagatgaccagagaggactggagaaagaagaaggagctagaagaacagcgaaaattgggcaatgctcctgcagaagttgatgaagaaggaaaagacatcaacccccatattcctcagtatatttcttcagtgccatggtatattgatccttcaaaaagacctactttaaaacaccagagaccacaaccagaaaaacaaaagcagttcagctcatctggagaatggtacaagaggggtgtaaaagagaattccataattactaagtaccgcaaaggagcatgtgaaaattgtggggccatgacacacaaaaagaaagactgctttgagagacctaggcgagttggagccaaatttacaggtactaatatagctccagatgaacatgtccagcctcaactgatgtttgactatgatgggaagagggatcggtggaatggctacaatccagaagaacacatgaaaattgttgaagagtatgccaaagttgatttggcaaaacgaacattgaaagcccagaaactccaagaggaattagcctcaggaaaattagtggaacaggctaattctccaaaacaccagtggggagaagaggaaccaaattctcagatggaaaaagatcataatagtgaagatgaggatgaagataaatatgcagatgatattgacatgcctggacagaattttgactccaagagacgaattactgtccggaatctcaggattcgagaagatattgcaaaatatttgaggaatttagatccaaattctgcctactatgatccaaaaactagagcaatgagagagaatccttatgccaatgcaggaaagaatccagatgaagtgagttatgctggagataactttgttaggtacacaggagataccatttcaatggctcagacacagttgtttgcatgggaagcctatgacaagggatctgaagtgcatctacaggcagatcctacaaagctagagctgttgtataagtccttcaaagtcaaaaaagaagatttcaaagaacagcagaaagaaagcatcctggaaaagtatggtggccaagaacatttggatgcccctccagctgaattgcttttagcccagactgaagactatgtggagtactcaagacatgggacagtcatcaaaggacaggagcgggctgttgcctgctctaagtatgaggaggatgtgaagatccacaatcacacacatatctggggatcgtactggaaagaaggccgatggggatacaaatgctgtcactcttttttcaagtattcctattgtactggagaagctgggaaggagattgttaactctgaggagtgtattataaatgagataactggggaagaatctgtgaaaaaacctcaaaccctcatggagctgcatcaagaaaaactgaaagaggaaaagaagaagaagaaaaagaaaaagaagaagcatcgaaagagcagttcagatagtgatgatgaagaaaagaagcatgaaaaattgaaaaaggcactgaacgcagaggaggcccgccttcttcatgtcaaggagaccatgcagattgatgagaggaagcggccttacaatagcatgtatgaaactcgagaacctactgaagaggaaatggaggcatatagaatgaaacgtcagaggccagatgaccccatggcctctttccttggacagtagcaactagtcagaagaccatccaagatagatgcagctgatacattcttttcagcttcttattgatgattgtagatagaaaaatccttgtttattcttcttgctgcctggctttaataaatatttcagatgcctcacagtaagttcactcctttccatactgaggaaacaagaaaagaagaagaggcacatgaagtgtgcttttgggaatagaatttaaaattggattaagattttatttccagttttttttatttatttatttttttttttgagacggagtcttgctctgtcgcccaggctgaagtgcggtggcgcgatctcggctcactgcaagctccacctcccaggttcacgccattctcctgcctcagcctccctagtagttgggactacaggcgcccgccaccatgctcagctaattttttgtatttttagtagagacggtttcatcgtgttagccaggatggtctcgatctcctgaccttgtgatccacccgcctcagcctcccaaagtgctgagattacaggcgtgagccaccgcgcctggcctatttccagttttatgtgagtcatgtaaaaaagccttggctctctacctattaagaatgtctctttctctgtatttattaagcttcaaactttattgcttcgatttttgtggccctatatttagtattagcacaccttggttttgagaaaaaaacagggctttgtttttttaaataattactagcaactctgtgactacatttatttttattttttttagagacaggatcttgctatgttgcccaggctagagagcagtggcttttcacagacaaagtcataatgccctgcagtcttgggctcaagcgattctctcttccttggcctctggagtagactaaatgtgttagtctttgaatggaaaacaactattttctcatcattgggtcaatattgactgatcagtagtaggtcttttaccattctggacataagtctaggtgtagaaatcctttcctttatcatagaggatatggtttacattaccgtttgttttcattgtgattgcccctatgtaacaatcatgaatattagattttttaaattgtagaatatcctaatatttatagccagcagctgttactttgtttgtaaaatttgcaaaaaaacaaaacctgaagttggtttattgaaagaattataaggatagcttctagggatattagtaatagattgccatgatcctgaagcctcttctcagaacactgtgaagataatactgacagtagaatcagtgaaaacagcctaacaaaacctctgacatcagtatatcaacttttaacagcccactcactggcttttctaaactaccaaaaaccacctgtaggatactgcattaagtcagcatctcagaaacagtggtgtgagtaactgagtcaaattgtcaagtactttggatatacatagtgtcgagctttagattggtatgaaattaaacagcaatgcaaatagatttaattcctatttactttaagaatgaaaaacaatgttcattttcctacctaaacagggtggttcaacataaaggctgatgttgtgtccgttttgtattttatcttttgttaaagatacataaatgacaatacttaactgtga

SEQ ID NO: 279790 - protein, 347 aa, Artificial Sequence
  derived and/or modified sequence
MPGKPKHLGVPNGRMVLAVSDGELSSTTGPQGQGEGRGSSLSIHSLPSGPSSPFPTFVSSKSESHRKSLGSTEGESESRPGKYCCVYLPDGTASLALARPGLTIRDMLAGICEKRGLSLPDIKVYLVGNEQKALVLDQDCTVLADQEVRLENRITFELELTALERVVRISAKPTKRLQEALQPILEKHGLSPLEVVLHRPGEKQPLDLGKLVSSVAAQRLVLDTLPGVKISKARDKSPCRSQGCPPRTQDKATHPPPASPSSLVKVPSSATGKRQTCDIEGLVELLNRVQSSGAHDQRGLLRKEDLVLPEFLQLPAQGPSSEETPPQTKSAAQPIGGSLNSTTDSAL

SEQ ID NO: 279791 - protein, 437 aa, Artificial Sequence
  derived and/or modified sequence
  misc_feature (1)..(1): Xaa can be any naturally occurring amino acid
XSPVNIDRQAWLGEEVLAEPRPDMFRAQQLQIFNLMKFDSYARFVKSPLYRECLLAEAEGRPLREPGSSRLGSPDATRKKPKLKPGKSLPLGVEELGQLPPVEGPGGRPLRKSFRRELGGTANAALRRESQGSLNSSASLDLGFLAFVSSKSESHRKSLGSTEGESESRPGKYCCVYLPDGTASLALARPGLTIRDMLAGICEKRGLSLPDIKVYLVGNEQKALVLDQDCTVLADQEVRLENRITFELELTALERVVRISAKPTKRLQEALQPILEKHGLSPLEVVLHRPGEKQPLDLGKLVSSVAAQRLVLDTLPGVKISKARDKSPCRSQGCPPRTQDKATHPPPASPSSLVKVPSSATGKRQTCDIEGLVELLNRVQSSGAHDQRGLLRKEDLVLPEFLQLPAQGPSSEETPPQTKSAAQPIGGSLNSTTDSAL

SEQ ID NO: 279792 - DNA, 1044 bp, Artificial Sequence
  derived and/or modified sequence
atgccagggaagccaaaacatctgggtgtgccaaatgggagaatggtattagcagtgtctgatggcgaactctctagtacaactgggcctcaaggccagggagaagggaggggctccagcttgtctattcactccctccccagcggtccatcttctccattcccgactttcgtgtcatcaaaatctgagagtcatagaaagagccttggcagtaccgagggagagtctgaatccaggcccgggaaatattgttgcgtttaccttcctgatggtactgccagtcttgccctcgctcgaccagggctgactatacgcgatatgctcgctggcatatgcgagaaaaggggcctgtctctgccagacataaaagtgtatctggtggggaatgaacagaaagccctggtcttggatcaggactgtacagttctggccgatcaagaggtgcgccttgagaatcgaataacattcgagctcgagctgacggcgcttgaaagggtggtgcggatctctgccaagccaacaaagaggttgcaggaggccctgcagccgatcctcgaaaaacacggcctgagtccccttgaggtggtgctgcatcggccaggcgaaaagcagcccctggacctcggcaaactagtgtcctcggttgccgcccagagactcgtcttagacaccttacccggtgtgaagatatcaaaagctcgtgataagagtccttgccggtcacagggctgcccccctcgaacccaggacaaagccacccatcccccgcctgcatcgcccagctctctcgtcaaggttccctccagcgcaacaggaaaacggcagacctgcgacatcgaaggactggtggagctccttaaccgggttcagagttccggcgcccatgatcagcgcggacttctaagaaaggaagacttggttctgccagagttcttgcagttaccggctcagggaccaagctccgaagaaacacctccgcagaccaagagcgccgcgcagccaatcgggggcagcctgaattctaccacggactctgctttgtag

SEQ ID NO: 279793 - DNA, 1314 bp, Artificial Sequence
  derived and/or modified sequence
tagagtcccgtgaacatagatagacaggcctggctgggcgaggaggtcctcgctgagccccgccccgacatgttccgggcccagcagttacaaatattcaatttaatgaagtttgactcatatgccagattcgtaaagtcccccctttacagagaatgcctgctggcagaggccgagggtcgccctctgagagagccgggctcctcccgactaggctcccctgacgcgacgcgaaagaaacccaagctgaaaccaggcaagagcctgccactgggcgtggaagagctgggacagctgccacccgtcgagggccccggcggaaggcccttacgtaagagcttccgcagggagcttgggggcacagctaacgctgcactgcggagggagagtcagggatctctgaattcatccgcaagccttgacttgggtttccttgcctttgtctccagcaagtctgagtcccatcggaaaagtttaggcagcacagaaggagagagtgaatctcgccccggaaaatattgttgtgtgtatctgcccgacggtaccgcctcacttgccctggctcgccctggcttgactatcagagacatgctcgctggaatttgcgagaagagaggcctcagtctgcctgacattaaagtctatctcgtggggaacgagcagaaggctctcgtactggaccaggactgcacggtgttggcggaccaagaagtgcggctggagaacagaattacattcgagctggaactgacagcccttgagagagtggtgcgaatatctgccaaacccacgaaaagattgcaggaagcattgcagcccattctagaaaaacacggtttaagtccactggaggtagtgctgcatcgcccgggggaaaagcaaccattggatttgggcaagttggtcagtagtgtggcggcacagaggctggtactcgacaccttgccgggcgtgaaaattagtaaagctagggacaagagtccttgtcggtctcagggttgcccgcccagaacacaggacaaggccactcaccccccaccggcttcccccagctccctcgtcaaggtcccttctagcgcaaccggtaaacggcagacctgtgacatcgaggggctagtggagttactgaatcgagtacagtcctcgggcgcccacgatcaaagaggccttctgcgaaaagaagatctggtgctccctgaatttctgcaactgccagctcagggtccttcctccgaggaaacccctccccagactaagtcggccgcacagcctattggcggctcactgaattccaccactgactccgccctttag

SEQ ID NO: 279794 - DNA, 1044 bp, Artificial Sequence
  derived and/or modified sequence
atgcctgggaagcccaagcacctgggcgtgcccaacggccgcatggtgctggccgtgtctgatggagagctgagcagcaccaccggcccccagggccagggcgagggccggggcagcagcctgagcatccacagcctgcccagcggccccagcagccccttccccacctttgtgagcagcaagtctgagagccacaggaagagcctgggcagcacagaaggagagagcgagagcaggcctgggaagtactgctgcgtgtacctgcctgatggaacagccagcctggccctggcccggcccggcctgaccatccgggacatgctggccggcatctgtgagaagaggggcctgagcctgcctgacatcaaggtgtacctggtgggcaatgagcagaaggccctggtgctggaccaggactgcaccgtgctggccgaccaggaggtgcggctggagaaccgcatcacctttgagctggagctgacagccctggagcgggtggtgcgcatcagcgccaagcccaccaagaggctgcaggaggccctgcagcccatcctggagaagcacggcctgagccccctggaggtggtgctgcacaggcctggagagaagcagcccctggacctgggcaagctggtgtcctctgtggccgcccagaggctggtgctggacaccctgcccggggtgaagatcagcaaggcccgggacaagagcccctgccgcagccagggctgcccccccaggacccaggacaaggccacccaccccccaccagccagccccagcagcctggtgaaggtgcccagcagcgccaccgggaagaggcagacctgtgacatcgagggcctggtggagctgctgaacagagtgcagagcagcggggcccatgaccagaggggcctgctgaggaaggaggacctggtgctgcctgagttcctgcagctgcctgcccagggccccagcagcgaggagaccccaccccagaccaagtctgctgcccagcccatcggcggcagcctgaacagcaccacagattctgccctgtag

SEQ ID NO: 279795 - DNA, 1314 bp, Artificial Sequence
  derived and/or modified sequence
tgaagccctgtgaacatcgaccggcaggcctggctgggggaggaggtgctggccgagcccaggccagacatgttccgggcccagcagctgcagatcttcaacctgatgaagtttgacagctatgccaggtttgtgaagagccccctgtaccgggagtgcctgctggccgaggccgagggccggcccctgcgggagcccggcagcagccggctgggcagcccagatgccaccaggaagaagcccaagctgaagccaggcaagagcctgcccctgggcgtggaggagctgggccagctgccccctgtggagggccctgggggccggcccctgaggaagagcttcagaagagagctgggcggcacagccaatgctgccctgcggcgggagagccagggcagcctgaacagcagcgccagcctggacctgggcttcctggcctttgtgagcagcaagtctgagagccacaggaagagcctgggcagcacagaaggagagagcgagagcaggcctgggaagtactgctgcgtgtacctgcctgatggaacagccagcctggccctggcccggcccggcctgaccatccgggacatgctggccggcatctgtgagaagaggggcctgagcctgcctgacatcaaggtgtacctggtgggcaatgagcagaaggccctggtgctggaccaggactgcaccgtgctggccgaccaggaggtgcggctggagaaccgcatcacctttgagctggagctgacagccctggagcgggtggtgcgcatcagcgccaagcccaccaagaggctgcaggaggccctgcagcccatcctggagaagcacggcctgagccccctggaggtggtgctgcacaggcctggagagaagcagcccctggacctgggcaagctggtgtcctctgtggccgcccagaggctggtgctggacaccctgcccggggtgaagatcagcaaggcccgggacaagagcccctgccgcagccagggctgcccccccaggacccaggacaaggccacccaccccccaccagccagccccagcagcctggtgaaggtgcccagcagcgccaccgggaagaggcagacctgtgacatcgagggcctggtggagctgctgaacagagtgcagagcagcggggcccatgaccagaggggcctgctgaggaaggaggacctggtgctgcctgagttcctgcagctgcctgcccagggccccagcagcgaggagaccccaccccagaccaagtctgctgcccagcccatcggcggcagcctgaacagcaccacagattctgccctgtag

SEQ ID NO: 279796 - DNA, 1044 bp, Artificial Sequence
  derived and/or modified sequence
atgcccggcaagcccaagcacctgggcgtgcccaacggccggatggtcttggctgttagcgatggagaactgtcctctactaccggtcctcagggccaaggggaaggaaggggctccagcctttcgattcattctctgccttccgggcctagttctccgtttcccaccttcgtgagttcgaaatcagagtcccatagaaaaagcctggggagtaccgaaggtgagtccgagtccagaccgggcaaatactgttgcgtctatcttccggacggaacagcgagtctggcactggctcgtcctgggctgactatcagagatatgctggcaggcatttgcgaaaaaagaggcttgtcactgccggacattaaagtgtacctcgttggcaacgaacagaaagcgctcgtgctcgatcaggactgcactgtgctggcagatcaggaggtgaggctcgagaatcgcataacattcgaactggaattgacggcactcgagagggtcgtcaggatttctgccaaacctacgaaaagattacaagaggcgttgcaacccatactggagaagcacggtcttagcccactggaggtggtgttacatagaccaggggagaagcagcccttggatctgggtaagctcgtgtcctctgtcgctgcccagcgactcgtgctggacacattacccggcgtgaaaatctccaaagccagggacaaatccccctgtcgcagccaggggtgccctccacgcactcaagataaagccacccatcccccccctgccagtccatcaagcctcgtgaaagtgccttcctccgcaacgggaaagaggcagacatgcgatatcgaaggtttggtagaactgcttaatagagtgcagtccagtggcgcccatgaccagagaggtctgttgcgcaaggaggaccttgtactgccagaattcctgcagctgcctgctcagggcccaagttctgaagagacacccccccagaccaagtcggctgcccagcctatcggagggagtctgaactcaacaacagacagtgccctctag

SEQ ID NO: 279797 - DNA, 1314 bp, Artificial Sequence
  derived and/or modified sequence
tgaagccccgtgaacatcgaccggcaggcctggctgggcgaggaggtgctggccgaaccccggcctgacatgttccgggcccagcagctccaaatctttaacctgatgaaattcgattcatatgccagattcgttaaatccccactttacagggagtgtttgctggccgaggctgagggccgcccactgagggagcccggatcctcccgcctggggagccctgatgctacaagaaaaaaacccaagctcaagcctggcaagagcctcccccttggagtggaggagttgggccagctaccccctgtggaggggccgggtgggaggcccctcaggaagagtttccgtcgcgagctgggaggcacggcgaacgctgctcttcgtcgcgagtcccagggaagtctcaactcctctgctagcctcgacctcggcttcctggcatttgtgtctagcaagtcagaaagccaccgcaaatctcttggaagcacggagggagagtctgagagtagaccagggaaatactgttgcgtgtacctgccagatgggacagcttcccttgccctggccaggcccggcttgactattagagatatgctcgctggtatatgtgagaagagaggcctgtcccttcccgatatcaaagtgtacttggttggaaatgagcaaaaagccctcgtcctagatcaggactgtacagtcctggccgatcaggaggtgaggctggagaatcgcatcacttttgaactagaattgactgcgctggaacgagtcgtgaggattagtgcaaaacccactaagagactgcaggaggctttgcagccgatcttagaaaagcacggcctgagccctctcgaagtcgtgttacatcgacccggcgagaaacagcccctggaccttggcaagctggtgtcttcagtcgcggcccagcgtttggtgctggacactttgccgggcgtgaaaatatctaaggcccgggataaaagcccctgccgttctcaagggtgtcccccccgtacacaagacaaggctacgcaccctccaccagcgtccccttcgagtctggtaaaggttccgtcatctgctactggtaagagacagacttgcgacatcgaagggctggtggagctgctcaatcgggtgcaaagctccggggcccacgatcagcggggactgctgcgcaaagaggaccttgtgcttcctgagttcttgcagcttcccgcccagggcccatcgagcgaggaaaccccccctcaaacaaagagcgccgctcagcctattgggggatccctgaacagcactaccgattccgctctttag

SEQ ID NO: 279798 - DNA, 1044 bp, Artificial Sequence
  derived and/or modified sequence
atgcccggtaagcccaaacaccttggagtgcctaacggccgtatggttctggccgtcagtgacggggaattaagcagcaccaccggtccgcagggtcaaggggaaggtaggggctccagcttaagcatccacagtcttccgtctggaccatcaagcccgttccccacctttgtgagctctaagtctgagagtcacagaaagagcctgggttccacagaaggcgagagcgaaagccgcccaggaaaatactgttgtgtatatcttcccgatggcacggcctctctggccctggctcgcccagggctgacaatccgcgacatgctcgctggcatttgtgagaaacgcggactgagcctccctgatattaaagtatacctggtcggcaacgagcaaaaggcgctcgtcctggatcaggattgtacagttctggctgatcaggaggtgcgacttgaaaaccggataaccttcgaactggagctgactgccctggagcgggtcgtgaggatctccgccaagccgacgaagcgtctccaggaagccctgcagcctatcctggaaaagcatggcctcagccctcttgaagtcgtgcttcataggccaggcgagaaacaacccctcgaccttggcaaactggtctccagcgtggccgctcagaggcttgtgctggatactctaccaggagtcaagataagcaaggctcgtgacaagagcccttgcaggagtcaggggtgcccacctcgaacccaggacaaagcaacccatcccccaccggctagccctagtagcttggttaaagttccgtcatccgccactggcaagcggcagacttgcgatatcgagggcctcgtagaattactcaatcgggtgcagagctctggcgcacacgaccagcgcggactgctccgcaaggaagacctagttttaccagagttcctgcagctcccagctcagggacctagctcagaggaaacaccacctcagacaaagtcggccgctcagccaataggaggctctttgaattccacaacagactcagccctttag

SEQ ID NO: 279799 - DNA, 1314 bp, Artificial Sequence
  derived and/or modified sequence
tgatcaccagtcaatatcgaccgccaagcttggctcggcgaggaggtactcgcggagccaagacccgatatgtttcgcgctcagcaacttcagattttcaatctgatgaagtttgacagctatgcccgattcgtgaaatccccactttatagagaatgcctcctggcagaagcagagggcaggcctctgagagaacctggttcgtctcgccttggatccccagacgccacccggaagaaaccgaagctgaagcctggaaaatcgctccccttaggggtcgaggaactaggccagcttccacctgtcgaaggacctgggggtcgaccacttcggaaatcattccggcgagaactgggcggtaccgccaatgcagcattaaggagagaatctcagggaagcctgaactcctccgccagcttagatttaggatttctggccttcgtgagctctaagagtgagagccaccggaaatctctgggtagcacagaaggcgagagtgagagcagacctggcaaatactgctgcgtgtaccttccggatggaaccgcatccctcgctttagcccgaccaggcttaaccattcgggacatgctagcgggaatctgtgagaaacggggactgtcacttcctgacatcaaagtttacctggtcggtaatgagcagaaagctctggtgctggatcaggattgcacggtcctcgctgaccaggaggtcagattagaaaacaggattacttttgaactcgaacttacagcactggaaagggtggtgcgcatttctgcgaaaccaaccaaacgtctgcaggaggctctccaacccatcctggagaagcacggtctgagccccttagaggtcgtgctgcaccgtcccggtgaaaagcaacctcttgacttagggaaactggtctcctctgtcgccgcacagcgcttggtcctggatactcttccaggagtcaagattagcaaagcacgggataagtcaccgtgcagaagccaaggttgcccgccacgtacccaggataaagcaacccacccaccacccgcttcgccatcctcgctggtgaaagtgccgagttcggccactggcaagaggcagacatgtgacatagagggactggtcgagcttctcaatcgcgtacagtcaagcggcgctcacgatcagaggggcctcctaaggaaagaagacttagttctgcctgagttcctgcaactccccgcacagggcccttcaagcgaagaaactcctccacagactaagtctgccgctcagccaatcggtggcagcctcaacagcaccaccgattccgccttgtag

SEQ ID NO: 279800 - DNA, 1748 bp, Artificial Sequence
  derived and/or modified sequence
tagagacacttcctgtggcagagaaaagaggtagtgagcggtgtttcaggatgtgagggcccgcaggagccgagtcaggctctctccactgcctgcccgccaccgtgcaagctctggccggcgctgcccacagtccccatggtgggcagcccccgcggcggggacccctgatcggcagcggcatgccagggaagcccaagcacctgggcgtccccaacgggcgcatggttctggctgtgtcagatggagagctgagcagcacgacggggccccagggccagggcgagggccgcggcagctctctcagcatccacagcctccccagtggtcccagcagccccttcccaaccttcgtcagcagcaaatctgagagccaccggaagagccttgggagcacggagggtgaaagtgaaagccggccagggaagtactgctgtgtgtacctgcccgatggcacagcctccttggccctggccagacctggcctcaccatccgagacatgctggcagggatctgtgagaaacgaggcctctctctacctgacatcaaggtctacctggtgggcaatgaacagaaggccctggtcctggatcaggactgcaccgtgctggcggatcaggaagtgcggctggaaaacaggatcaccttcgagctggagctgacggcgctggagcgcgtggtacgaatctcagccaagcccaccaagcggctgcaggaggcgctgcagcccattctggagaagcacggcttgagcccgctagaggtggtgctgcaccggccaggcgagaaacagcctctggatctggggaagctagtgagctcggtggcggcccagagactggttttggacactcttccaggtgtgaagatctccaaagcccgtgacaaatctccctgccgcagccagggctgcccacctagaactcaggataaggccacccatccccctccagcgtcccccagttctctggtgaaggtgcccagtagtgccactggaaagcggcagacctgtgacatcgaaggcctggtggagctgctgaaccgggtgcagagcagcggggcccacgaccagaggggccttctgaggaaagaggacctggtacttccagaatttctgcagctgcccgcccaagggcccagctccgaggagaccccaccacagaccaaatcagcagcccagcccatcgggggatccttgaactccaccaccgactcagccctctgacagctacccaacagtccaggacagctgcatggcacccggcgggccgagcatgccatgggtccgctctgcatgccctgtctgtgccatgagtgtccctggccccttcctgccatgggcaggcccgcaggaagagccggtaggggtggaaaggggactcagatgagacacaccccacagctgccaccgccttgtccctcaacaagctcacccccaatcccttgcagccaggccacaatgggggaggtgagtccagccccttggaacaggcttgcccaacatggagggatggcgttggcagtgccagcctccccagcctgtgccaagcttcaacaggggcaagaggaggggccggcccctcctcaggaagctggtatgagtaaggccttgagggtgcaggcaggcagccctgtaccccacccacatagactatactgtacatacagattttgcagtaggcttggggcagctgggtttgtccttgatgtatgatactgttattataataattattattattctgcc

SEQ ID NO: 279801 - DNA, 1536 bp, Artificial Sequence
  derived and/or modified sequence
tgagcccagtgaacatcgaccgtcaggcctggcttggcgaggaggtgctggccgagccccggccggacatgtttcgggcacagcagcttcagatcttcaacttgatgaagttcgacagctatgcgcgcttcgtcaagtccccgctgtaccgcgagtgcctgctagccgaagccgagggacgccctctgcgggaacctggctcctcgcgcctcggcagccctgacgccacgaggaagaagccgaagctgaagcccgggaagtcgctgccgctgggtgtggaggagttggggcagctgccacccgttgagggtcctgggggccgccctctccgcaagtccttccgccgggagctgggcgggactgcaaacgccgccttgcgccgagagtctcagggctccctcaactcctccgccagcctggaccttggcttcctagccttcgtcagcagcaaatctgagagccaccggaagagccttgggagcacggagggtgaaagtgaaagccggccagggaagtactgctgtgtgtacctgcccgatggcacagcctccttggccctggccagacctggcctcaccatccgagacatgctggcagggatctgtgagaaacgaggcctctctctacctgacatcaaggtctacctggtgggcaatgaacagaaggccctggtcctggatcaggactgcaccgtgctggcggatcaggaagtgcggctggaaaacaggatcaccttcgagctggagctgacggcgctggagcgcgtggtacgaatctcagccaagcccaccaagcggctgcaggaggcgctgcagcccattctggagaagcacggcttgagcccgctagaggtggtgctgcaccggccaggcgagaaacagcctctggatctggggaagctagtgagctcggtggcggcccagagactggttttggacactcttccaggtgtgaagatctccaaagcccgtgacaaatctccctgccgcagccagggctgcccacctagaactcaggataaggccacccatccccctccagcgtcccccagttctctggtgaaggtgcccagtagtgccactggaaagcggcagacctgtgacatcgaaggcctggtggagctgctgaaccgggtgcagagcagcggggcccacgaccagaggggccttctgaggaaagaggacctggtacttccagaatttctgcagctgcccgcccaagggcccagctccgaggagaccccaccacagaccaaatcagcagcccagcccatcgggggatccttgaactccaccaccgactcagccctctgacagctacccaacagtccaggacagctgcatggcacccggcgggccgagcatgccatgggtccgctctgcatgccctgtctgtgccatgagtgtccctggccccttcctgccatgggcaggcccgcaggaagagccggtaggggtggaaaggggactcagatgagacacaccccacagctgccaccgccttgtccctcaacaagctcacccccaatcccttgca

SEQ ID NO: 279802 - DNA, 1044 bp, Artificial Sequence
  derived and/or modified sequence
atgcccggcaagcccaagcacctgggcgtgcccaacggcagaatggtgctggccgtgagcgacggcgagctgagcagcaccaccggcccccagggccagggcgagggcagaggcagcagcctgagcatccacagcctgcccagcggccccagcagccccttccccaccttcgtgagcagcaagagcgagagccacagaaagagcctgggcagcaccgagggcgagagcgagagcagacccggcaagtactgctgcgtgtacctgcccgacggcaccgccagcctggccctggccagacccggcctgaccatcagagacatgctggccggcatctgcgagaagagaggcctgagcctgcccgacatcaaggtgtacctggtgggcaacgagcagaaggccctggtgctggaccaggactgcaccgtgctggccgaccaggaggtgagactggagaacagaatcaccttcgagctggagctgaccgccctggagagagtggtgagaatcagcgccaagcccaccaagagactgcaggaggccctgcagcccatcctggagaagcacggcctgagccccctggaggtggtgctgcacagacccggcgagaagcagcccctggacctgggcaagctggtgagcagcgtggccgcccagagactggtgctggacaccctgcccggcgtgaagatcagcaaggccagagacaagagcccctgcagaagccagggctgcccccccagaacccaggacaaggccacccaccccccccccgccagccccagcagcctggtgaaggtgcccagcagcgccaccggcaagagacagacctgcgacatcgagggcctggtggagctgctgaacagagtgcagagcagcggcgcccacgaccagagaggcctgctgagaaaggaggacctggtgctgcccgagttcctgcagctgcccgcccagggccccagcagcgaggagacccccccccagaccaagagcgccgcccagcccatcggcggcagcctgaacagcaccaccgacagcgccctgtag

SEQ ID NO: 279803 - DNA, 1314 bp, Artificial Sequence
  derived and/or modified sequence
tgaagccccgtgaacatcgacagacaggcctggctgggcgaggaggtgctggccgagcccagacccgacatgttcagagcccagcagctgcagatcttcaacctgatgaagttcgacagctacgccagattcgtgaagagccccctgtacagagagtgcctgctggccgaggccgagggcagacccctgagagagcccggcagcagcagactgggcagccccgacgccaccagaaagaagcccaagctgaagcccggcaagagcctgcccctgggcgtggaggagctgggccagctgccccccgtggagggccccggcggcagacccctgagaaagagcttcagaagagagctgggcggcaccgccaacgccgccctgagaagagagagccagggcagcctgaacagcagcgccagcctggacctgggcttcctggccttcgtgagcagcaagagcgagagccacagaaagagcctgggcagcaccgagggcgagagcgagagcagacccggcaagtactgctgcgtgtacctgcccgacggcaccgccagcctggccctggccagacccggcctgaccatcagagacatgctggccggcatctgcgagaagagaggcctgagcctgcccgacatcaaggtgtacctggtgggcaacgagcagaaggccctggtgctggaccaggactgcaccgtgctggccgaccaggaggtgagactggagaacagaatcaccttcgagctggagctgaccgccctggagagagtggtgagaatcagcgccaagcccaccaagagactgcaggaggccctgcagcccatcctggagaagcacggcctgagccccctggaggtggtgctgcacagacccggcgagaagcagcccctggacctgggcaagctggtgagcagcgtggccgcccagagactggtgctggacaccctgcccggcgtgaagatcagcaaggccagagacaagagcccctgcagaagccagggctgcccccccagaacccaggacaaggccacccaccccccccccgccagccccagcagcctggtgaaggtgcccagcagcgccaccggcaagagacagacctgcgacatcgagggcctggtggagctgctgaacagagtgcagagcagcggcgcccacgaccagagaggcctgctgagaaaggaggacctggtgctgcccgagttcctgcagctgcccgcccagggccccagcagcgaggagacccccccccagaccaagagcgccgcccagcccatcggcggcagcctgaacagcaccaccgacagcgccctgtag

SEQ ID NO: 279804 - protein, 1008 aa, Artificial Sequence
  derived and/or modified sequence
MDTAEDPAWLQLLQKDSSPPGPRPTAFFCPQDGSLGAGSSAMRDYCPSQQKASPAPPRHTPDQSPGMESRHRSPSGAGEGASCSDGPRGSLACPSPTCFSPQESPSKETLEAHGASISGTPEATTSGKPEPVSSVKTEPKSSDDRNPMFLEKMDFKSSKQADSTSIGKEDPGSSRKADPMFTGKAEPEILGKGDPVAPGRMDPMTVRKEDLGSLGKVDPLCSSKTYTVSPRKEDPGSLRKVDPVSSDKVDPVFPRKEEPRYSGKEHPVSSEKVAPTSAEKVDLVLSGKRDPGPSGKADPMPLESMDSASTGKTEPGLLGKLIPGSSGKNGPVSSGTGAPGSLGRLDPTCLGMADPASVGNVETVPATKEDSRFLGKMDPASSGEGRPVSGHTDTTASAKTDLTSLKNVDPMSSGKVDPVSLGKMDPMCSGKPELLSPGQAERVSVGKAGTVSPGKEDPVSSRREDPISAGSRKTSSEKVNPESSGKTNPVSSGPGDPRSLGTAGPPSAVKAEPATGGKGDPLSSEKAGLVASGKAAPTASGKAEPLAVGKEDPVSKGKADAGPSGQGDSVSIGKVVSTPGKTVPVPSGKVDPVSLGKAEAIPEGKVGSLPLEKGSPVTTTKADPRASGKAQPQSGGKAETKLPGQEGAAAPGEAGAVCLKKETPQASEKVDPGSCRKAEPLASGKGEPVSLGKADSAPSRKTESPSLGKVVPLSLEKTKPSSSSRQLDRKALGSARSPEGARGSEGRVEPKAEPVSSTEASSLGQKDLEAAGAERSPCPEAAAPPPGPRTRDNFTKAPSWEASAPPPPREDAGTQAGAQACVSVAVSPMSPQDGAGGSAFSFQAAPRAPSPPSRRDAGLQVSLGAAETRSVATGPMTPQAAAPPAFPEVRVRPGSALAAAVAPPEPAEPVRDVSWDEKGMTWEVYGAAMEVEVLGMAIQKHLERQIEEHGRQGAPAPPPAARAGPGRSGSVRTAPPDGAAKRPPGLFRALLQSVRRPRCCSRAGPTAE

SEQ ID NO: 279805 - protein, 798 aa, Artificial Sequence
  derived and/or modified sequence
MDTAEDPAWLQLLQKDSSPPGPRPTAFFCPQDGSLGAGSSAMRDYCPSQQKASPAPPRHTPDQSPGMESRHRSPSGAGEGASCSDGPRGSLACPSPTCFSPQESPSKETLEAHGASISGTPEATTSGKPEPVSSVKTEPKSSDDRNPMFLEKMDFKSSKQADSTSIGKEDPGSSRKADPMFTGKAEPEILGKGDPVAPGRMDPMTVRKEDLGSLGKVDPLCSSKTYTVSPRKEDPGSLRKVDPVSSDKVDPVFPRKEEPRYSGKEHPVSSEKVAPTSAEKVDLVLSGKRDPGPSGKADPMPLESMDSASTGKTEPGLLGKLIPGSSGKNGPVSSGTGAPGSLGRLDPTCLGMADPASVGNVETVPATKEDSRFLGKMDPASSGEGRPVSGHTDTTASAKTDLTSLKNVDPMSSGKVDPVSLGKMDPMCSGKPELLSPGQAERVSVGKAGTVSPGKEDPVSSRREDPISAGSRKTSSEKVNPESSGKTNPVSSGPGDPRSLGTAGPPSAVKAEPATGGKGDPLSSEKAGLVASGKAAPTASGKAEPLAVGKEDPVSKGKADAGPSGQGDSVSIGKVVSTPGKTVPVPSGKVDPVSLGKAEAIPEGKVGSLPLEKGSPVTTTKADPRASGKAQPQSGGKAETKLPGQEGAAAPGEAGAVCLKKETPQASEKVDPGSCRKAEPLASGKGEPVSLGKADSAPSRKTESPSLGKVVPLSLEKTKPSSSSRQLDRKALGSARSPEGARGSEGRQASARPVPRAAAECAPAAVLLAGGTHGRVICPHFVRPSFRPSQAPFLITGP

SEQ ID NO: 279806 - DNA, 3027 bp, Artificial Sequence
  derived and/or modified sequence
atggacaccgccgaggaccccgcctggctgcagctgctgcagaaggacagcagcccccccggccccagacccaccgccttcttctgcccccaggacggcagcctgggcgccggcagcagcgccatgagagactactgccccagccagcagaaggccagccccgccccccccagacacacccccgaccagagccccggcatggagagcagacacagaagccccagcggcgccggcgagggcgccagctgcagcgacggccccagaggcagcctggcctgccccagccccacctgcttcagcccccaggagagccccagcaaggagaccctggaggcccacggcgccagcatcagcggcacccccgaggccaccaccagcggcaagcccgagcccgtgagcagcgtgaagaccgagcccaagagcagcgacgacagaaaccccatgttcctggagaagatggacttcaagagcagcaagcaggccgacagcaccagcatcggcaaggaggaccccggcagcagcagaaaggccgaccccatgttcaccggcaaggccgagcccgagatcctgggcaagggcgaccccgtggcccccggcagaatggaccccatgaccgtgagaaaggaggacctgggcagcctgggcaaggtggaccccctgtgcagcagcaagacctacaccgtgagccccagaaaggaggaccccggcagcctgagaaaggtggaccccgtgagcagcgacaaggtggaccccgtgttccccagaaaggaggagcccagatacagcggcaaggagcaccccgtgagcagcgagaaggtggcccccaccagcgccgagaaggtggacctggtgctgagcggcaagagagaccccggccccagcggcaaggccgaccccatgcccctggagagcatggacagcgccagcaccggcaagaccgagcccggcctgctgggcaagctgatccccggcagcagcggcaagaacggccccgtgagcagcggcaccggcgcccccggcagcctgggcagactggaccccacctgcctgggcatggccgaccccgccagcgtgggcaacgtggagaccgtgcccgccaccaaggaggacagcagattcctgggcaagatggaccccgccagcagcggcgagggcagacccgtgagcggccacaccgacaccaccgccagcgccaagaccgacctgaccagcctgaagaacgtggaccccatgagcagcggcaaggtggaccccgtgagcctgggcaagatggaccccatgtgcagcggcaagcccgagctgctgagccccggccaggccgagagagtgagcgtgggcaaggccggcaccgtgagccccggcaaggaggaccccgtgagcagcagaagagaggaccccatcagcgccggcagcagaaagaccagcagcgagaaggtgaaccccgagagcagcggcaagaccaaccccgtgagcagcggccccggcgaccccagaagcctgggcaccgccggcccccccagcgccgtgaaggccgagcccgccaccggcggcaagggcgaccccctgagcagcgagaaggccggcctggtggccagcggcaaggccgcccccaccgccagcggcaaggccgagcccctggccgtgggcaaggaggaccccgtgagcaagggcaaggccgacgccggccccagcggccagggcgacagcgtgagcatcggcaaggtggtgagcacccccggcaagaccgtgcccgtgcccagcggcaaggtggaccccgtgagcctgggcaaggccgaggccatccccgagggcaaggtgggcagcctgcccctggagaagggcagccccgtgaccaccaccaaggccgaccccagagccagcggcaaggcccagccccagagcggcggcaaggccgagaccaagctgcccggccaggagggcgccgccgcccccggcgaggccggcgccgtgtgcctgaagaaggagaccccccaggccagcgagaaggtggaccccggcagctgcagaaaggccgagcccctggccagcggcaagggcgagcccgtgagcctgggcaaggccgacagcgcccccagcagaaagaccgagagccccagcctgggcaaggtggtgcccctgagcctggagaagaccaagcccagcagcagcagcagacagctggacagaaaggccctgggcagcgccagaagccccgagggcgccagaggcagcgagggcagagtggagcccaaggccgagcccgtgagcagcaccgaggccagcagcctgggccagaaggacctggaggccgccggcgccgagagaagcccctgccccgaggccgccgcccccccccccggccccagaaccagagacaacttcaccaaggcccccagctgggaggccagcgccccccccccccccagagaggacgccggcacccaggccggcgcccaggcctgcgtgagcgtggccgtgagccccatgagcccccaggacggcgccggcggcagcgccttcagcttccaggccgcccccagagcccccagcccccccagcagaagagacgccggcctgcaggtgagcctgggcgccgccgagaccagaagcgtggccaccggccccatgaccccccaggccgccgccccccccgccttccccgaggtgagagtgagacccggcagcgccctggccgccgccgtggccccccccgagcccgccgagcccgtgagagacgtgagctgggacgagaagggcatgacctgggaggtgtacggcgccgccatggaggtggaggtgctgggcatggccatccagaagcacctggagagacagatcgaggagcacggcagacagggcgcccccgcccccccccccgccgccagagccggccccggcagaagcggcagcgtgagaaccgccccccccgacggcgccgccaagagaccccccggcctgttcagagccctgctgcagagcgtgagaagacccagatgctgcagcagagccggccccaccgccgagtag

SEQ ID NO: 279807 - DNA, 2397 bp, Artificial Sequence
  derived and/or modified sequence
atggacaccgccgaggaccccgcctggctgcagctgctgcagaaggacagcagcccccccggccccagacccaccgccttcttctgcccccaggacggcagcctgggcgccggcagcagcgccatgagagactactgccccagccagcagaaggccagccccgccccccccagacacacccccgaccagagccccggcatggagagcagacacagaagccccagcggcgccggcgagggcgccagctgcagcgacggccccagaggcagcctggcctgccccagccccacctgcttcagcccccaggagagccccagcaaggagaccctggaggcccacggcgccagcatcagcggcacccccgaggccaccaccagcggcaagcccgagcccgtgagcagcgtgaagaccgagcccaagagcagcgacgacagaaaccccatgttcctggagaagatggacttcaagagcagcaagcaggccgacagcaccagcatcggcaaggaggaccccggcagcagcagaaaggccgaccccatgttcaccggcaaggccgagcccgagatcctgggcaagggcgaccccgtggcccccggcagaatggaccccatgaccgtgagaaaggaggacctgggcagcctgggcaaggtggaccccctgtgcagcagcaagacctacaccgtgagccccagaaaggaggaccccggcagcctgagaaaggtggaccccgtgagcagcgacaaggtggaccccgtgttccccagaaaggaggagcccagatacagcggcaaggagcaccccgtgagcagcgagaaggtggcccccaccagcgccgagaaggtggacctggtgctgagcggcaagagagaccccggccccagcggcaaggccgaccccatgcccctggagagcatggacagcgccagcaccggcaagaccgagcccggcctgctgggcaagctgatccccggcagcagcggcaagaacggccccgtgagcagcggcaccggcgcccccggcagcctgggcagactggaccccacctgcctgggcatggccgaccccgccagcgtgggcaacgtggagaccgtgcccgccaccaaggaggacagcagattcctgggcaagatggaccccgccagcagcggcgagggcagacccgtgagcggccacaccgacaccaccgccagcgccaagaccgacctgaccagcctgaagaacgtggaccccatgagcagcggcaaggtggaccccgtgagcctgggcaagatggaccccatgtgcagcggcaagcccgagctgctgagccccggccaggccgagagagtgagcgtgggcaaggccggcaccgtgagccccggcaaggaggaccccgtgagcagcagaagagaggaccccatcagcgccggcagcagaaagaccagcagcgagaaggtgaaccccgagagcagcggcaagaccaaccccgtgagcagcggccccggcgaccccagaagcctgggcaccgccggcccccccagcgccgtgaaggccgagcccgccaccggcggcaagggcgaccccctgagcagcgagaaggccggcctggtggccagcggcaaggccgcccccaccgccagcggcaaggccgagcccctggccgtgggcaaggaggaccccgtgagcaagggcaaggccgacgccggccccagcggccagggcgacagcgtgagcatcggcaaggtggtgagcacccccggcaagaccgtgcccgtgcccagcggcaaggtggaccccgtgagcctgggcaaggccgaggccatccccgagggcaaggtgggcagcctgcccctggagaagggcagccccgtgaccaccaccaaggccgaccccagagccagcggcaaggcccagccccagagcggcggcaaggccgagaccaagctgcccggccaggagggcgccgccgcccccggcgaggccggcgccgtgtgcctgaagaaggagaccccccaggccagcgagaaggtggaccccggcagctgcagaaaggccgagcccctggccagcggcaagggcgagcccgtgagcctgggcaaggccgacagcgcccccagcagaaagaccgagagccccagcctgggcaaggtggtgcccctgagcctggagaagaccaagcccagcagcagcagcagacagctggacagaaaggccctgggcagcgccagaagccccgagggcgccagaggcagcgagggcagacaggccagcgccagacccgtgcccagagccgccgccgagtgcgcccccgccgccgtgctgctggccggcggcacccacggcagagtgatctgcccccacttcgtgagacccagcttcagacccagccaggcccccttcctgatcaccggcccctag

SEQ ID NO: 279808 - DNA, 4211 bp, Artificial Sequence
  derived and/or modified sequence
gggacggcggcgccgagtctgcgggtcctcccgccagcccggccggaggcagccgaggccgctcgggcggcggcggcggcggcggcgggagccggagcgcatctcgcccaggagccggagcagcggcactgcctgaaccagacagcagccttgggtgcaggcgtggtcatgagggcagatggacactgctgaagacccggcctggctccagctgcttcaaaaggattccagccccccaggaccccgacccacagccttcttctgcccacaggatgggagcctgggggctggcagctcggctatgagggattactgcccctcccagcaaaaggcaagccctgcaccccccaggcacacccctgaccaaagcccaggcatggagtctagacacagaagccccagtggggctggggaaggggcctcctgctctgacggccccagagggagcctggcctgcccctccccaacctgcttctctccccaggagtcaccctccaaggagacattggaggcacatggagcctccatctcagggacaccagaagccaccacgtctgggaagccagagcctgtgtcctccgtgaaaactgagcccaaatcctcagatgacagaaatcccatgttcttagagaagatggatttcaagtcctcaaagcaggccgattccacttccataggaaaggaggatcctgggtcctcacggaaggcagatcccatgtttacaggaaaggcagagcctgaaatcttgggaaagggggatcctgtggctcctggaaggatggatcccatgactgtaagaaaggaagatcttggatccctgggaaaagtagatcctttgtgctccagcaagacgtatacagtgtcaccgaggaaggaggatcctgggtctttgagaaaggtggatcctgtgtcctcagacaaagtggaccctgtattcccaagaaaggaggagcccaggtattcaggaaaagagcatcctgtgtcctcagaaaaggtcgctcctacatctgcagaaaaggtagatcttgtattgtcgggaaagagagatcctgggccctcgggaaaggcagatcccatgcccttggaaagcatggattctgcgtccacaggaaagacagagccggggctcctgggcaagctgattccaggctcatcaggcaagaatgggcctgtatcctctgggaccggggctcctgggtccttgggaaggctggatcccacatgcttggggatggcagatcccgcatctgtgggaaatgtagaaactgtgcctgccacaaaagaggactcccggttcctgggaaagatggaccctgcctcctcaggagaggggcgtcctgtgtctggccacacggatactacggcttcagcaaagacagatctcacatctttgaaaaatgtggatcccatgtcttcaggcaaggtggatccagtttctctgggaaagatggaccccatgtgctcaggaaagccagagctcttgtctcctggacaggcagagcgtgtgtctgtgggaaaggcaggaactgtatccccaggaaaagaggacccggtgtcctccagaagggaggaccccatatctgctggaagtagaaagacatcatctgaaaaagtgaatcctgagtcttcaggaaagacaaaccctgtgtcttcaggtccaggcgatcccaggtccttggggacagcaggtcccccatctgcagtaaaggctgagccagcgacggggggaaaaggagatcccctgtcctcggagaaggcaggtctggtggcctctggaaaggcggctcccacagcctcagggaaggccgagcccctcgcggtgggcaaggaggaccctgtgagcaagggaaaggcagacgctggcccctctggacaaggggactctgtgtctataggtaaagtggtctcaactccaggaaaaacagtcccggtgccctcggggaaggtggatcccgtgtccctgggaaaagcagaagctatcccagagggaaaagtgggttctctgcctctagagaaggggagtcctgttaccaccacaaaggcggatcccagggcctcggggaaagcacagccgcagtctggtggcaaagcagaaacaaagctccctgggcaagagggcgctgcagcaccaggggaagcaggggctgtgtgtttgaaaaaggagacaccacaggcctcagagaaggtggatcctggatcctgcagaaaagcagagccccttgcctcagggaagggagagcctgtgtccctggggaaagccgactctgcaccttccagaaaaacggagtccccatccttggggaaggtggtccccctgagtctggagaagaccaagccgtcctcctcctccaggcagttagaccgcaaagccctcggctcagcccggtctcccgagggtgccaggggcagtgaaggccgcgtggagccgaaggccgagcccgtgtccagcaccgaggcctccagtctcggccagaaagacctggaagccgctggggccgagagaagcccctgcccagaggccgcagcgcccccgccggggccgcggactcgcgacaacttcaccaaggcgccgtcgtgggaggcgagcgccccgccgccgccgcgcgaggacgcgggcactcaggcgggcgcgcaggcctgcgtctcagtggccgtgagccccatgtctccgcaggacggcgctgggggctcggccttcagcttccaggcggcgccgcgcgcgcccagcccgccctcgcgccgagatgcgggcctgcaggtgtcgctgggcgccgccgagacgcgctccgtggccactgggcccatgacacctcaagccgccgcgccgcccgccttccccgaagtgcgggtgcggcccggctcagcgctggcggccgctgtagcgcccccggagccggctgagcccgtgcgagacgtgagctgggacgagaagggcatgacgtgggaggtatacggcgccgccatggaggtggaggtgctgggcatggccatccagaagcatctggagcgacagatcgaggagcacggccgccaaggggcgcccgcgccgccgcccgccgcccgtgccggccccggccgttcgggctcggtgcgcaccgcgcccccagatggcgccgccaagcgtccgcccggcctgttccgcgcgctgctgcagagtgtgcgccggccgcggtgctgctcgcgggcgggacccacggccgagtgatctgcccccattttgtacgcccgagtttccgaccttctcaggctcccttcttgatcacaggcccctagaaggggtcccctctgcgtgccacaggcctccgaggggttgtgcagcctctagggctgttgcgtccccgtctttccagcccctcccatcacaaatacagaagaaccccttctaccaagctccctcgtggccacgaggccacgaacccggccagccctgacgccccactgtcccctcacagccctcagctctactcccggtcacactgggcgaccacgggggcctgctcagcaccctcacctcccaccccctgagagctggggcaggctcctgagatgtctagactggtgcgttgtggtctccggtggggccagatccccagaacagggagagactgcatacaagtctgagtggcagaagcttcaagtgggtgaggatcggtgtgtgagacccgcgagtgggcacgtctctgaatgtgaggtctcgggcagcacgtgaggtagaacgagtgtgagcgtctccacgcagtggctggccccgtggccggggcgtctcttgcatgctgttggtggtccttccccagttcctatctcccacccgcctggttccagccccatcccctctcccactgagtcacaggtttgagattcccagagaggccaaagacagctacaggaagtaccctgggggctcagctgagagagagtcacagaaaggccagagggtctcaggaaggtctggaggtcacagctgggctcacagaagctcttgggccctggcatcctgggtgaccggtgttcttgggtattggggacaggacagagagctcattctataaccacagttgtcttttaaaggccaccctctccagccccttgtcccccctgtgctgtgagcccaagtcccttgtgaccactcagtgtcccgtccccacccctccagccgcagtttttggctacaaactgtcacagtatacattggtaataaaatatttccccaa

SEQ ID NO: 279809 - DNA, 2397 bp, Artificial Sequence
  derived and/or modified sequence
atggacactgctgaagacccggcctggctccagctgcttcaaaaggattccagccccccaggaccccgacccacagccttcttctgcccacaggatgggagcctgggggctggcagctcggctatgagggattactgcccctcccagcaaaaggcaagccctgcaccccccaggcacacccctgaccaaagcccaggcatggagtctagacacagaagccccagtggggctggggaaggggcctcctgctctgacggccccagagggagcctggcctgcccctccccaacctgcttctctccccaggagtcaccctccaaggagacattggaggcacatggagcctccatctcagggacaccagaagccaccacgtctgggaagccagagcctgtgtcctccgtgaaaactgagcccaaatcctcagatgacagaaatcccatgttcttagagaagatggatttcaagtcctcaaagcaggccgattccacttccataggaaaggaggatcctgggtcctcacggaaggcagatcccatgtttacaggaaaggcagagcctgaaatcttgggaaagggggatcctgtggctcctggaaggatggatcccatgactgtaagaaaggaagatcttggatccctgggaaaagtagatcctttgtgctccagcaagacgtatacagtgtcaccgaggaaggaggatcctgggtctttgagaaaggtggatcctgtgtcctcagacaaagtggaccctgtattcccaagaaaggaggagcccaggtattcaggaaaagagcatcctgtgtcctcagaaaaggtcgctcctacatctgcagaaaaggtagatcttgtattgtcgggaaagagagatcctgggccctcgggaaaggcagatcccatgcccttggaaagcatggattctgcgtccacaggaaagacagagccggggctcctgggcaagctgattccaggctcatcaggcaagaatgggcctgtatcctctgggaccggggctcctgggtccttgggaaggctggatcccacatgcttggggatggcagatcccgcatctgtgggaaatgtagaaactgtgcctgccacaaaagaggactcccggttcctgggaaagatggaccctgcctcctcaggagaggggcgtcctgtgtctggccacacggatactacggcttcagcaaagacagatctcacatctttgaaaaatgtggatcccatgtcttcaggcaaggtggatccagtttctctgggaaagatggaccccatgtgctcaggaaagccagagctcttgtctcctggacaggcagagcgtgtgtctgtgggaaaggcaggaactgtatccccaggaaaagaggacccggtgtcctccagaagggaggaccccatatctgctggaagtagaaagacatcatctgaaaaagtgaatcctgagtcttcaggaaagacaaaccctgtgtcttcaggtccaggcgatcccaggtccttggggacagcaggtcccccatctgcagtaaaggctgagccagcgacggggggaaaaggagatcccctgtcctcggagaaggcaggtctggtggcctctggaaaggcggctcccacagcctcagggaaggccgagcccctcgcggtgggcaaggaggaccctgtgagcaagggaaaggcagacgctggcccctctggacaaggggactctgtgtctataggtaaagtggtctcaactccaggaaaaacagtcccggtgccctcggggaaggtggatcccgtgtccctgggaaaagcagaagctatcccagagggaaaagtgggttctctgcctctagagaaggggagtcctgttaccaccacaaaggcggatcccagggcctcggggaaagcacagccgcagtctggtggcaaagcagaaacaaagctccctgggcaagagggcgctgcagcaccaggggaagcaggggctgtgtgtttgaaaaaggagacaccacaggcctcagagaaggtggatcctggatcctgcagaaaagcagagccccttgcctcagggaagggagagcctgtgtccctggggaaagccgactctgcaccttccagaaaaacggagtccccatccttggggaaggtggtccccctgagtctggagaagaccaagccgtcctcctcctccaggcagttagaccgcaaagccctcggctcagcccggtctcccgagggtgccaggggcagtgaaggccgccaagcgtccgcccggcctgttccgcgcgctgctgcagagtgtgcgccggccgcggtgctgctcgcgggcgggacccacggccgagtgatctgcccccattttgtacgcccgagtttccgaccttctcaggctcccttcttgatcacaggcccctag

SEQ ID NO: 279810 - DNA, 3027 bp, Artificial Sequence
  derived and/or modified sequence
atggacaccgccgaagaccctgcctggctgcagctgctccagaaagactcttcccctcctggacctaggcccaccgccttcttctgtccacaggatggatccctgggagctggatcctcagcaatgagggactactgcccctcacagcagaaagcatcaccagcccccccgcgacacaccccagatcagagcccaggcatggaaagtaggcatcgcagtccctcaggcgcaggggaaggtgcctcctgttcagacggacctagaggaagcctggcatgcccatccccgacatgtttctcaccgcaggagtctcccagcaaggagactttagaggcccatggtgccagcatcagcggaacgcctgaggcaacgaccagcgggaagccggaaccagtcagttctgtcaaaacagagccaaagtcctcagatgaccgaaatcctatgttcctggagaaaatggatttcaaaagttccaaacaagccgattccacctcaatcgggaaagaagacccaggatcatcccgaaaggcagacccaatgttcaccgggaaagccgagcctgaaattttgggtaaaggagacccggtggcccccgggcgaatggacccgatgaccgtcagaaaagaggacctggggtcactgggaaaagtggatcccctgtgctcatctaaaacatataccgtgtcccctcgtaaagaggacccaggatctctccggaaggtggaccctgtaagtagcgacaaggtggaccccgtgttcccgaggaaagaagaacctaggtacagtgggaaagaacacccagttagcagcgaaaaggtggctcccacatcggcagagaaagtggatctggtactgtctgggaagagagacccaggcccatcaggaaaagccgaccccatgccccttgaaagtatggattctgcttccacaggcaagactgagcccgggcttctcggaaagttaatacctgggtcctcgggcaagaatgggccagtgtctagtggcacgggagccccaggaagcctcggaagactggatccgacgtgtttaggcatggctgatccggcctccgtgggcaatgtggagaccgtgcctgcgaccaaagaggactcacgatttctgggcaaaatggatccggcctcctctggagagggaagacccgtgtccggccatacagacaccacggcctccgcaaagacagatctcacaagtctcaaaaatgtggaccctatgagctctggtaaggtggatccagtgtctctggggaaaatggaccccatgtgcagcggcaaaccagaattgttgagccccggccaggccgagagggtgagcgtaggaaaagcaggtacggtctctcctggaaaggaagaccctgtgagctcccgcagagaggaccccatctctgcaggaagccgcaaaacctccagcgaaaaagtgaaccctgagagcagcggtaaaaccaatcctgtctcaagtggtcccggagatcctcggagcctgggaacagcaggacctccctccgccgttaaagcagaacccgctacaggggggaaaggcgaccctctcagctctgagaaggcgggcctggtggcctcaggcaaggccgctcccacagcatcaggaaaggctgagcccctcgccgtaggcaaggaggatcctgtgtcaaagggcaaagccgatgcaggcccctccggccagggggacagcgtgagcataggaaaagttgtgtcgactcccggcaagaccgtcccggtgcccagcggaaaagtcgatcctgtgtcgctagggaaagcagaagctatccccgaaggcaaagttggatccctgccacttgagaaaggaagccctgtaactactactaaagcggacccacgcgcttctggcaaagcccaaccgcagagcggcggaaaggccgagacaaagctccctggtcaggagggggctgcagcccctggggaagcaggagcagtgtgtcttaaaaaagaaacacctcaggcttctgaaaaagtggacccgggtagttgccgtaaggcggagcccttagcaagcggtaaaggtgaacccgtgtcactggggaaagcggactccgcgccatccaggaagacagagtctccgtctctcggcaaagtggtgccgctgagcctcgaaaagaccaagccttccagttcatcacggcaactcgatagaaaggcccttggatccgcacggagccctgaaggggcccggggctctgaaggccgagtcgagccaaaagccgagcccgtcagcagcactgaggcatctagcttagggcagaaagacctggaagctgctggggcagaacgctcaccatgtcctgaagcagctgctcccccaccaggcccaaggactcgtgataatttcacgaaggcaccctcatgggaggcctcagccccgccccccccacgggaagacgcaggcacacaagccggagctcaagcctgcgtgtcagtggccgtatcccccatgagtccccaagacggtgcaggcggctctgcgttcagtttccaggccgcccccagagccccatcgccacctagcagaagggacgctggcctgcaggtaagtttgggggctgccgagactaggagcgtagcaacaggccccatgacgccacaagccgcagcaccgcccgccttccccgaagtcagagtgcggcccgggtccgctctggcggcagctgtggcaccccctgagccagcagagccggtgcgcgacgtgtcttgggacgaaaaagggatgacttgggaggtttacggagcggcaatggaggtcgaggtgctcggcatggccattcagaagcaccttgagagacaaatagaggagcatggaagacaaggtgcccctgcccccccacccgcagctcgggccggccctggcagatccggcagtgtccgaaccgcaccccctgacggcgccgccaagaggcctcccggactgttcagggccctgctacagagcgtacgaagacctagatgttgctctagagccgggccaacagctgagtag

SEQ ID NO: 279811 - DNA, 2397 bp, Artificial Sequence
  derived and/or modified sequence
atggatacagccgaagacccagcctggttgcagctgctacaaaaagatagcagcccgccagggccccggccaactgccttcttttgcccgcaggacgggagtttaggcgcgggctctagtgctatgcgggattactgtccctcccagcagaaagcgtctcctgctccaccaagacatacaccggaccagagtcccggcatggaatcccggcataggtcaccgtcaggggctggggagggcgcgagttgcagcgatggtccaagaggtagcctggcctgtccctcacctacatgctttagcccccaggaaagcccctcaaaggagaccttggaggcccacggggcttctatcagcggcactcccgaggcaactaccagcggcaagccagagccagtgtcctccgtcaaaacagagccaaaaagcagtgacgatagaaacccaatgtttctggaaaaaatggatttcaaaagtagcaagcaggccgattccacatccatcgggaaggaggatccaggatcttctcgcaaagccgacccgatgtttacaggaaaagccgagcctgagattctgggaaaaggagatcctgttgcccctgggaggatggaccccatgacagtacgcaaagaggatctaggctcgctcggtaaggtggaccctctatgcagctccaagacatatactgtcagcccaaggaaagaagatcccggaagtcttaggaaggtggaccccgtaagttcggacaaggtagatcccgttttccctaggaaggaagagcccagatattccggaaaggagcaccccgtgtcttccgagaaagttgcccccaccagcgctgaaaaagtggaccttgtgctttcagggaagcgcgaccccggacccagcgggaaggctgaccctatgccactggagagcatggactctgctagtacagggaagaccgagccagggcttctcggcaagctcattcctgggagttctggcaaaaacggtcctgtgtctagcggtactggagcaccgggttcactgggcagactggacccaacatgtcttggtatggctgatcccgcctccgtcggaaatgtggaaacagtgcctgcgacaaaggaagactcaagattcctggggaaaatggacccagccagcagcggcgagggacgcccggtatccgggcacaccgacaccaccgcctctgccaaaacagacctcacctccctaaagaatgtcgaccccatgtcgtccgggaaggtggatcctgtttcacttggcaagatggatccgatgtgttcgggaaagccagaactgctgtcaccagggcaggcagagcgggtctcagtgggaaaggcaggaaccgtttcccctggcaaggaggaccctgtgtccagtcgacgcgaggacccaatctccgcggggagtaggaagaccagctcagagaaggtcaaccccgagagtagcgggaagactaatcctgtgtctagtggccccggcgacccacggagtttggggactgcaggaccacccagcgcagtcaaggctgagcctgcaaccgggggtaagggagatcctctgtcttctgaaaaagctggattagttgccagcgggaaagctgcacctacagcctctggcaaagccgagccgctggctgttggcaaggaggaccccgtgtctaaaggtaaggccgacgctggcccctctgggcagggcgactctgtcagcataggaaaggtggtttcaactcctggcaagaccgtgcctgtgccttcaggcaaagtggatcctgtaagccttggaaaggcagaagccatccccgaaggtaaggtaggttctttgcccctggagaagggctccccagtgacaacaaccaaagcggacccccgtgcttctgggaaggctcagccacagagcggaggaaaagctgagacgaagctgcctggccaagaaggcgccgctgcccccggtgaagcaggtgccgtgtgtctgaagaaagagacccctcaggcttccgagaaggtagatcctgggtcctgtagaaaggccgagccacttgctagcggcaagggcgaacctgtgagcctgggtaaagcggattccgccccctccaggaagaccgaaagtccttcgctcggaaaggtggtgcccctctccctggagaaaactaaacccagttcctcctctaggcagttggatagaaaagctctcgggagcgcaagatctcctgagggggcccgggggtcggaaggtcgccaggccagtgcccggcctgtgccacgcgccgctgcagaatgtgcacctgctgccgtgttactggccggcggcacccatggacgcgtgatttgtccgcacttcgttcggccttccttccggcctagccaggccccatttctgatcaccggaccttag

SEQ ID NO: 279812 - DNA, 3027 bp, Artificial Sequence
  derived and/or modified sequence
atggacacagcagaagatcctgcctggctgcagctgctgcagaaggacagcagccccccaggcccccggcccacagccttcttctgcccccaggacggcagcctgggcgccggcagcagcgccatgagggactactgccccagccagcagaaggccagccctgccccacccaggcacaccccagaccagagccctggcatggagagccgccacaggagccccagcggggccggggagggcgccagctgcagtgatggcccccggggcagcctggcctgccccagccccacctgcttcagcccccaggagagccccagcaaggagaccctggaggcccatggagccagcatcagcggcaccccagaggccaccaccagcggcaagccagagcctgtgtcctctgtgaagacagagcccaagagcagtgatgacaggaaccccatgttcctggagaagatggacttcaagagcagcaagcaggccgacagcaccagcatcggcaaggaggaccccggcagcagcaggaaggctgaccccatgttcaccgggaaggccgagcctgagatcctgggcaagggggaccctgtggcccctggccgcatggaccccatgacagtgaggaaagaagacctgggcagcctgggcaaggtggaccccctgtgcagcagcaagacctacacagtgagccccaggaaagaagatcctggcagcctgaggaaggtggaccctgtgtccagtgacaaggtggaccctgtgttccccaggaaggaggagccccgctacagcggcaaggagcaccctgtgagcagcgagaaggtggcccccaccagcgctgagaaggtggacctggtgctgagcggcaagagggaccccggccccagcggcaaggctgaccccatgcccctggagagcatggattctgccagcacaggcaagacagagcccggcctgctgggcaagctgatccctggcagcagcggcaagaatggacctgtgagcagcggcaccggggcccctggcagcctgggccgcctggaccccacctgcctgggcatggctgaccctgcctctgtgggcaatgtggagaccgtgcctgccaccaaggaggacagccgcttcctgggcaagatggaccctgccagcagcggggagggccggcctgtgtctggccacacagacaccacagccagcgccaagacagacctgaccagcctgaagaatgtggaccccatgagcagcggcaaggtggaccctgtgtccctgggcaagatggaccccatgtgcagcggcaagccagagctgctgagccctggccaggccgagcgggtgtctgtgggcaaggccggcaccgtgtccccaggcaaggaggaccctgtgagcagccggcgggaggaccccatctctgctggcagcaggaagaccagcagcgagaaggtgaaccctgagagcagcggcaagaccaaccctgtgagcagcggccctggggaccccaggagcctgggcacagctggccccccatctgctgtgaaggccgagcccgccactggaggcaagggggaccccctgagcagcgagaaggccggcctggtggccagcggcaaggccgcccccacagccagcggcaaggccgagcccctggccgtgggcaaggaggaccctgtgtccaagggcaaggcagatgctggccccagcggccagggcgacagcgtgtccatcggcaaggtggtgtccaccccaggcaagacagtgcctgtgcccagcggcaaggtggaccctgtgtccctgggcaaggccgaggccatccctgagggcaaggtgggcagcctgcccctggagaagggcagccctgtgaccaccaccaaggctgacccccgggccagcggcaaggcccagccccagagcggcggcaaggccgagaccaagctgcccggccaggagggcgctgctgcccctggagaggccggggctgtgtgcctgaagaaggagaccccccaggccagcgagaaggtggaccccggcagctgcaggaaggccgagcccctggccagcgggaaaggagagcctgtgtccctgggcaaggctgacagcgcccccagcaggaagacagagagccccagcctgggcaaggtggtgcccctgagcctggagaagaccaagcccagcagcagcagccggcagctggacaggaaggccctgggcagcgcccggagccctgagggcgcccggggcagcgagggccgggtggagcccaaggccgagcctgtgagcagcacagaggccagcagcctgggccagaaggacctggaggccgccggggctgagaggagcccctgcccagaggccgccgcccctcctcctggccccaggacccgggacaacttcaccaaggcccccagctgggaggccagcgcccctcctccaccccgggaggatgctggcacccaggccggggcccaggcctgtgtgtctgtggccgtgagccccatgagcccccaggatggagctgggggcagcgccttctccttccaggccgccccccgggcccccagcccccccagcagaagagatgctggcctgcaggtgtccctgggcgctgctgagaccaggtctgtggccaccggccccatgaccccccaggccgccgcccccccagccttccctgaggtgcgggtgcggcccggcagcgccctggccgctgctgtggcccctcctgagcctgctgagcctgtgagagatgtgtcctgggatgagaagggcatgacctgggaggtgtatggagctgccatggaggtggaggtgctgggcatggccatccagaagcacctggagcggcagatcgaggagcacggccggcagggcgccccagcccctcctcctgctgcccgggccggccctggccgcagcggctctgtgaggacagcccccccagatggagctgccaagaggcctcctggcctcttccgggccctgctgcagagcgtgagaagaccccgctgctgcagcagagctggccccacagctgagtag

SEQ ID NO: 279813 - DNA, 2397 bp, Artificial Sequence
  derived and/or modified sequence
atggacacagcagaagatcctgcctggctgcagctgctgcagaaggacagcagccccccaggcccccggcccacagccttcttctgcccccaggacggcagcctgggcgccggcagcagcgccatgagggactactgccccagccagcagaaggccagccctgccccacccaggcacaccccagaccagagccctggcatggagagccgccacaggagccccagcggggccggggagggcgccagctgcagtgatggcccccggggcagcctggcctgccccagccccacctgcttcagcccccaggagagccccagcaaggagaccctggaggcccatggagccagcatcagcggcaccccagaggccaccaccagcggcaagccagagcctgtgtcctctgtgaagacagagcccaagagcagtgatgacaggaaccccatgttcctggagaagatggacttcaagagcagcaagcaggccgacagcaccagcatcggcaaggaggaccccggcagcagcaggaaggctgaccccatgttcaccgggaaggccgagcctgagatcctgggcaagggggaccctgtggcccctggccgcatggaccccatgacagtgaggaaagaagacctgggcagcctgggcaaggtggaccccctgtgcagcagcaagacctacacagtgagccccaggaaagaagatcctggcagcctgaggaaggtggaccctgtgtccagtgacaaggtggaccctgtgttccccaggaaggaggagccccgctacagcggcaaggagcaccctgtgagcagcgagaaggtggcccccaccagcgctgagaaggtggacctggtgctgagcggcaagagggaccccggccccagcggcaaggctgaccccatgcccctggagagcatggattctgccagcacaggcaagacagagcccggcctgctgggcaagctgatccctggcagcagcggcaagaatggacctgtgagcagcggcaccggggcccctggcagcctgggccgcctggaccccacctgcctgggcatggctgaccctgcctctgtgggcaatgtggagaccgtgcctgccaccaaggaggacagccgcttcctgggcaagatggaccctgccagcagcggggagggccggcctgtgtctggccacacagacaccacagccagcgccaagacagacctgaccagcctgaagaatgtggaccccatgagcagcggcaaggtggaccctgtgtccctgggcaagatggaccccatgtgcagcggcaagccagagctgctgagccctggccaggccgagcgggtgtctgtgggcaaggccggcaccgtgtccccaggcaaggaggaccctgtgagcagccggcgggaggaccccatctctgctggcagcaggaagaccagcagcgagaaggtgaaccctgagagcagcggcaagaccaaccctgtgagcagcggccctggggaccccaggagcctgggcacagctggccccccatctgctgtgaaggccgagcccgccactggaggcaagggggaccccctgagcagcgagaaggccggcctggtggccagcggcaaggccgcccccacagccagcggcaaggccgagcccctggccgtgggcaaggaggaccctgtgtccaagggcaaggcagatgctggccccagcggccagggcgacagcgtgtccatcggcaaggtggtgtccaccccaggcaagacagtgcctgtgcccagcggcaaggtggaccctgtgtccctgggcaaggccgaggccatccctgagggcaaggtgggcagcctgcccctggagaagggcagccctgtgaccaccaccaaggctgacccccgggccagcggcaaggcccagccccagagcggcggcaaggccgagaccaagctgcccggccaggagggcgctgctgcccctggagaggccggggctgtgtgcctgaagaaggagaccccccaggccagcgagaaggtggaccccggcagctgcaggaaggccgagcccctggccagcgggaaaggagagcctgtgtccctgggcaaggctgacagcgcccccagcaggaagacagagagccccagcctgggcaaggtggtgcccctgagcctggagaagaccaagcccagcagcagcagccggcagctggacaggaaggccctgggcagcgcccggagccctgagggcgcccggggcagcgagggccggcaggccagcgcccggcctgtgcccagggctgctgctgaatgtgccccagctgctgtgctgctggccggcggcacccacggccgggtcatctgcccccactttgtgcggcccagcttccggcccagccaggcccccttcctgatcaccggcccctag

SEQ ID NO: 279814 - DNA, 3027 bp, Artificial Sequence
  derived and/or modified sequence
atggacaccgccgaggaccccgcctggctgcagctgctgcagaaggatagctcccctcctgggccaagacccacggcttttttttgcccacaggacggcagtctcggggctggtagcagcgccatgcgtgattattgcccctcacaacagaaagcttcccctgccccacctcgacatacacccgaccagagtccaggaatggagtctcgtcaccgcagccctagcggagcaggcgagggggccagttgctcagacggccctcgtggcagtctggcttgtccatctccaacgtgtttcagtccccaggaatctccgtcaaaagaaacacttgaggcacacggggcctcaataagtggcacacccgaagccaccacatcggggaaacccgaacccgtgtcgtccgtgaaaactgaacccaaatcctccgatgaccgtaatcctatgtttctcgagaagatggatttcaagagcagcaagcaggccgattccacgtccataggaaaagaagaccccggttcttctagaaaggcggaccccatgtttacaggcaaggcagagccagagatcctgggcaagggcgaccccgtggccccagggcgcatggatcccatgactgtcagaaaggaagacctggggtctcttggcaaggttgaccccctgtgttcatccaaaacatataccgtgtctccacgaaaagaggatcctggaagtcttaggaaggtcgaccctgtgagcagcgataaagtcgaccccgtattcccccgcaaggaggagcccaggtacagcgggaaagagcacccagtctcctccgagaaagtggctcccacgagtgccgaaaaagtcgatctcgtcctcagcgggaagagagacccaggaccgtccggtaaagcggatccgatgcccctcgaatccatggattcagcaagtacgggcaagacggaacccggactgctgggtaaactgataccggggagttcaggcaagaacggccctgtatcatcaggcacaggcgcccccgggagcctcggcaggctggacccaacctgtctgggcatggccgatccagcttctgtgggcaacgtcgaaaccgtcccagcaaccaaagaggatagcaggtttcttgggaagatggatccagccagcagtggcgaagggagacctgtctctgggcacacagatactacagcctccgccaagacagacctgacctctctgaagaatgtggaccctatgtcttccggaaaagtcgatcctgtcagcctggggaagatggaccctatgtgctctggaaagccagagctcctctcacccggccaggcagagcgggtgtcagttggcaaagccgggaccgtctctcccggaaaagaggaccccgtaagctccaggcgcgaggaccccatttccgcaggttcccgaaaaactagctcggagaaggttaacccagagagcagcggcaagacgaatcccgtgagttctgggcctggcgatcccagaagtctggggacagccgggcccccttcagccgtcaaggccgagccagcaacaggaggcaagggtgatccactttcatccgagaaggcaggtctggtagcttccggcaaggcagccccaaccgcatccggtaaggccgaaccgttagcggttggtaaagaagatccagtgagtaaaggcaaggccgacgctggacctagtggccagggtgattctgtgtctatagggaaggtggtgtccaccccaggaaaaaccgtgccggtgccctccggcaaggtagaccccgtgtcactcggtaaggccgaagccatcccagagggaaaggtcggttctttgcccctggagaagggatcgccagtgaccaccaccaaagcggacccacgggcctctggaaaggcccagcctcaatccggtggcaaggcagagactaaattgcccggccaggagggagctgcagcccctggtgaggctggcgctgtgtgcctgaagaaggaaaccccccaggctagcgaaaaagtggatcctgggtcctgtaggaaggcagagcctcttgcctctggaaaaggtgagccagtgagcttaggcaaagcagatagcgcgccaagtcgtaagaccgaaagtccatcccttggaaaggtggtccccctgtccctcgagaagacgaaacccagctcttcatccagacaattggacagaaaggcactcgggtcagcccgcagtccggaaggcgcacgcggctccgaaggacgagtagaaccaaaagcagagcctgtctcatcaacggaagcatcctctctggggcagaaagatctagaagccgccggagctgagagaagtccttgccctgaagccgctgcacccccgcccggcccgagaaccagggataatttcactaaagcgccctcttgggaggcctctgcaccacccccacccagagaggatgcaggcacacaggctggtgcacaggcctgtgtgagcgttgctgtgtcccccatgtctccacaagacggtgctgggggatctgccttcagcttccaagcagctccacgtgccccatcacctccatcccgacgagacgctggtctgcaggtgagcctgggagccgctgaaacaagatctgttgctaccggaccaatgactccccaggcagctgcgccgccagcgtttcccgaagtgagggtgcggccaggcagcgccctcgcagccgcggtggccccgcctgagcctgcagagcccgtgcgggacgtctcctgggacgagaagggtatgacatgggaagtctatggggccgcaatggaggtcgaagtgctggggatggcgattcaaaaacacctggaacgccaaatcgaagaacacggtcgacagggtgcaccagcgcccccaccagctgctagagccggccccgggcggagcggcagcgtgagaacagcaccccccgatggcgcagccaagcgaccccctgggctctttcgcgctctgctgcagagcgtaaggcgaccccgctgctgctctcgggccgggcctactgctgagtag

SEQ ID NO: 279815 - DNA, 2397 bp, Artificial Sequence
  derived and/or modified sequence
atggacaccgccgaggaccccgcctggctgcagctgctgcagaaggactcatctcctccaggacccaggcccactgcgttcttctgtccgcaggacggctctctgggagctggatcctccgcaatgcgcgactactgtccaagccagcagaaggcttctccagcacccccgagacacacgcccgaccagagcccaggcatggagtcacgccataggtccccttccggcgccggtgagggagcctcatgttcggacggccccaggggctctctggcatgccctagcccaacctgttttagtcctcaagaatcaccatccaaagaaactctcgaagcccatggagcttccatttctggaacccccgaggccacaacctccggaaagcccgagccagtatcctccgttaagacagagcccaagtcaagcgacgacaggaatcctatgtttctggaaaaaatggatttcaagagttccaaacaggctgactctacttctattggtaaagaggacccagggagttctaggaaggccgatcccatgtttactggtaaggctgagcctgagatcttgggcaaaggtgacccggtggctcccggacgaatggaccctatgacggttcggaaagaggatttagggtcgcttgggaaggtggatccattgtgtagttccaaaacatacaccgtttctcctcggaaagaagacccgggatcactacggaaagtggaccctgtgtcctctgataaggtggatccggtcttcccaaggaaagaggaaccacgctacagtggcaaggaacatcctgtgtcttccgagaaagttgcaccaacgagcgccgagaaagttgatctggtgttgtcaggaaagagggatccagggccgagcggcaaggccgaccctatgcctctcgagtcaatggactcagcctctaccgggaaaacagagccgggactcctgggcaaactaatcccgggatcatctggcaagaacgggcctgtgagttcggggaccggggctcccggtagcctgggcaggcttgaccctacatgtctaggcatggctgatcccgcctcggtggggaacgtagagactgtgcctgcaaccaaagaagactcaagattcctaggcaagatggatcctgcctctagtggggaaggccgtccagtttccggacacactgacacaactgcttctgccaagactgatttgacatcactaaagaacgttgatcctatgagcagtggcaaagttgatccagtgtctttaggaaagatggaccctatgtgttctggcaagcctgagttgttgtcgcctggccaggcggaacgtgtgtccgtgggcaaggcagggacggtctctccggggaaagaagaccctgtatcatctcggagagaggaccccatctccgcaggctccaggaagacctcttccgagaaagttaatcctgaatctagcggaaaaaccaatccggtatcatctggcccaggagacccacgctcccttgggacagccgggccaccatcagctgtgaaggctgaacctgccacaggtggtaaaggcgatcctctgagctccgaaaaggccggactggtcgctagcgggaaagccgcccctaccgccagcggtaaggccgagccactagcagtggggaaggaagatccagtttccaagggcaaggcagacgcggggccttcaggacagggagattctgtcagtatcggtaaggttgtcagcacccccggaaaaactgtgcccgtgcccagtgggaaggtggatccagtatcactaggaaaggccgaagccatcccagagggtaaggtcggaagcttgcccctcgaaaaaggtagtcctgtcacgactaccaaggctgacccccgggcaagcgggaaggcccagccccaatccggagggaaggccgagactaagcttccgggccaggagggggcagccgcgcccggagaagccggcgccgtgtgtctgaaaaaagagactccccaggcctctgaaaaagtcgatcctggaagttgccgcaaggccgaaccacttgcttctgggaagggcgagccagtgtcactgggtaaggccgacagtgctccatcacgcaaaactgaaagtccgtctctgggaaaggtggtgcccttgagcctggagaagaccaagcctagcagtagttcacggcaactcgaccggaaggctctaggttcagcgaggtccccagaaggtgcacgcggttctgaaggacgacaggcctccgcaagacctgtgcctagagccgcagccgaatgtgcacccgcagctgttttgctggccgggggaactcacggtagggttatttgcccacactttgttaggccgtcttttcgaccaagtcaggcacccttcctgattaccggtccctag

SEQ ID NO: 279816 - DNA, 3027 bp, Artificial Sequence
  derived and/or modified sequence
atggacacagcggaggaccctgcttggctacagctcctacagaaagatagctcgcctcctggcccaagacccacagcgttcttttgtccgcaggacggcagcttgggtgcaggatcgtcagccatgcgcgattactgcccgagccagcaaaaagcctcaccagcccctcccaggcatacaccggatcagagcccgggtatggaaagccggcatagatcaccatctggggctggagaaggggcttcctgctccgacggacccaggggatcattagcctgcccatctcccacatgcttctccccacaggagtcaccttcaaaggagaccctggaagctcacggagcctcgatttccggaactcccgaagccacaacgagcggaaaaccagagcccgtcagcagtgtaaaaaccgagccgaagagcagtgatgacaggaaccctatgttcctagagaaaatggacttcaagagcagcaagcaggcagactccacttccattggaaaagaagaccccggaagctcccggaaagccgacccaatgtttacaggcaaggctgaaccagaaatcctcggcaaaggagatcccgttgccccaggcagaatggatcccatgacggtccgcaaagaggatctgggctcactgggcaaggtggatccattgtgcagctccaagacctacaccgtatcaccacggaaggaagatcccggtagcctgcggaaggtggacccggtgtcctcagataaagttgatcccgtgtttccgaggaaagaggaacctagatacagcggcaaagaacatcccgtgtcgtccgaaaaggtggcgccaacatccgctgagaaagttgatctggtactcagtggtaagagagatcccggtccaagcggtaaagctgacccaatgcccctagagtctatggacagcgcctccacagggaagacagagcctgggttgctcggcaagctcattccaggatcatctgggaagaacggacccgtgagttctgggacaggcgcacctggtagccttggtcgtcttgatccaacttgtctgggtatggccgaccccgctagcgtcggcaatgtggaaactgttcccgcaaccaaagaagacagccggttcctgggaaaaatggatcccgcttccagtggtgaggggcgtcccgttagcgggcatacagacaccaccgcctctgccaagacggacctgacctcgctgaagaatgtagatcctatgtccagtgggaaggtcgatccagttagtctcgggaagatggacccaatgtgttccggtaagcccgagttactgagccccggtcaggctgagcgtgtgagtgtagggaaagcagggacggtttcaccaggcaaggaggatcctgtgtcttcccgacgagaggaccccatcagtgccggatctaggaagacctccagcgaaaaagtgaatcccgagagtagcggcaagacgaacccggttagttctggccctggcgatcctcggtccctaggcacggctggacccccaagcgctgtgaaagcagaacccgcaacaggaggtaaaggggaccctctcagctccgagaaagccggactcgttgccagcggaaaggctgcccctactgcctctgggaaagccgaacccctcgctgtgggaaaggaggacccggtgtccaaagggaaagcagatgccggaccctcgggacagggggactctgtcagcattgggaaggtagtgtcgacccctggcaaaacggtgcctgtaccgtcaggaaaggtcgaccctgtctcccttggcaaagccgaggccattcctgagggaaaggttggcagcctgcccctggaaaagggctccccggtgaccaccactaaggctgaccctcgggcatccggaaaagcgcagcctcagtctggaggcaaagccgaaacaaagctaccagggcaagaaggggctgccgcacccggagaggccggtgcagtctgcttgaagaaggaaaccccacaggcttctgaaaaggtggatcccggaagctgtaggaaggcagaacccctggccagcggcaaaggcgagcccgtgtcacttggtaaagccgactccgctccaagcaggaaaactgagtccccctcacttggcaaagtggtccctctctcgctagagaaaactaaaccttcatctagttctaggcagcttgaccggaaggcactgggaagtgcccgatcacccgaaggtgctagaggcagcgagggacgagtggaaccaaaggccgagcccgtctcatccaccgaggcttcatccctgggccagaaagatttggaggctgccggagccgagcgctccccatgtcctgaggcagcagccccaccccctgggccacggactagggataacttcaccaaagctccttcatgggaggcctcagcaccccctccccctagagaggacgcagggacacaagccggagcacaagcgtgtgtgagtgtcgccgtaagccctatgtccccccaggacggggctgggggttctgctttctcattccaagcagccccacgtgccccatcaccccctagccggagagatgctggtttgcaggtgagtctgggagccgctgagactcggtcagtagcgacaggccctatgacaccgcaagctgcagctcccccagctttccccgaggtgagggtccggccaggctccgctttggccgctgctgtggcaccgcctgagcctgcggagcctgttcgtgatgtctcttgggatgagaagggcatgacttgggaagtgtatggcgctgctatggaggttgaggtcctggggatggcaatccaaaaacacctagaacgccaaatcgaggaacacgggcgacagggagcgccagctccacctcccgcagccagggccggaccgggaagatctggctctgtacgtactgcccctcccgatggggcagccaaacggccaccaggtctcttccgggctttacttcagtcggtgcgaaggccgcgatgctgtagtagagccggtccaacagccgaatag

SEQ ID NO: 279817 - DNA, 2397 bp, Artificial Sequence
  derived and/or modified sequence
atggatactgccgaagaccccgcttggttgcaactccttcagaaagattcctctcccccaggacctcgccctacggcctttttctgtccgcaggacggcagtctgggtgccggtagcagtgcaatgcgagattattgccccagccaacagaaagcctctcccgctccccctcgccatacgcccgatcagagtccgggaatggagagcaggcaccgctctccctcgggcgctggagaaggcgcttcctgttctgatggtccacggggatcccttgcctgtccatcacctacatgctttagccctcaggaatccccttcaaaagagaccctagaggctcatggggcttctatttccggcacacccgaagctactacgtccggcaaacccgagcccgtgagttctgtaaagaccgagcccaagagctccgacgacaggaaccccatgttcctggagaaaatggatttcaagagcagtaaacaggccgacagcacatccattggcaaagaagacccaggctcttcccggaaggccgaccctatgttcactggtaaagcagaaccagagattttgggcaagggcgatcctgttgctcctggaagaatggaccctatgacagtccgcaaggaagatttaggtagcctgggtaaagtggatcccctatgttcctctaaaacatacaccgtgtcgcccagaaaagaggatccaggatccttgcggaaagttgaccctgtctccagcgacaaagtggacccggtctttcctcggaaagaggagccgaggtattctggaaaggagcacccagtttcatcagagaaggttgcgcctactagtgccgagaaggtggacctagtgctgtcgggtaagagggatcctgggcctagcgggaaggcagatcccatgcccctcgaatccatggacagtgccagcactggcaagacagagcccggacttctgggtaagcttataccaggcagttctggaaaaaacggacctgtttcttcaggtactggcgctcccggttctctgggcagactggatccgacatgtctcggcatggccgaccctgcaagtgtgggcaatgtggaaacggtgcctgctacaaaagaggactcacgcttccttggtaagatggatccagcctcctctggggaagggaggcccgtttcaggccacaccgataccaccgcaagtgctaagactgacctgacttcccttaaaaacgtggacccgatgtccagtggaaaagtagatccagtttccctgggaaaaatggaccccatgtgcagtggcaaacctgaactgctgtctcccggtcaggctgagagggtatccgtggggaaggctgggaccgtgtctccaggcaaggaagaccctgtgtcaagccgtcgtgaagacccaatttccgcgggtagccgcaagaccagtagcgagaaggtgaatcccgagtctagcgggaagaccaatccagtaagcagcggaccaggcgaccctagaagcctggggaccgccggtccgccatcggcagtgaaggctgagcccgctaccggcggaaagggtgatcctttgtccagcgagaaggcaggcctggtggccagtggcaaagctgcccctacagcctcgggcaaagcagagccccttgcagtggggaaagaggaccctgtcagcaaaggtaaagcagatgcgggaccttcggggcagggcgactctgtgtccataggcaaggtagtttccacccctggaaagactgtccctgtccccagcgggaaggtcgatccggtgtcattggggaaagccgaggccattcccgaaggaaaggtggggagcctcccccttgagaaaggctcacccgtcacgacaacaaaagcggatcctagggcttccggaaaggctcagccgcagtccggcggtaaggccgagacaaagctgcccggtcaagagggcgctgctgctcctggggaagcaggagccgtgtgtctcaagaaagagacaccccaggcatccgagaaggtcgaccctggaagttgtcggaaagcagagcctctggccagcggaaagggagagcctgtgtccctgggcaaagcggacagcgcaccgtcccggaaaactgagagccccagcctcggcaaggtggtgcctctatccctagagaagaccaaacctagcagctcctcacgtcagctagaccggaaagccctaggctcggccagatcccctgagggagcacgcggttcagaagggagacaggctagtgccaggcctgtccctcgcgcagctgccgagtgtgcccctgccgctgtgttgctggccggtggcacgcatgggcgagtgatctgcccccactttgtccgcccaagcttccgtccctcccaagccccattcctgatcactggaccttag

SEQ ID NO: 279818 - protein, 124 aa, Artificial Sequence
  derived and/or modified sequence
MAGVSFSGHRLELLAAYEEVIREESAADWALYTYEDGSDDLKLAASGEGGLQELSGHFENQKVMYGFCSVKDSQAALPKYVLINWVGEDVPDARKCACASHVAKVAEFFQGVDVIVNASSVEDI

SEQ ID NO: 279819 - DNA, 1146 bp, Artificial Sequence
  derived and/or modified sequence
atgaagaaaagtgaatccgaggtcgaggaagctgccgccatcatcgcccagaggccagataatccaagggagttctttaagcagcaggaacgggtcgcatctgccagtgccggcagctgcgacgtgccgtcaccttttaatcaccggcctggcagccatctggacagccaccgccggatggcacctactcctatcccgacgcgcagcccgtcggatagtagcaccgctagcaccccagtagccgaacagattgagcgtgcccttgatgaggtgacatcatcccagcctccccccctgccacccccacccccacctgcacaagaaacacaggagccatcccctatactggatagcgaggagactcgggcagctgcaccgcaggcgtgggcaggcccgatggaagaacctccccaagcccaggccccacccagggggcctggaagcccagccgaggacctgatgtttatggaatcagctgagcaggccgtactcgcggctcctgtcgagccggcgacagcagacgccaccgagatccacgacgcggctgatactattgagacagacaccgccaccgctgataccactgtggcgaacaacgtgcctccggccgctacgagcctgatcgatctgtggcccgggaacggcgaaggcgcttcgaccctgcagggagaaccgagagcccccactcctccgtccggaacggaggtgacccttgctgaggtgcccctactggatgaggtcgcacctgaaccccttttacccgccggcgagggatgcgctactctgctgaactttgatgagcttcctgaacctcctgccactttttgtgatccggaagaggtcgagggtgagagtttggcagccccgcagactccgacgcttccctctgctctggaggaactggaacaggaacaggagcctgagccacacctactgacgaacggggaaacaactcaaaaagagggaactcaggctagcgaaggatacttcagccagagccaggaggaggagtttgcacagtccgaagagctttgtgctaaagccccgcctccggttttctataacaaacctcccgaaatcgacataacctgttgggacgccgaccctgtgcccgaagaggaagagggctttgaaggtggagattag

SEQ ID NO: 279820 - DNA, 1146 bp, Artificial Sequence
  derived and/or modified sequence
atgaagaagtctgagagcgaggtggaggaggccgccgccatcatcgcccagaggccagacaacccccgggagttcttcaagcagcaggagcgggtggccagcgccagcgctggcagctgtgatgtgcccagccccttcaaccaccggcccggcagccacctggacagccacaggaggatggcccccacccccatccccaccaggagccccagcgacagcagcacagccagcacccctgtggccgagcagatcgagcgggccctggatgaggtgaccagcagccagcccccacccctgcccccacctcctcctccagcccaggagacccaggagcccagccccatcctggacagcgaggagaccagggctgctgccccccaggcctgggccggccccatggaggagcccccccaggcccaggccccaccccggggccctggcagccctgctgaggacctgatgttcatggagagcgctgagcaggccgtgctggccgcccctgtggagcccgccacagcagatgccacagagatccatgatgctgctgacaccattgaaacagacacagccacagctgacaccaccgtggccaacaacgtgcccccagctgccaccagcctgattgacctgtggccaggaaatggagagggcgccagcaccctgcagggcgagccccgggcccccaccccacccagcggcacagaggtgaccctggccgaggtgcccctgctggatgaggtggcccctgagcccctgctgcctgctggggagggctgtgccaccctgctgaactttgatgagctgcctgagcccccagccaccttctgtgaccctgaggaggtggagggggagagcctggccgccccccagacccccaccctgcccagcgccctggaggagctggagcaggagcaggagcctgagccccacctgctgaccaacggggagaccacccagaaggagggcacccaggccagcgagggctacttcagccagagccaggaggaggagtttgcccagagcgaggagctgtgtgccaaggcccctcctcctgtgttctacaacaagcccccagaaattgacatcacctgctgggatgctgaccctgtgcctgaggaggaggagggctttgaaggaggagactag

SEQ ID NO: 279821 - DNA, 1146 bp, Artificial Sequence
  derived and/or modified sequence
atgaagaagagcgagagcgaggtggaggaggccgccgccatcatcgcccagcggcctgacaatccccgggaattcttcaagcaacaggaacgagtggcatctgcaagcgccggcagctgcgatgtgccaagtccctttaaccacagaccgggcagccaccttgacagtcaccgcagaatggcccccacccccatccccaccagatctccaagtgactcttccactgcatcaacacctgtggccgaacagattgaacgagccctcgatgaagttacgtcgagccaacctcctccactgcctcccccgccccctccggcccaggagacgcaagaacccagccctatactggattccgaggagacccgcgccgccgctccccaggcttgggctgggcccatggaagagcctccacaggctcaagccccccctcgcggcccgggttctcccgccgaagacctgatgttcatggaatctgccgagcaggccgtcttggctgcccctgttgagccagcaaccgcagacgccacagaaatccatgatgccgctgacaccatcgaaacggacacagcgacagccgataccacagtggccaataacgtgcccccagccgctacatccctgatcgatctctggcccgggaatggcgaaggggccagcactcttcagggcgaaccacgggcccccacgccaccttcgggaacagaggtcaccctagcagaggtaccactcctcgatgaggtagcaccagagccactgcttcccgccggggagggatgcgcaacactgttgaattttgacgagcttcctgagccacccgccacattttgtgaccctgaagaggtagaaggggagagcctcgccgccccccagacgcccacactgccgtctgccctcgaagaattagaacaagaacaggaacccgaaccccaccttctgacaaacggcgaaacaacgcagaaggaaggcactcaagcttctgagggctatttctcccagagccaagaggaagagtttgcacagagcgaggagctctgcgcgaaggctcctcctcctgtattttataataaaccaccagagattgacatcacatgctgggacgcagatccagtgcctgaggaggaagaaggtttcgaaggaggtgactag

SEQ ID NO: 279822 - DNA, 1146 bp, Artificial Sequence
  derived and/or modified sequence
atgaaaaagagcgaaagtgaggtcgaggaagctgccgctatcattgcacagcgaccagacaaccccagagaattctttaaacagcaggagcgcgtcgcgtcagccagtgccggttcctgcgatgtgcctagtcctttcaaccatagaccaggaagtcacttagattcacataggcgtatggctccaacccccatcccgactcggtcgccctctgacagtagcacggcaagtacacccgttgctgaacagatcgaacgtgccctggacgaagtgacttcttctcagccaccgccactgccgcctcccccaccccctgcccaggagactcaagaaccaagcccaatcctggattcagaggaaaccagggccgctgctccccaggcttgggccggacctatggaggaaccccctcaggcccaagccccaccgcgtggcccaggcagccctgccgaggacctgatgttcatggagagcgcagagcaggctgtactcgccgctcccgtggaacccgcaaccgccgacgccacagaaattcacgatgccgcagacacgattgagacagacacagccaccgcagataccacagtcgccaacaacgtccctcccgctgcgacttctctaatagatctgtggcccggaaatggcgaaggggcaagtaccttgcagggagagccccgtgctccaacaccccctagcggcacagaagtgacgctcgctgaagtcccactgcttgacgaggtcgctcccgagcctctgcttcccgctggcgaggggtgcgccactctcctcaacttcgacgagctcccggagccccctgcgactttttgtgatcctgaagaggttgaaggcgaatcgctggctgcccctcagaccccaactttacccagcgctctagaggagttggagcaggagcaagaacctgagccacatcttctcacgaatggggagactacacaaaaggagggcacgcaggccagcgaggggtatttttctcagtctcaagaggaggaattcgcccagtccgaggaactctgcgccaaagcccctccaccagtgttctataataaacctccggagatcgacattacgtgctgggatgcagaccccgtgccggaggaggaggaaggctttgaaggcggagactag

SEQ ID NO: 279823 - DNA, 1146 bp, Artificial Sequence
  derived and/or modified sequence
atgaagaagagcgagagcgaggtggaggaggccgccgccatcatcgcccagagacccgacaaccccagagagttcttcaagcagcaggagagagtggccagcgccagcgccggcagctgcgacgtgcccagccccttcaaccacagacccggcagccacctggacagccacagaagaatggcccccacccccatccccaccagaagccccagcgacagcagcaccgccagcacccccgtggccgagcagatcgagagagccctggacgaggtgaccagcagccagcccccccccctgccccccccccccccccccgcccaggagacccaggagcccagccccatcctggacagcgaggagaccagagccgccgccccccaggcctgggccggccccatggaggagcccccccaggcccaggccccccccagaggccccggcagccccgccgaggacctgatgttcatggagagcgccgagcaggccgtgctggccgcccccgtggagcccgccaccgccgacgccaccgagatccacgacgccgccgacaccatcgagaccgacaccgccaccgccgacaccaccgtggccaacaacgtgccccccgccgccaccagcctgatcgacctgtggcccggcaacggcgagggcgccagcaccctgcagggcgagcccagagcccccaccccccccagcggcaccgaggtgaccctggccgaggtgcccctgctggacgaggtggcccccgagcccctgctgcccgccggcgagggctgcgccaccctgctgaacttcgacgagctgcccgagccccccgccaccttctgcgaccccgaggaggtggagggcgagagcctggccgccccccagacccccaccctgcccagcgccctggaggagctggagcaggagcaggagcccgagccccacctgctgaccaacggcgagaccacccagaaggagggcacccaggccagcgagggctacttcagccagagccaggaggaggagttcgcccagagcgaggagctgtgcgccaaggcccccccccccgtgttctacaacaagccccccgagatcgacatcacctgctgggacgccgaccccgtgcccgaggaggaggagggcttcgagggcggcgactag

SEQ ID NO: 279824 - protein, 802 aa, Artificial Sequence
  derived and/or modified sequence
MRLLLALLGVLLSVPGPPVLSLEASEEVELEPCLAPSLEQQEQELTVALGQPVRLCCGRAERGGHWYKEGSRLAPAGRVRGWRGRLEIASFLPEDAGRYLCLARGSMIVLQNLTLITGDSLTSSNDDEDPKSHRDPSNRHSYPQQAPYWTHPQRMEKKLHAVPAGNTVKFRCPAAGNPTPTIRWLKDGQAFHGENRIGGIRLRHQHWSLVMESVVPSDRGTYTCLVENAVGSIRYNYLLDVLERSPHRPILQAGLPANTTAVVGSDVELLCKVYSDAQPHIQWLKHIVINGSSFGADGFPYVQVLKTADINSSEVEVLYLRNVSAEDAGEYTCLAGNSIGLSYQSAWLTVLPEEDPTWTAAAPEARYTDIILYASGSLALAVLLLLAGLYRGQALHGRHPRPPATVQKLSRFPLARQFSLESGSSGKSSSSLVRGVRLSSSGPALLAGLVSLDLPLDPLWEFPRDRLVLGKPLGEGCFGQVVRAEAFGMDPARPDQASTVAVKMLKDNASDKDLADLVSEMEVMKLIGRHKNIINLLGVCTQEGPLYVIVECAAKGNLREFLRARRPPGPDLSPDGPRSSEGPLSFPVLVSCAYQVARGMQYLESRKCIHRDLAARNVLVTEDNVMKIADFGLARGVHHIDYYKKTSNGRLPVKWMAPEALFDRVYTHQSDVWSFGILLWEIFTLGGSPYPGIPVEELFSLLREGHRMDRPPHCPPELYGLMRECWHAAPSQRPTFKQLVEALDKVLLAVSEEYLDLRLTFGPYSPSGGDASSTCSSSDSVFSHDPLPLGSSSFPFGSGVQT

SEQ ID NO: 279825 - protein, 201 aa, Artificial Sequence
  derived and/or modified sequence
MRLLLALLGVLLSVPGPPVLSLEASEEVELEPCLAPSLEQQEQELTVALGQPVRLCCGRAERGGHWYKEGSRLAPAGRVRGWRGRLEIASFLPEDAGRYLCLARGSMIVLQNLTLITGDSLTSSNDDEDPKSHRDPSNRHSYPQQAPYWTHPQRMEKKLHAVPAGNTVKFRCPAAGNPTPTIRWLKDGQAFHGENRIGGIR

SEQ ID NO: 279826 - protein, 87 aa, Artificial Sequence
  derived and/or modified sequence
MRLLLALLGVLLSVPGPPVLSLEASEEVELEPCLAPSLEQQEQELTVALGQPVRLCCGRAERGGHWYKEGSRLAPAGRVRGWRGRLE

SEQ ID NO: 279827 - protein, 108 aa, Artificial Sequence
  derived and/or modified sequence
MRLLLALLGVLLSVPGPPVLSLEASEEVELEPCLAPSLEQQEQELTVALGQPVRLCCGRAERGGHWYKEGSRLAPAGRVRGWRGRLEIASFLPEDAGRYLCLARGSMI

SEQ ID NO: 279828 - protein, 114 aa, Artificial Sequence
  derived and/or modified sequence
MRLLLALLGVLLSVPGPPVLSLEASEEVELEPCLAPSLEQQEQELTVALGQPVRLCCGRAERGGHWYKEGSRLAPAGRVRGWRGRLEIASFLPEDAGRYLCLARGSMIVLQNLT

SEQ ID NO: 279829 - DNA, 2409 bp, Artificial Sequence
  derived and/or modified sequence
atgagactgctgctggccctgctgggcgtgctgctgagcgtgcccggcccccccgtgctgagcctggaggccagcgaggaggtggagctggagccctgcctggcccccagcctggagcagcaggagcaggagctgaccgtggccctgggccagcccgtgagactgtgctgcggcagagccgagagaggcggccactggtacaaggagggcagcagactggcccccgccggcagagtgagaggctggagaggcagactggagatcgccagcttcctgcccgaggacgccggcagatacctgtgcctggccagaggcagcatgatcgtgctgcagaacctgaccctgatcaccggcgacagcctgaccagcagcaacgacgacgaggaccccaagagccacagagaccccagcaacagacacagctacccccagcaggccccctactggacccacccccagagaatggagaagaagctgcacgccgtgcccgccggcaacaccgtgaagttcagatgccccgccgccggcaaccccacccccaccatcagatggctgaaggacggccaggccttccacggcgagaacagaatcggcggcatcagactgagacaccagcactggagcctggtgatggagagcgtggtgcccagcgacagaggcacctacacctgcctggtggagaacgccgtgggcagcatcagatacaactacctgctggacgtgctggagagaagcccccacagacccatcctgcaggccggcctgcccgccaacaccaccgccgtggtgggcagcgacgtggagctgctgtgcaaggtgtacagcgacgcccagccccacatccagtggctgaagcacatcgtgatcaacggcagcagcttcggcgccgacggcttcccctacgtgcaggtgctgaagaccgccgacatcaacagcagcgaggtggaggtgctgtacctgagaaacgtgagcgccgaggacgccggcgagtacacctgcctggccggcaacagcatcggcctgagctaccagagcgcctggctgaccgtgctgcccgaggaggaccccacctggaccgccgccgcccccgaggccagatacaccgacatcatcctgtacgccagcggcagcctggccctggccgtgctgctgctgctggccggcctgtacagaggccaggccctgcacggcagacaccccagaccccccgccaccgtgcagaagctgagcagattccccctggccagacagttcagcctggagagcggcagcagcggcaagagcagcagcagcctggtgagaggcgtgagactgagcagcagcggccccgccctgctggccggcctggtgagcctggacctgcccctggaccccctgtgggagttccccagagacagactggtgctgggcaagcccctgggcgagggctgcttcggccaggtggtgagagccgaggccttcggcatggaccccgccagacccgaccaggccagcaccgtggccgtgaagatgctgaaggacaacgccagcgacaaggacctggccgacctggtgagcgagatggaggtgatgaagctgatcggcagacacaagaacatcatcaacctgctgggcgtgtgcacccaggagggccccctgtacgtgatcgtggagtgcgccgccaagggcaacctgagagagttcctgagagccagaagaccccccggccccgacctgagccccgacggccccagaagcagcgagggccccctgagcttccccgtgctggtgagctgcgcctaccaggtggccagaggcatgcagtacctggagagcagaaagtgcatccacagagacctggccgccagaaacgtgctggtgaccgaggacaacgtgatgaagatcgccgacttcggcctggccagaggcgtgcaccacatcgactactacaagaagaccagcaacggcagactgcccgtgaagtggatggcccccgaggccctgttcgacagagtgtacacccaccagagcgacgtgtggagcttcggcatcctgctgtgggagatcttcaccctgggcggcagcccctaccccggcatccccgtggaggagctgttcagcctgctgagagagggccacagaatggacagacccccccactgcccccccgagctgtacggcctgatgagagagtgctggcacgccgcccccagccagagacccaccttcaagcagctggtggaggccctggacaaggtgctgctggccgtgagcgaggagtacctggacctgagactgaccttcggcccctacagccccagcggcggcgacgccagcagcacctgcagcagcagcgacagcgtgttcagccacgaccccctgcccctgggcagcagcagcttccccttcggcagcggcgtgcagacctag

SEQ ID NO: 279830 - DNA, 2409 bp, Artificial Sequence
  derived and/or modified sequence
atgcgccttttactggccctgcttggagtgttgctctccgtccctggcccccccgtcctgagcctggaggcaagtgaagaggtcgaactcgagccttgtctggccccatctctggagcaacaggagcaggagctgaccgttgcacttggtcagcctgtgcggctgtgctgtggcagggccgaaagaggcgggcattggtataaggaaggatcccggttggcaccagcaggtcgcgttcgtggctggcgtggccggttggagatcgcttcattcttgcctgaggatgcgggccggtacctgtgtctcgcccggggatcgatgatcgtcttgcagaatctcacactgattactggcgacagccttaccagttcaaatgacgatgaagatccgaagagccatagggatccatccaatcgacactcctacccccagcaggcaccatactggactcatccacagcgtatggagaaaaaactgcacgcagtacctgctggcaacaccgtgaaattccggtgccctgcagctgggaacccgaccccgaccatcagatggctgaaagacggacaggcctttcatggcgaaaaccgaattggtggtattaggctaagacaccagcattggtccctggtgatggaatctgtggtgccttcagatcgtgggacatacacttgtctggttgagaatgctgtgggatctattcggtataattacctgttagacgtactggagcggtctcctcatagacccatattacaagctggactgcccgccaacacaactgcggtagttggttctgatgtggaactgttgtgtaaggtgtacagtgacgctcagcctcatattcagtggctaaaacacatcgtcatcaacggtagttccttcggggccgatggcttcccctatgtgcaggtcttaaaaaccgcagatattaactcttctgaggtcgaggtgttatatctgcggaacgtgagcgcggaagatgccggggagtacacatgtttggccggcaattcaattggactcagttaccagagcgcttggctcacggtgttgccggaagaggatcccacttggactgccgcggcccctgaagcccggtatacagacattatcttgtacgcctcggggagcctggcccttgccgtacttcttctcctcgccgggctgtatcgcggccaggcattacacggccgacatccacgaccgccagcaaccgtgcagaaactgagccgctttccattggcacgtcagttcagtctggagtcaggaagcagtgggaaaagctcgtccagtctggttcgtggagtgcgtctctcctcctctggccccgcgttactagccgggctggtcagtctggacctgcccttagaccccctttgggagttcccacgggaccgcctcgtactgggaaagcctctgggagaagggtgttttgggcaggtcgtgagggcagaagcctttggcatggacccagcccgacctgatcaggcatctacagtagcagttaagatgttgaaagacaatgcctccgataaagatctagccgatctggtgagcgagatggaggttatgaagctcattggcaggcataaaaatatcataaacctgctaggcgtgtgcacccaggaagggcctctgtacgtcattgttgagtgtgcagcaaaaggcaaccttcgggaatttctgagggcacggcgtcccccaggccccgacctgtcgcctgacggccccagatcgtccgagggaccgctgtcttttcctgtactagtatcatgtgcctatcaagtagcgaggggtatgcagtaccttgaatccaggaaatgtatacatcgagatctcgctgcccgtaatgtgctcgttaccgaagataatgttatgaaaatcgccgattttggattggcgcggggcgtgcaccacatcgactattataagaagacaagtaatggacggcttcctgttaagtggatggcacctgaggctttattcgacagggtttacacccaccagagtgacgtgtggtcgtttggcattctcctttgggagatcttcactctgggtggctccccatacccagggattcccgtggaggagctgtttagcttgctccgggagggccaccggatggatcgccctccacattgtccccctgaactctacggactgatgcgcgagtgttggcacgccgctccaagccagcgccccacctttaagcagctggtggaggcattggacaaggtgttgctcgctgtgtctgaagaatacctagatctgcgtctgaccttcggcccctatagccccagcgggggggacgcttcttccacatgctctagctccgacagcgttttttcgcatgatccattgcctttggggagctcctctttcccgttcggctccggagtccagacgtag

SEQ ID NO: 279831 - DNA, 2409 bp, Artificial Sequence
  derived and/or modified sequence
atgaggttattgctcgcactgctgggcgtactgctttcagtccctggccctccggttctctccctggaggccagcgaggaagtggagttagagccttgcctcgcacccagtctggaacaacaggagcaggaacttaccgttgcgttgggacaacctgtccggctgtgttgtggcagggccgagagggggggccattggtacaaggaaggctctagactggctccggcagggcgtgtgagaggttggaggggaagactcgaaatagcgtcatttttgcctgaggacgccggtcggtacctatgtctggcccgtgggagcatgatagtcctacaaaacctcaccttaataaccggtgactcactgaccagctccaacgacgacgaagatcccaaatctcatcgagaccccagcaatcgtcacagctaccctcagcaggctccttactggacacacccacagcgaatggaaaaaaagctgcacgcggtaccagcaggcaatactgttaagttccgctgtccagcagcaggaaatccaacccctaccatcaggtggctgaaggatggccaagcattccacggagaaaaccgcatcgggggtataagattaagacaccaacactggtccctggtcatggagagtgtcgtgccgtccgacaggggaacctacacttgcctcgtcgagaatgccgtgggcagcatccggtacaattatctgttggacgtactggagcgttctcctcaccgccctatcctgcaggccgggctcccagccaatacaaccgctgtggtcgggtccgatgtggagctgttgtgcaaagtatacagcgacgcccaacctcatattcaatggttgaaacatatcgttatcaatggttcatcctttggcgctgatggcttcccctacgtgcaggttctaaaaacagccgacatcaactctagtgaagtggaagtgctttaccttagaaatgtgtctgctgaggatgccggcgaatatacatgcctggcaggcaatagcatcgggctaagctatcaatccgcttggttgacagttttacccgaagaagaccctacatggaccgcagcagcccctgaagcacgatatacggacatcattctgtacgcctctggctctcttgccctggccgtccttctgctcttggccggcctgtaccgcggacaggccctgcacggccgacacccacgaccccccgcaacagtccagaagttgagcaggtttcccttagctcgccagttcagcctggaatccggatcatccggcaagtcatctagctcattagttcggggagttaggctgagcagctctggccccgcccttttagccggtctggtgtccctcgacttaccccttgatcctctttgggagtttccccgggatagactcgtgctcgggaagccactgggagaggggtgttttggccaggtcgtccgggccgaggcctttggcatggatcctgcccggcctgatcaggcctccactgtggccgtaaagatgctgaaggataatgcctcagacaaagatcttgcagacctggtgtctgaaatggaagtgatgaagcttattggacgtcacaagaacatcattaacttattgggtgtctgtacacaagagggacctctgtacgttattgtggagtgtgcggcaaagggcaatctgcgcgagtttctacgcgcccggagaccccccggacccgacctgagcccagatggaccacgcagcagtgaggggcccttgtcttttcccgttctggtaagttgtgcatatcaagtggcaaggggaatgcagtacctcgagtctaggaaatgcatccatcgggatctggccgctcgcaacgtactggtgacagaggataacgttatgaaaattgcagacttcggcctggcacgtggcgtgcaccacatcgactattataagaaaacttctaacgggagactgcccgtaaaatggatggcaccagaagccctgttcgatagagtgtacacccatcagtccgacgtatggagctttggaatcttgctgtgggaaatattcactctgggcggcagcccctatcccggcataccggtggaggagcttttctcactgctgagggaggggcacagaatggataggcctccacattgccccccagagctttacggtttgatgcgcgaatgttggcatgccgccccctcacagaggcctaccttcaaacagctggtggaagccctggataaagttctgcttgcagtcagtgaagagtacttggacctccgtctgacatttgggccttactcgccctccggcggtgatgcaagttcaacctgcagctcaagcgattcagtgttttcacatgatcccttgccactgggcagctcttccttcccatttggctcaggagtgcagacttag

SEQ ID NO: 279832 - DNA, 2409 bp, Artificial Sequence
  derived and/or modified sequence
atgaggctgctgctggccctgctgggcgtgctgctgtctgtgcccggcccccctgtgctgagcctggaggccagcgaggaggtggagctggagccctgcctggcccccagcctggagcagcaggagcaggagctgactgtggccctgggccagcctgtgcggctgtgctgcggccgggcagagcggggcggccactggtacaaggagggcagccggctggccccagctggccgggtgcggggctggaggggccgcctggagatcgccagcttcctgcctgaagatgctggccgctacctgtgcctggcccggggctccatgattgtgctgcagaacctgaccctcatcactggagacagcctgaccagcagcaatgatgatgaggaccccaagagccaccgggaccccagcaacagacacagctacccccagcaggccccctactggacccacccccagaggatggagaagaagctgcatgctgtgcctgctggcaacacagtgaagttccgctgcccagctgctggcaaccccacccccaccatccgctggctgaaggatggccaggccttccacggggagaacagaattggaggcatccggctgcggcaccagcactggagcctggtgatggagagcgtggtgcccagcgaccggggcacctacacctgcctggtggagaatgctgtgggcagcatccgctacaactacctgctggatgtgctggagaggagcccccaccggcccatcctgcaggccggcctgcctgccaacaccacagctgtggtgggcagtgatgtggagctgctgtgcaaggtgtacagtgatgcccagccccacatccagtggctgaagcacatcgtcatcaatggcagcagctttggagcagatggcttcccctacgtgcaggtgctgaagacagctgacatcaacagcagcgaggtggaggtgctgtacctgagaaatgtgtctgcagaagatgctggggagtacacctgcctggccggcaacagcatcggcctgagctaccagagcgcctggctgactgtgctgcctgaggaggaccccacctggacagctgctgcccctgaggcccgctacacagacatcatcctgtatgccagcggcagcctggccctggccgtgctgctgctgctggccggcctgtaccggggccaggccctgcacggccgccacccccggcccccagccaccgtgcagaagctgagccgcttccccctggcccggcagttcagcctggagagcggcagcagcggcaagagcagcagcagcctggtgcggggcgtgcggctgagcagcagcggccctgccctgctggccggcctggtgtccctggacctgcccctggaccccctgtgggagttcccccgggaccggctggtgctgggcaagcccctgggggagggctgcttcggccaggtggtgcgggcagaggccttcggcatggaccctgcccggccagaccaggccagcacagtggccgtgaagatgctgaaggacaatgccagtgacaaggacctggccgacctggtgtctgagatggaggtgatgaagctgattggccgccacaagaacatcatcaacctgctgggcgtgtgcacccaggagggccccctgtatgtgattgtggagtgtgccgccaagggcaacctgcgggagttcctgcgggcccggcggcccccaggccctgacctgagcccagatggccccaggagcagcgagggccccctgtccttccctgtgctggtgtcctgtgcctaccaggtggcccggggcatgcagtacctggagagcaggaagtgcatccaccgggacctggccgccagaaatgtgctggtgacagaggacaacgtgatgaagattgctgactttggcctggcccggggcgtgcaccacatcgactactacaagaagaccagcaatggccgcctgcctgtgaagtggatggcccctgaggccctgtttgacagagtgtacacccaccagagtgatgtgtggagctttggcatcctgctgtgggagatcttcaccctgggcggcagcccctacccaggcatccctgtggaggagctgttcagcctgctgcgggagggccacaggatggacaggcctccccactgccccccagagctgtatggcctgatgagggagtgctggcacgccgcccccagccagaggcccaccttcaagcagctggtggaggccctggacaaggtgctgctggccgtgtctgaggagtacctggacctgcggctgaccttcggcccctacagccccagcggaggagatgccagcagcacctgcagcagcagtgacagcgtcttcagccatgaccccctgcccctgggcagcagcagcttccccttcggcagcggcgtgcagacctag

SEQ ID NO: 279833 - DNA, 2409 bp, Artificial Sequence
  derived and/or modified sequence
atgcggctgctgctggccctgctgggcgtgctgctgagcgtgcccggtccacccgtgttgagtcttgaagcttctgaggaagtagagctggagccctgcctggcgccaagcctggaacaacaggaacaggaacttactgttgcccttggccagcccgtgcgcttatgttgcggaagagccgaacgaggcggacattggtataaagagggctctaggttggcccctgccgggcgtgtgaggggctggcgtggaagactcgaaatcgcttcctttctgccagaggacgctggcagatacctgtgcctggcgagaggatcaatgatcgtcctgcagaacctgacgctgattactggggactccctaacatctagcaatgacgatgaagacccgaaaagccaccgcgacccaagcaataggcattcctacccgcagcaagctccatactggactcacccacagaggatggagaagaagctgcatgctgtgccagcggggaacactgttaagttcagatgccccgccgctggtaaccccactcctaccatccgctggctgaaagacggtcaggccttccatggggagaacaggatcggcggaatacggttacggcaccagcattggagcctcgtgatggaaagtgtggttcccagtgatcggggtacctacacatgcctcgttgaaaacgcagtgggaagtattaggtacaactatctcctcgacgtgctggagcgctctccacacaggcctatactgcaagcaggcttgcctgcgaatactacagctgtggtcggtagcgatgttgagcttctgtgtaaggtctatagtgacgcccaaccccacattcagtggctgaagcatattgtcatcaacggtagttcttttggggcagatggttttccatatgtgcaggtgcttaaaactgctgatatcaattccagtgaggttgaagtactatacctccgcaatgtatcggctgaggacgccggtgagtacacctgcttggctggaaattctattgggctatcttaccaatcagcatggctcaccgtacttccagaagaagatccgacttggaccgcagctgccccggaggccaggtatacagatattatcctctacgcgtcgggtagcctcgccttagcagtgctcctcctgttagcaggtttgtatcggggacaagcactgcacggtaggcacccgagaccacctgcaaccgttcaaaagctgtctcgcttcccgttggccaggcagttctcgctggaatctggtagctctggcaagtccagttcttccctggttcgcggcgtgcggctgtcaagtagtgggcccgccctgttagcaggcctggtctctcttgatctcccactggatcccctgtgggagttccctagagataggctcgtattgggcaagccattgggcgaaggctgcttcgggcaggttgtgagagcggaagcttttggcatggacccagcccggcccgaccaggccagtacagttgccgtaaagatgctcaaagacaacgcatctgacaaggacctggccgacctggtctcggagatggaggtaatgaaactgatcggacgccacaaaaacatcatcaacctgctgggggtgtgtacgcaggagggaccattgtacgtaattgtcgagtgtgccgcaaaaggtaatttgagggagtttctgagggcccgccgcccacccggtcctgacctgtctcctgacggtccaagaagtagcgaggggcccctgagttttcctgtgctggtcagctgtgcgtaccaggtggcgcgaggcatgcagtacttggagtctcgtaaatgcatccatcgcgatctggccgcccgcaatgtcctggttaccgaggacaatgttatgaagatcgcggatttcgggcttgcaaggggcgttcaccatatagactactataagaagacatccaacggcaggcttcccgtgaagtggatggcacctgaagctctattcgatcgggtctatacacaccaatctgatgtgtggtcatttggaatcctgttatgggaaattttcactctgggtgggtccccctatcccggcatccctgttgaagaattattcagcctcctgagggagggccacagaatggatagacctccacactgtccgcctgagttgtacggcttgatgagagagtgttggcacgccgcccccagccagaggccaactttcaagcagctggttgaagccttggataaagttttgttagccgtgtccgaggaatacctagaccttcgtttaacgtttggaccctattctcctagcgggggagacgcatcttccacatgttcttcctctgactcagtattttcccacgatccactgcccctgggctcgagcagctttccatttggcagcggtgtccagacttag

SEQ ID NO: 279834 - DNA, 2409 bp, Artificial Sequence
  derived and/or modified sequence
atgcggctgctgctggccctgctgggcgtgctgctgagcgtgcccggccctcctgtgctcagtctcgaggctagcgaggaggtagagctggagccttgtttggcaccttctctggagcagcaggagcaagagcttaccgtggccttgggccagcctgtgagactgtgctgtggaagggcagaacgtggcggccactggtataaggaaggctcacggctcgcaccagctggaagagtgcgcgggtggcgagggcggttagagatcgcatcattcctgcccgaggatgcgggtagatacctttgcctggccagaggctccatgattgttctgcagaatcttactctgataactggcgactcgttgaccagtagcaatgacgacgaagatccgaagtctcatcgggatccttccaataggcactcctatccccaacaagccccctactggacgcacccacaacggatggagaaaaagctacatgcagtccctgccgggaacactgttaaattccgatgtcccgccgctggtaatccaacacccaccatcagatggttgaaggatggccaggccttccacggcgagaacagaattgggggcatccgcctgcggcaccaacattggtcccttgtaatggagtcagtcgtaccaagcgatcgtgggacatatacatgccttgtggagaacgcggttggtagcatacgctataactacctgttagacgtattggagcggagcccccaccgtccaatcctacaggcgggtctgccggctaataccactgcagtggtcggtagcgacgttgagctgctttgcaaggtctattcagatgcacagccgcacatccaatggctcaagcacatcgttattaatggaagctcgtttggtgccgacggctttccttatgtccaagttttaaagaccgcagacattaacagttcagaagttgaagtcctctaccttagaaatgtcagcgccgaggacgccggcgaatacacatgcttggccggaaattcaatcggacttagctatcagagtgcatggctgaccgtgctgcctgaggaggatcccacatggacagccgccgcccctgaagcacgatatacagatatcattctttacgccagcggttctcttgctctcgccgtactactgctgttggccggtctgtatcgcggccaggctttgcacggacgacatccccgaccgcctgctacagtgcagaaactgtctcgattccctttagcccgacagtttagcctggagtccgggtctagcgggaagagttcaagctccctggtgagaggtgtgcggctctcatcctccggccccgcgcttctggcaggtctggtgtcgctggatctgccgctcgaccctctttgggagtttccacgagacaggctcgtgcttgggaagccgctgggcgaaggctgctttggtcaggtggtgagagcagaggcgttcggcatggatccagcgcgccccgaccaggcctctacggtggcagttaagatgttaaaggataacgcatctgacaaggacttagctgatctcgtaagcgaaatggaagtgatgaagcttatcgggcgtcataaaaatataatcaatctcttgggagtatgtactcaagaagggccattgtacgtgatcgtggagtgtgcagctaagggcaacctcagagagtttctccgcgcaaggcgccctcccgggccggatctctctccagatggaccccggtcatccgaaggaccactgtcctttcccgtacttgtgagttgtgcctatcaggtggcaaggggtatgcagtacctcgaatcccggaagtgtattcatcgggatctcgcagctcgcaatgtgctcgtaacagaagacaatgtaatgaagatcgccgatttcggcctggcacggggcgtccaccacattgattactataaaaagacgtcaaacggcaggctgccagtgaagtggatggctcccgaggcactgtttgaccgcgtgtatacacaccagtcagatgtatggagttttggtattttgttgtgggagattttcaccctggggggatccccctaccccggcattccagtggaggagctgttttctctgctgagagaaggacatcgcatggataggccaccacactgcccccctgagctttatggcctcatgagggaatgctggcacgctgcccccagccagcggcccactttcaaacaactggtcgaagcgctagataaggtgctccttgcagtgagtgaagaatacctggacctcagactgacatttggaccttatagtccgagtggtggtgacgcctcttcaacttgttccagcagtgattcagtgtttagccacgaccccttgccgctcggatccagctcattcccgttcggcagtggcgtgcagacatag

SEQ ID NO: 279835 - DNA, 2409 bp, Artificial Sequence
  derived and/or modified sequence
atgcgactcctgctagctctgctcggagtcctgctctccgtgcccggtcccccagttctttctctggaagcatcagaggaagtagagcttgaaccttgcctggccccatctcttgaacaacaggagcaggagctgaccgttgctttaggacagccagttagattatgctgcggcagagccgagcggggagggcattggtacaaagagggctcgagattggctccagccggacgcgtccggggatggagaggtaggctagagatcgctagtttcctgcctgaggacgccggtcgctatctgtgtctagctagagggagtatgatcgtgttgcagaatttaaccctcatcacaggcgactcactgacttcttcaaatgatgatgaggaccctaaaagtcatcgggatccatccaacagacacagctacccacagcaggctccatactggactcaccctcagcggatggagaagaagctacacgctgtgccagccggaaatacagttaagtttaggtgcccagccgcaggaaaccctacacctaccatcaggtggcttaaagacggacaggccttccatggggagaacagaatcggcggaattaggctgcgccatcagcattggtcactggtgatggaatctgtggtaccctcagaccgaggtacatacacttgcctcgtggagaacgcggtgggatccatccgctataactatttgttggacgtgttagagagaagtccgcataggcccatcctgcaagctggtctgccggctaacacaacagccgtggttggcagcgatgtagagctgctttgcaaggtctactccgacgcccagccacacatacagtggctgaagcacatcgtgataaacggatcgtcctttggagccgacggcttcccatacgtgcaagtcctaaagaccgccgacattaacagcagcgaagtcgaggtgctgtatctgagaaacgtgtccgctgaggacgcgggagagtatacatgcctggcagggaactctattgggctgtcttaccagtctgcctggctaaccgtgctgcccgaagaagaccctacatggacagcagcagccccagaggcccgttacactgacattatcctgtacgcctctggtagcctggcccttgcggtgcttcttcttctcgccggattataccgaggacaagcactacacggacgtcacccgagacccccagctacagtccagaagctgtcgaggttcccactcgcccgacaatttagcctcgaaagcggtagctccggtaagagtagctcttcattggtccgcggagtccgccttagctcctcaggccctgctctgctcgctgggctggtctcacttgacctgcccctcgacccattgtgggagtttcctcgagatcgactggtcctgggcaaacctctcggtgaggggtgcttcggtcaagtggtgagagccgaagctttcggaatggaccccgcacggcctgaccaggcctccaccgttgcagtgaaaatgttgaaggacaatgcttctgacaaggatctggccgatctagtcagcgagatggaggtgatgaagctgattggcaggcacaagaacatcattaacttactgggcgtatgcacccaagaaggcccactgtatgttatcgtagagtgcgcagcaaaggggaaccttcgtgagtttcttagagcacggaggccacccggtcctgacctgtcccccgacggcccacgctcttctgagggtcccctgtctttccccgtacttgtaagctgtgcttatcaagtggcacggggaatgcaatacctcgagagccgtaagtgcattcatcgggatttggctgcacggaatgttttagttacggaggataatgtgatgaaaattgccgattttggcttggccagaggcgtgcaccatatcgattattataagaagactagcaacgggagactgcccgtcaaatggatggcccctgaggcgttatttgatagagtctatacccaccaatccgatgtgtggtcctttgggatactactttgggagatcttcacgttaggcggatcgccctatccaggaataccagtagaggaattattcagcctgctcagggaaggccatcgcatggaccgcccacctcactgtcctcccgagctgtacgggcttatgagagaatgctggcacgccgctccatctcagaggcccaccttcaaacaactggtggaagctttggataaggtgctgctggccgtgtcagaagaatatctggaccttcgcctgacttttggtccctacagcccctcaggaggcgatgccagctctacctgctcatctagtgatagtgtgttttcccatgaccccctgccactgggatcctcatcatttccattcgggtccggcgtgcagacatag

SEQ ID NO: 279836 - DNA, 2409 bp, Artificial Sequence
  derived and/or modified sequence
atgcgcctgttactcgccctcctaggcgtgttactgagtgtaccaggcccacccgtcctgtccttggaggcatctgaagaagtggagcttgagccctgcctggccccttccctggaacaacaggagcaagagctcaccgtggcgctgggacagcctgtgcgtttgtgctgtggacgagcggagaggggaggacactggtacaaggaggggagcaggttggctcccgctggccgagtgcgcggttggcggggtcgcctagaaatcgcgagttttttacctgaagacgcgggtcgctatctgtgtctggcacgaggttcaatgattgtgcttcagaacctcacgttgattacaggtgactctctgacctcctctaatgacgacgaggatccgaaaagtcatcgcgatccgagcaatcgtcattcctacccacagcaagccccttattggacccaccctcagagaatggaaaagaagctccatgctgtgccagccggtaatactgttaaatttagatgccccgcagcagggaaccccacaccaacaatcagatggctgaaagacggtcaagcatttcatggcgagaatcggatcggcggtattcggctgaggcatcagcactggtccctggtgatggaaagcgtggtgcctagtgaccgcggaacatatacctgtcttgtggaaaacgctgtaggcagtattcggtataattacctcctggacgtgctggaaaggagcccacatcgccctattctgcaggcgggtcttcctgcaaataccacagcggtcgtcggatctgatgtggaactgttgtgcaaggtctacagcgacgctcaaccccacatccagtggctgaagcatatcgtgatcaacggatcaagttttggcgctgatggattcccatatgtgcaggtcctgaaaacggcagatattaattcttctgaggttgaggtcctctaccttcggaacgtgtctgctgaagacgctggagagtacacatgcctggccggaaattcgattggtctgtcttatcaaagcgcatggctcacagtgctccctgaagaggatccgacatggacagcagctgcgcctgaagcaagatacaccgatattatcctctacgcttctggctctctggccttggcggtgttattgttactggcaggtctatacaggggacaggcactccatggtcgccatccaaggcctccggctacagttcagaaactaagtcgctttcctcttgcccgacagttctctttggagtctgggtccagtggaaaaagttcttcatctctcgtgagaggcgttaggctgtctagcagcggtcctgccctgctggcagggcttgtgagcttggacctacctctggaccctctatgggagttcccacgtgatagattggtcctgggtaagccactgggtgagggctgtttcggccaggtggtgcgggctgaagccttcggcatggaccctgccaggcccgaccaggcgtcaacagttgcagtcaaaatgctcaaggacaacgcctccgacaaggacctggccgatttagtcagtgaaatggaggtcatgaagctcattgggaggcataaaaatatcattaacctgttaggtgtttgtacgcaggaagggcctctttatgttatcgttgagtgcgcagcgaagggtaacctacgcgagttcctcagggccaggagacctccgggtccagacctgagtcccgatggaccacggagctctgagggacctctttctttccccgtgctggtgtcctgcgcctaccaggtggcccgtggcatgcagtacctcgagtcccgcaagtgcatccatcgggatctggcagctaggaacgtgctggtcacagaggacaatgtgatgaaaatcgcggactttggcttggctagaggagtgcatcatatagattattacaaaaaaacttccaatggccgtctgcctgtcaagtggatggcccctgaggcgctgtttgatcgggtctacacacatcaaagcgacgtttggagctttggaatacttctgtgggagatctttactcttggaggaagtccctatcctggtatccccgtagaggagctgttctctttgctgcgagagggccatagaatggacaggccaccacactgcccccctgagctgtatggcctgatgcgcgagtgttggcacgcagctcccagccagagacctactttcaagcagttagtggaagccctggacaaagtgcttctggctgtctctgaagagtacctggatctaagactcacgtttggcccttatagcccttccggcggtgacgcctcatctacctgctcaagctccgattcagtcttttcacacgatcccttacccttaggctctagctcattcccctttggctcaggggttcagacctag

SEQ ID NO: 279837 - DNA, 1056 bp, Artificial Sequence
  derived and/or modified sequence
atgctgcaccccgccacccagcagagccccttcatggtggacctgcacgagcaggtgcaccagggccccgtgcccctgagctacaccgtgaccaccgtgaccacccagggcttccccctgcccaccggccagcacatccccggctgcagcgcccagcagctgcccgcctgcagcgtgatgttcagcggccagcactaccccctgtgctgcctgcccccccccctgatccaggcctgcaccatgcagcagctgcccgtgccctaccaggcctacccccacctgatcagcagcgaccactacatcctgcacccccccccccccgccccccccccccagcccacccacatggcccccctgggccagttcgtgagcctgcagacccagcaccccagaatgcccctgcagagactggacaacgacgtggacctgagaggcgaccagcccagcctgggcagcttcacctacagcaccagcgcccccggccccgccctgagccccagcgtgcccctgcactacctgccccacgaccccctgcaccaggagctgagcttcggcgtgccctacagccacatgatgcccagaagactgagcacccagagatacagactgcagcagcccctgccccccccccccccccccccccccccccccccctactaccccagcttcctgccctacttcctgagcatgctgcccatgagccccaccgccatgggccccaccatcagcctggacctggacgtggacgacgtggagatggagaactacgaggccctgctgaacctggccgagagactgggcgacgccaagcccagaggcctgaccaaggccgacatcgagcagctgcccagctacagattcaaccccgacagccaccagagcgagcagaccctgtgcgtggtgtgcttcagcgacttcgaggccagacagctgctgagagtgctgccctgcaaccacgagttccacaccaagtgcgtggacaagtggctgaaggccaacagaacctgccccatctgcagagccgacgccagcgaggtgcccagagaggccgagtag

SEQ ID NO: 279838 - DNA, 1056 bp, Artificial Sequence
  derived and/or modified sequence
atgctacatcctgccacccagcagagtcccttcatggtcgacctgcatgaacaggtacatcagggccctgtgcctttatcgtacaccgtcactaccgttaccacccaagggtttcctcttccgaccggccagcacatccctggctgtagtgcgcaacagctcccagcttgttccgtgatgttcagtggacagcattatcctctgtgttgtctccccccccctcttatacaagcctgcaccatgcaacaactgcccgttccgtaccaggcgtacccccatctgattagttctgaccactacattctgcatcctcctcctcctgctcctccaccgcaacctactcacatggcacctctaggacagtttgtgagtctacaaacccagcaccctaggatgcctctccagagattggataacgacgtcgacttgaggggtgatcagccgagtcttggaagtttcacatacagtaccagcgcacccgggccggctctctctccgagtgtgccgttacattatctacctcatgaccccctgcaccaggaactatccttcggcgtgccatacagccatatgatgcccaggagactttcaacgcaaagatacagactgcagcagccacttcctcccccacccccgccccctcctccacctccctattacccttccttcctcccgtactttttgagcatgctgccaatgtcacccacagctatgggcccgactatctctctagatctggacgttgacgatgtcgagatggagaattacgaggcacttttgaatctcgccgaacgcctaggagacgcgaagcccagagggctgaccaaggccgacatcgaacagttaccgtcttacagattcaaccccgacagccaccaaagtgagcagacattatgcgtggtgtgcttctctgacttcgaagcgcgtcagcttctgagggttctgccttgcaaccacgaattccacaccaaatgcgttgacaagtggctgaaagcaaatcgcacttgtccaatttgccgagcggacgcgtccgaggtaccccgagaggctgaatag

SEQ ID NO: 279839 - DNA, 1056 bp, Artificial Sequence
  derived and/or modified sequence
atgctgcacccagccacccagcagagccccttcatggtggacctgcacgagcaggtgcaccagggccctgtgcccctgagctacacagtgaccaccgtgaccacccagggcttccccctgcccaccggccagcacatccctggctgcagcgcccagcagctgcctgcctgcagcgtgatgttcagcggccagcactaccccctgtgctgcctgcccccacccctcatccaggcctgcaccatgcagcagctgcctgtgccctaccaggcctacccccacctgatcagcagtgaccactacatcctgcaccccccacctccagcccccccaccccagcccacccacatggcccccctgggccagtttgtgtccctgcagacccagcaccccaggatgcccctgcagaggctggacaatgatgtggacctgcggggggaccagcccagcctgggcagcttcacctacagcaccagcgcccctggccctgccctgagccccagcgtgcccctgcactacctgccccatgaccccctgcaccaggagctgagctttggagtgccctacagccacatgatgccccggcggctgagcacccagcgctaccgcctgcagcagcccctgcccccacctcctcctcctcctcctcctccaccctactaccccagcttcctgccctacttcctgtccatgctgcccatgagccccacagccatgggccccaccatcagcctggacctggatgtggatgatgtggagatggagaactatgaggccctgctgaacctggccgagcggctgggagatgccaagccccggggcctgaccaaggctgacatcgagcagctgcccagctaccgcttcaacccagacagccaccagagcgagcagaccctgtgtgtggtgtgcttcagtgactttgaggcccggcagctgctgcgggtgctgccctgcaaccacgagttccacaccaagtgtgtggacaagtggctgaaggccaacagaacctgccccatctgcagagcagatgccagcgaggtgccccgggaggccgagtag

SEQ ID NO: 279840 - DNA, 1056 bp, Artificial Sequence
  derived and/or modified sequence
atgctgcaccccgccacccagcagagccccttcatggtggacctgcatgaacaggttcatcaagggcccgtcccgctgtcctataccgtgaccacggtgacaacccaggggtttccgttgcccacaggccagcacatccctgggtgtagcgcacagcagctccctgcgtgctccgtgatgttttccgggcaacactacccactgtgctgcctgccccctcctttaatacaggcctgcaccatgcagcaactccccgtgccttaccaggcctacccacacctgatttcaagtgatcactatatccttcatcctccaccccctgcaccacctcctcaacccactcatatggcacccctcggacagtttgtctctctgcagactcaacacccccggatgcccctccagcgtctggataatgatgttgacttgcgcggcgatcagcctagcttgggcagcttcacgtattcaaccagtgctcctggccctgctctgagtcctagcgtgcctctgcattacctgccacatgatcccctgcaccaagagctcagttttggggtgccatacagtcatatgatgccccgacggctctccacacaacgataccgcctgcaacagccactgccgcctccaccccctccgccgcctccaccaccttattacccctcattcttaccatacttcctcagcatgttaccaatgtcccctacagccatgggcccaacaatatctctggacctagacgtggatgacgtagagatggagaactacgaggctcttctcaatttggccgagaggctgggagacgccaaaccacggggactgaccaaagccgatatagagcagctgccaagctacagattcaatcccgactctcaccagtctgaacagacactctgcgtggtgtgtttttctgacttcgaggctcgacagttactgcgcgtgcttccgtgtaatcacgaattccacacaaaatgtgtggacaaatggctaaaagccaaccgtacatgtcctatctgtagagctgatgcaagtgaagtgcctagggaggctgagtag

SEQ ID NO: 279841 - DNA, 1056 bp, Artificial Sequence
  derived and/or modified sequence
atgctgcatccagctacacagcaatctccctttatggtggacctgcatgaacaagtccatcagggccctgtacctttatcatataccgtcaccactgtgacgacacaggggttccctcttccgactgggcaacacatcccagggtgtagcgcccagcagctgcccgcttgcagcgtgatgttctctggccaacactatccactctgctgtctgccaccgccattgatacaagcctgtactatgcagcagctgcccgttccgtaccaggcatatcctcatctgatctcctccgatcactatatactgcacccccctcctcccgctccgccacctcaaccgactcatatggctcctctgggccagttcgtgtccctgcaaactcaacatcctcgaatgccactgcagagactcgataacgacgtcgatctgagaggagaccagccctccctggggagctttacttactctacttctgctcctgggccagccttaagccccagcgtcccacttcattacctcccccacgaccccctccaccaggagctctcttttggcgtgccctactcgcacatgatgcccagaaggctgtcaactcaacgttacaggctgcagcagcccctccccccacctccaccaccccctcccccacccccttactatccgtcatttctcccctacttcctttcaatgctccctatgagtccaacggcgatgggtcctacaatttctctcgatctggacgtggacgatgtggagatggaaaattatgaggctctgctgaatttagcggaaagactgggggatgccaagcctagaggtctgaccaaagccgacatcgagcagctgccgagctataggtttaatccggattcacaccagtcagagcagaccttatgcgtcgtctgtttttctgacttcgaggcccgtcaactcctgagggtgcttccttgcaaccacgaatttcacactaaatgtgtcgacaaatggttgaaagccaaccgcacctgccctatatgccgggcagacgcgtcagaagtccccagggaggccgaatag

SEQ ID NO: 279842 - DNA, 1843 bp, Artificial Sequence
  derived and/or modified sequence
ggaagatgcttgactgctgtcttttctcagactagtctgaaagggaaaacccccattcattctggattggtggatctgaagtacaaaatattttccagaacacttcagttatggaagatcaaaatgaagatgagtccccaaagaaaaatactctttggcagataagtaatggaacatcatctgtgatcgtctccagaaagaggccatcagaaggaaactatcaaaaagaaaaagacttgtgtattaaatattttgaccagtggtctgaatcagatcaagtggaatttgtggaacatcttatttcacgaatgtgtcattatcagcatggacatattaactcttacctgaagcccatgttgcagcgggactttattaccgctttaccagagcaaggcttagatcacatagcagaaaacattctttcgtacctggatgccaggtctctgtgtgcagcagagctggtatgtaaagaatggcagcgagtgatctcagaaggaatgctttggaagaagctgattgaacgaatggtacgcactgatcccctatggaaaggactttcagaaagaagagggtgggatcagtacctgtttaaaaacagacccacagatggccctccaaattcattttataggtcattatacccaaagattatccaggatatagagactatagaatctaactggcggtgtggacgacacaacttgcagaggattcagtgccgctctgaaaatagtaaaggtgtctactgtttacagtacgatgatgaaaaaattatcagtggcctacgagataattctattaagatatgggataaaaccagcctggaatgtttgaaagtgttaacaggacacacaggctctgtcctctgtctgcagtatgatgagcgtgtcattgtaactggctcttcagattctacggtgagagtgtgggatgtgaacacgggtgaagttcttaacacattgatccaccacaatgaggctgtattgcacttacgcttcagcaatggactgatggtgacctgttccaaggaccgctccattgctgtgtgggacatggcttctgcgaccgacatcactttacgccgtgtcctggttggccaccgggctgccgtcaatgtagtagactttgacgacaagtacatcgtgtctgcctctggtgacaggaccatcaaagtctggagcacgagcacctgtgaatttgttcgtactctcaatgggcacaagcggggcattgcctgtctccagtacagggatcgcctggttgttagtggatcatcagataataccattaggctctgggatattgaatgtggtgcctgtttaagagtcctagagggacatgaagaattggtccgatgcatccggtttgataacaagaggattgtcagtggggcctatgatgggaaaattaaagtttgggacttgcaagctgctcttgaccctcgagccccagcaagcacattgtgtttgcgcacattggtggaacattctggacgtgtgtttcggctccagtttgatgagtttcagatcatcagcagctcccatgatgacactattttgatttgggatttcttaaatgtgcctcccagtgcccagaatgagacccgttctccctccagaacatacacttacatctctagataacagtctgcactttcacccgtttcagggttttctagtcttgaactactggctacgtggctaccaaatgcctaagggagttcgttcacagctgagttatgaagctggaattggttctagacgctgggtagatgcaaagcagcctaactcttcaagtaccgacatttctcacctctgattccggctctcctttgagaaggaga

SEQ ID NO: 279843 - protein, 157 aa, Artificial Sequence
  derived and/or modified sequence
MPRRKKKVKEVSESRNLEKKDVETTSSVSVKRKRRLEDAFIVISDSDGEEPKEENGLQKTKTKQSNRAKCLAKRKIAQMTEEEQFALALKMSEQEAREVNSQEEEEEELLRKAIAESLNSCRPSDASATRSRPLATGPSSQSHQEKTTDSGLTEGIW

SEQ ID NO: 279844 - DNA, 270 bp, Artificial Sequence
  derived and/or modified sequence
atgcccagaagaaagaagaaggtgaaggaggtgagcgagagcagaaacctggagaagaaggacgtggagaccaccagcagcgtgagcgtgaagagaaagagaagactggaggacgccttcatcgtgatcagcgacagcgacggcgaggagcccaaggaggagaacggcctgcagaagaccaagaccaagcagagcaacagagccaagtgcctggccaagagaaagatcgcccagatgaccgaggaggagcagttcgccctggccctgtag

SEQ ID NO: 279845 - DNA, 270 bp, Artificial Sequence
  derived and/or modified sequence
atgccgagacgaaagaagaaagttaaggaggtgagcgagagccggaatctagagaagaaggacgtggagactacctctagcgtctcagttaaaagaaaacgtcgactggaagatgcattcatcgtgataagcgatagcgacggcgaggaaccaaaggaagaaaacggattgcagaaaacaaaaacgaagcagagcaaccgtgccaagtgtttggccaaaagaaagatagcccaaatgacagaagaagaacagttcgcactggccctgtag

SEQ ID NO: 279846 - DNA, 270 bp, Artificial Sequence
  derived and/or modified sequence
atgcccaggaggaagaagaaggtgaaggaggtgtctgagagcaggaacctggagaagaaggatgtggagaccaccagctctgtgtctgtgaagaggaagaggcggctggaggatgccttcatcgtcatcagtgacagtgatggagaggagcccaaggaggagaatggcctgcagaagaccaagaccaagcagagcaacagagccaagtgcctggccaagaggaagatcgcccagatgacagaggaggagcagtttgccctggccctgtag

SEQ ID NO: 279847 - DNA, 270 bp, Artificial Sequence
  derived and/or modified sequence
atgccccggcggaagaagaaggtgaaggaggtgagcgagagccggaacctcgagaagaaagatgtcgaaactacttcaagcgtgagtgtgaagaggaagcggcggctggaagatgcctttatcgtgatatcagactcagatggcgaggaacctaaggaggagaatggcctacaaaaaaccaagacaaagcagagcaatagagccaaatgcctggcgaaaagaaagatcgcccaaatgacagaagaagagcagttcgcgctggccttgtag

SEQ ID NO: 279848 - DNA, 270 bp, Artificial Sequence
  derived and/or modified sequence
atgccacggagaaagaagaaggtcaaggaagtctctgagtccagaaatcttgaaaagaaagatgtcgaaaccacctcctcagtctccgttaagcgaaagaggcggctggaggatgcatttatagtgatttcagactcagacggcgaggaacccaaggaagagaatggtctacagaaaactaaaacaaagcaaagcaatagggctaagtgcctggctaaaaggaaaattgcccagatgacagaagaagaacagttcgccctggcgctgtag

SEQ ID NO: 279849 - DNA, 425 bp, Artificial Sequence
  derived and/or modified sequence
aacgtgtggcggctcgcgacccccggcaacccggagaaggtctacagagcggcctgcgccagcgagttgaagaaaaaaaacaacaacctaggatcagtttggggagaattgatatgtttactatgttgaagcttccaacctgtgggcatgacaaaaggatgccacggagaaagaaaaaagttaaagaagtctccgaatctcggaacctggagaagaaggatgtggaaactaccagttctgtcagtgtgaagaggaagcgtagacttgaggatgcattcattgtgatatccgatagtgatggagaggaaccaaaggaggaaaatgggttgcagaaaacgaagacaaaacagtcgaatagagcaaagtgtttggccaaaagaaaaatcgcacagatgacagaagaagaacagtttgctctggctctc

SEQ ID NO: 279850 - protein, 350 aa, Artificial Sequence
  derived and/or modified sequence
MLPLPDLDLWPLDRLPSPIKRKPQTLGSLKSSQGIVEETSEEGNSVPASQSVAALTSKRSLVLMPESSAEEITVCPETQLSSSETFDLEREVSPGSRDILDGVRIIMADKEVGNKEDAEKEVAISTFSSSNQVSCPLCDQCFPPTKIERHAMYCNGLMEEDTEVLTRRQKEAKTKSDSGTAAQTSLDIDKNEKCYLCKSLVPFREYQCHVDSCLQLAKADQGDGPEGSGRACSTVEGKWQQRLKNPKEKGHSEGRLLSFLEQSEHKTSDADIKSSETGAFRVPSPGMEEAGCSREMQSSFTRRDLNESPVKSFVSISEATDCLVDFKKQVTVQPGSRTRTKAGRGRRRKF

SEQ ID NO: 279851 - DNA, 1053 bp, Artificial Sequence
  derived and/or modified sequence
atgctgcccctgcccgacctggacctgtggcccctggacagactgcccagccccatcaagagaaagccccagaccctgggcagcctgaagagcagccagggcatcgtggaggagaccagcgaggagggcaacagcgtgcccgccagccagagcgtggccgccctgaccagcaagagaagcctggtgctgatgcccgagagcagcgccgaggagatcaccgtgtgccccgagacccagctgagcagcagcgagaccttcgacctggagagagaggtgagccccggcagcagagacatcctggacggcgtgagaatcatcatggccgacaaggaggtgggcaacaaggaggacgccgagaaggaggtggccatcagcaccttcagcagcagcaaccaggtgagctgccccctgtgcgaccagtgcttcccccccaccaagatcgagagacacgccatgtactgcaacggcctgatggaggaggacaccgaggtgctgaccagaagacagaaggaggccaagaccaagagcgacagcggcaccgccgcccagaccagcctggacatcgacaagaacgagaagtgctacctgtgcaagagcctggtgcccttcagagagtaccagtgccacgtggacagctgcctgcagctggccaaggccgaccagggcgacggccccgagggcagcggcagagcctgcagcaccgtggagggcaagtggcagcagagactgaagaaccccaaggagaagggccacagcgagggcagactgctgagcttcctggagcagagcgagcacaagaccagcgacgccgacatcaagagcagcgagaccggcgccttcagagtgcccagccccggcatggaggaggccggctgcagcagagagatgcagagcagcttcaccagaagagacctgaacgagagccccgtgaagagcttcgtgagcatcagcgaggccaccgactgcctggtggacttcaagaagcaggtgaccgtgcagcccggcagcagaaccagaaccaaggccggcagaggcagaagaagaaagttctag

SEQ ID NO: 279852 - DNA, 1053 bp, Artificial Sequence
  derived and/or modified sequence
atgctgcctttgcctgacctggacttatggcccctggataggctgcctagccctatcaagcggaagcctcagacacttggttcgttgaagagctcgcagggaatcgttgaggagacatccgaggaggggaatagcgtcccagccagccagagtgtggctgccctcaccagtaaacggagccttgtgcttatgcccgagtcgtccgccgaagaaatcaccgtctgccctgagacccagctttcttcatccgaaacgttcgacttagagagggaggtgtcaccgggtagtcgggatatcttggatggcgtgcgcattattatggctgacaaggaggttggcaataaggaagatgcagaaaaagaggtggcaatctcaacattttctagttctaatcaagtcagctgccccctatgtgatcaatgctttcctccaactaagatcgagagacatgccatgtattgcaatggtctgatggaagaagataccgaggtcctgacgaggagacagaaggaggccaaaactaaaagcgatagcggtactgccgcacagactagcttagatattgacaagaatgagaaatgctacctgtgtaagtctctggtccccttccgggaataccagtgccacgtagattcctgtctgcagctcgccaaagcggatcagggagatggacctgaaggtagcggcagggcatgttctaccgttgagggtaagtggcaacaacgactgaagaacccaaaagaaaagggacactccgaagggagacttctgagcttcctcgaacagagtgagcataaaaccagcgatgcagacatcaaaagttccgagactggtgctttcagagtgccttcgcccggaatggaagaggcgggttgctctcgagaaatgcagagttccttcactaggcgagatctaaacgagtccccagtgaagtccttcgtgtccatcagcgaggccacagattgcctggttgattttaagaagcaagtgacagtgcaacccggaagcaggactcgcactaaagctggaagggggcggcgccgcaaattctag

SEQ ID NO: 279853 - DNA, 1053 bp, Artificial Sequence
  derived and/or modified sequence
atgctgcccctgcctgacctggacctgtggcccctggaccggctgcccagccccatcaagaggaagccccagaccctgggcagcctgaagagcagccagggcatcgtggaggagaccagcgaggagggcaacagcgtgcctgccagccagagcgtggccgccctgaccagcaagaggagcctggtgctgatgcctgagagcagcgctgaggagatcaccgtgtgcccagagacccagctgagcagcagcgagacctttgacctggagcgggaggtgtccccaggcagccgggacatcctggatggagtgcgcatcatcatggctgacaaggaggtgggcaacaaggaggatgctgagaaggaggtggccatcagcaccttcagcagcagcaaccaggtgtcctgccccctgtgtgaccagtgcttcccccccaccaagattgaaagacatgccatgtactgcaatggcctgatggaggaggacacagaggtgctgacccggcggcagaaggaggccaagaccaagagtgacagcggcacagctgcccagaccagcctggacatcgacaagaatgagaagtgctacctgtgcaagagcctggtgcccttccgggagtaccagtgccacgtggacagctgcctgcagctggccaaggctgaccagggagatggccctgagggcagcggccgggcctgcagcacagtggagggcaagtggcagcagaggctgaagaaccccaaggagaagggccacagcgagggccgcctgctgtccttcctggagcagagcgagcacaagaccagtgatgctgacatcaagagcagcgagactggagccttccgggtgcccagccctggcatggaggaggccggctgcagccgggagatgcagagcagcttcacccggcgggacctgaatgaaagccctgtgaagagctttgtgtccatcagcgaggccacagactgcctggtggacttcaagaagcaggtgacagtgcagcccggcagcaggaccaggaccaaggccggccggggcagaagaaggaagttctag

SEQ ID NO: 279854 - DNA, 1053 bp, Artificial Sequence
  derived and/or modified sequence
atgctgcccctgcccgacctggacctgtggcccctggaccggctgccgtctcctattaaaagaaagccacagacactgggctccctcaaatccagtcaaggtatcgtagaagagacctccgaggagggaaacagcgtgccggcctcccagtctgtcgcagcactgacatccaaaagatctttggtcttgatgccggagagttccgcagaagaaatcacagtttgtccggaaacccaattaagctcaagcgagaccttcgatctcgagcgggaagtctcacccggaagtcgagacattttagacggcgttaggattataatggccgacaaggaagtgggcaacaaggaagacgccgagaaagaagtcgccatctcaacctttagcagttcaaatcaagtctcttgtcctctttgcgaccagtgtttcccgcccacaaaaatcgagcggcacgcaatgtattgtaacggcctgatggaggaggataccgaagttctgactagacgccagaaagaagccaagacaaagtcagatagcggaacagccgcacagacctcgctggatattgataaaaatgagaagtgctatttgtgcaagtctcttgtccctttcagggagtatcagtgccatgtggatagctgtctgcagctggcaaaggccgaccaaggggacggaccagaaggatccgggcgagcctgttccacagtcgagggtaagtggcagcagaggctcaagaaccctaaggaaaaagggcacagcgaagggcgtttactcagtttccttgaacagagcgaacataagacgagtgacgctgacatcaaaagctctgaaacaggagcattcagggtgccatctccgggtatggaagaggccgggtgttctagggaaatgcagagctcctttacccgccgagatttaaacgagtcgccagtcaaatcttttgtgagcatctctgaggcaaccgattgtcttgtggatttcaagaagcaggtgactgttcagccaggctctaggaccagaacaaaagccggacgagggagacgccggaagttctag

SEQ ID NO: 279855 - DNA, 1053 bp, Artificial Sequence
  derived and/or modified sequence
atgctcccactccctgatctggacttatggcctctggaccgcctgccctctccgattaagcgcaaacctcaaacactagggtccctcaaatcatcccagggcatcgtggaggaaaccagcgaagaaggaaatagcgtgcccgcttcgcagtcagtagccgcactgacctccaagagaagcttagtgctgatgccagagtcaagcgccgaagagatcactgtgtgcccagaaacacaactcagctcgagcgaaacgttcgatctcgagagagaggtgtcccctgggtccagagatatattagacggagtgcgcatcattatggccgataaagaagtgggcaataaagaagatgccgagaaggaagtggccattagtaccttttcgtcgagcaaccaggtaagttgcccactctgcgaccagtgcttcccgcctacgaagatagagagacatgctatgtattgtaacggacttatggaagaggacaccgaagttttgacgcgaaggcaaaaggaagccaagacaaagagcgacagcggaaccgcagcacagaccagcttggatatcgacaaaaatgaaaaatgttacttgtgtaaatctctcgtccctttccgggagtaccagtgtcacgttgatagctgcctgcagcttgcaaaagcggatcagggggacgggcctgagggcagtggccgtgcatgtagcactgtggaggggaaatggcaacaaagactcaagaaccccaaagagaaggggcactctgaagggagattactctctttcctggagcagtctgagcataaaacgagcgatgcagatatcaagagctcagagaccggcgcatttagagtgccctcgccaggcatggaagaggcaggatgcagccgcgagatgcaaagttccttcactagaagagacctcaatgagagtcccgtgaaatcctttgtgtccatatccgaggctacagattgcctggtcgacttcaaaaagcaggtgactgttcagcccggatccaggacccgaacaaaggcaggcagggggagacggaggaagttttag

SEQ ID NO: 279856 - DNA, 1752 bp, Artificial Sequence
  derived and/or modified sequence
cggacgcgcgcgcccctccccctccccccgcgctcccaacgtgtggcggctcgcgacccccggcaacccggagaaggtctacagagcggcctgcgccagcgaacaaaaggatgccacggagaaagaaaaaagttaaagaagtctccgaatctcggaacctggagaagaaggatgtggaaactaccagttctgtcagtgtgaagaggaagcgtagacttgaggatgcattcattgtgatatccgatagtgatggagaggaaccaaaggaggaaaatgggttgcagaaaacgaagacaaaacagtcgaatagagcaaagtgtttggccaaaagaaaaatcgcacagatgacagaagaagaacagtttgctctggctctcaaaatgagtgagcaggaagctagggaggtgaacagccaggaggaggaagaagaggagctcttgaggaaagccattgctgaaagcctgaatagttgccggccttctgatgcttccgctaccagatctcgacctctggccactggaccgtcttcccagtcccatcaagagaaaaccacagactctgggctcactgaagtcttcccaagggattgttgaagaaacttctgaagagggaaactctgtacctgcttcacaaagtgttgctgctttgaccagtaagagaagcttagtccttatgccagagagttctgcagaagaaatcactgtttgtcctgagacccagctaagttcctctgaaacttttgaccttgaaagagaagtctctccaggtagcagagatatcttggatggagtcagaataataatggcagataaggaggttggtaacaaggaagatgctgagaaggaagtagctatttctaccttctcatccagtaaccaggtatcctgcccgctatgtgaccaatgctttccacccacaaagattgaacgacatgccatgtactgcaatggtctgatggaggaagatacagaagtattgactcggagacaaaaagaggccaagaccaagagtgacagtgggacagctgcccagacttctctagacattgacaagaatgagaagtgttacctctgtaaatccctggtcccatttagagagtatcagtgtcatgtggactcctgtctccagcttgcaaaggctgaccaaggagatggacctgaagggagtggaagagcatgttcaactgtggaggggaagtggcagcagaggctgaagaacccaaaggaaaaaggccacagtgaaggccgactccttagtttcttggaacagtctgagcacaagacttcagatgcagacatcaagtcttcagaaacaggagccttcagggtgccttcaccagggatggaagaggcaggctgcagcagagagatgcagagttctttcacacgtcgtgacttaaatgaatctcccgtcaagtcttttgtttccatttcagaagccacagattgcttagtggactttaaaaagcaagttactgtccagccaggtagtcggacacggaccaaagctggcagaggaagaaggagaaaattctgaatttctagggtccaaaagttgacaaaaccattagtaggaggggtgggccatgttcattaagccatagtggtccctagttcattgttgagcaagttttagccctgcagttttcaccaccagcacctacccagcattctggtttttatgttttttatgatctatgcagacaactgtgtattctgttttataacagtttgtttgaatttacttacagtt

SEQ ID NO: 279857 - protein, 2427 aa, Artificial Sequence
  derived and/or modified sequence
MPLKTRTALSDDPDSSTSTLGNMLELPGTSSSSTSQELPFCQPKKKSTPLKYEVGDLIWAKFKRRPWWPCRICSDPLINTHSKMKVSNRRPYRQYYVEAFGDPSERAWVAGKAIVMFEGRHQFEELPVLRRRGKQKEKGYRHKVPQKILSKWEASVGLAEQYDVPKGSKNRKCIPGSIKLDSEEDMPFEDCTNDPESEHDLLLNGCLKSLAFDSEHSADEKEKPCAKSRARKSSDNPKRTSVKKGHIQFEAHKDERRGKIPENLGLNFISGDISDTQASNELSRIANSLTGSNTAPGSFLFSSCGKNTAKKEFETSNGDSLLGLPEGALISKCSREKNKPQRSLVCGSKVKLCYIGAGDEEKRSDSISICTTSDDGSSDLDPIEHSSESDNSVLEIPDAFDRTENMLSMQKNEKIKYSRFAATNTRVKAKQKPLISNSHTDHLMGCTKSAEPGTETSQVNLSDLKASTLVHKPQSDFTNDALSPKFNLSSSISSENSLIKGGAANQALLHSKSKQPKFRSIKCKHKENPVMAEPPVINEECSLKCCSSDTKGSPLASISKSGKVDGLKLLNNMHEKTRDSSDIETAVVKHVLSELKELSYRSLGEDVSDSGTSKPSKPLLFSSASSQNHIPIEPDYKFSTLLMMLKDMHDSKTKEQRLMTAQNLVSYRSPGRGDCSTNSPVGVSKVLVSGGSTHNSEKKGDGTQNSANPSPSGGDSALSGELSASLPGLLSDKRDLPASGKSRSDCVTRRNCGRSKPSSKLRDAFSAQMVKNTVNRKALKTERKRKLNQLPSVTLDAVLQGDRERGGSLRGGAEDPSKEDPLQIMGHLTSEDGDHFSDVHFDSKVKQSDPGKISEKGLSFENGKGPELDSVMNSENDELNGVNQVVPKKRWQRLNQRRTKPRKRMNRFKEKENSECAFRVLLPSDPVQEGRDEFPEHRTPSASILEEPLTEQNHADCLDSAGPRLNVCDKSSASIGDMEKEPGIPSLTPQAELPEPAVRSEKKRLRKPSKWLLEYTEEYDQIFAPKKKQKKVQEQVHKVSSRCEEESLLARGRSSAQNKQVDENSLISTKEEPPVLEREAPFLEGPLAQSELGGGHAELPQLTLSVPVAPEVSPRPALESEELLVKTPGNYESKRQRKPTKKLLESNDLDPGFMPKKGDLGLSKKCYEAGHLENGITESCATSYSKDFGGGTTKIFDKPRKRKRQRHAAAKMQCKKVKNDDSSKEIPGSEGELMPHRTATSPKETVEEGVEHDPGMPASKKMQGERGGGAALKENVCQNCEKLGELLLCEAQCCGAFHLECLGLTEMPRGKFICNECRTGIHTCFVCKQSGEDVKRCLLPLCGKFYHEECVQKYPPTVMQNKGFRCSLHICITCHAANPANVSASKGRLMRCVRCPVAYHANDFCLAAGSKILASNSIICPNHFTPRRGCRNHEHVNVSWCFVCSEGGSLLCCDSCPAAFHRECLNIDIPEGNWYCNDCKAGKKPHYREIVWVKVGRYRWWPAEICHPRAVPSNIDKMRHDVGEFPVLFFGSNDYLWTHQARVFPYMEGDVSSKDKMGKGVDGTYKKALQEAAARFEELKAQKELRQLQEDRKNDKKPPPYKHIKVNRPIGRVQIFTADLSEIPRCNCKATDENPCGIDSECINRMLLYECHPTVCPAGGRCQNQCFSKRQYPEVEIFRTLQRGWGLRTKTDIKKGEFVNEYVGELIDEEECRARIRYAQEHDITNFYMLTLDKDRIIDAGPKGNYARFMNHCCQPNCETQKWSVNGDTRVGLFALSDIKAGTELTFNYNLECLGNGKTVCKCGAPNCSGFLGVRPKNQPIATEEKSKKFKKKQQGKRRTQGEITKEREDECFSCGDAGQLVSCKKPGCPKVYHADCLNLTKRPAGKWECPWHQCDICGKEAASFCEMCPSSFCKQHREGMLFISKLDGRLSCTEHDPCGPNPLEPGEIREYVPPPVPLPPGPSTHLAEQSTGMAAQAPKMSDKPPADTNQMLSLSKKALAGTCQRPLLPERPLERTDSRPQPLDKVRDLAGSGTKSQSLVSSQRPLDRPPAVAGPRPQLSDKPSPVTSPSSSPSVRSQPLERPLGTADPRLDKSIGAASPRPQSLEKTSVPTGLRLPPPDRLLITSSPKPQTSDRPTDKPHASLSQRLPPPEKVLSAVVQTLVAKEKALRPVDQNTQSKNRAALVMDLIDLTPRQKERAASPHQVTPQADEKMPVLESSSWPASKGLGHMPRAVEKGCVSDPLQTSGKAAAPSEDPWQAVKSLTQARLLSQPPAKAFLYEPTTQASGRASAGAEQTPGPLSQSPGLVKQAKQMVGGQQLPALAAKSGQSFRSLGKAPASLPTEEKKLVTTEQSPWALGKASSRAGLWPIVAGQTLAQSCWSAGSTQTLAQTCWSLGRGQDPKPEQNTLPALNQAPSSHKCAESEQK

SEQ ID NO: 279858 - protein, 563 aa, Artificial Sequence
  derived and/or modified sequence
MPLKTRTALSDDPDSSTSTLGNMLELPGTSSSSTSQELPFCQPKKKSTPLKYEVGDLIWAKFKRRPWWPCRICSDPLINTHSKMKVSNRRPYRQYYVEAFGDPSERAWVAGKAIVMFEGRHQFEELPVLRRRGKQKEKGYRHKVPQKILSKWEASVGLAEQYDVPKGSKNRKCIPGSIKLDSEEDMPFEDCTNDPESEHDLLLNGCLKSLAFDSEHSADEKEKPCAKSRARKSSDNPKRTSVKKGHIQFEAHKDERRGKIPENLGLNFISGDISDTQASNELSRIANSLTGSNTAPGSFLFSSCGKNTAKKEFETSNGDSLLGLPEGALISKCSREKNKPQRSLVCGSKVKLCYIGAGDEEKRSDSISICTTSDDGSSDLDPIEHSSESDNSVLEIPDAFDRTENMLSMQKNEKIKYSRFAATNTRVKAKQKPLISNSHTDHLMGCTKSAEPGTETSQVNLSDLKASTLVHKPQSDFTNDALSPKFNLSSSISSENSLIKGGAANQALLHSKSKQPKFRSIKCKHKENPVMAEPPVINEECSLKCCSSDTKGSPLASISKTPP

SEQ ID NO: 279859 - protein, 155 aa, Artificial Sequence
  derived and/or modified sequence
MPLKTRTALSDDPDSSTSTLGNMLELPGTSSSSTSQELPFCQPKKKSTPLKYEVGDLIWAKFKRRPWWPCRICSDPLINTHSKMKVSNRRPYRQYYVEAFGDPSERAWVAGKAIVMFEGRHQFEELPVLRRRGKQKEKGYRHKVPQKILSKWEAS

SEQ ID NO: 279860 - protein, 124 aa, Artificial Sequence
  derived and/or modified sequence
MPLKTRTALSDDPDSSTSTLGNMLELPGTSSSSTSQELPFCQPKKKSTPLKYEVGDLIWAKFKRRPWWPCRICSDPLINTHSKMKVSNRRPYRQYYVEAFGDPSERAWVAGKAIVMFEGRHQFE

SEQ ID NO: 279861 - DNA, 7284 bp, Artificial Sequence
  derived and/or modified sequence
atgcccctaaaaacccggacggccctttcagacgatcctgactccagcacttctacactgggtaacatgctggagctacctggcacatcctcgtcttctaccagccaagaattaccattctgccaaccaaagaagaaaagtacccccctaaagtacgaagtaggcgatttgatttgggccaagtttaagcggcggccctggtggccatgcagaatttgctctgaccccctgataaacacccattctaagatgaaagtaagcaaccgcagaccctacagacagtattatgttgaagctttcggcgatcccagtgaacgggcttgggtggctggcaaagctatcgtaatgttcgaagggaggcaccagttcgaagagctccccgtgctgagaaggcgtggcaagcagaaagaaaaaggatatcggcataaagttcctcagaaaatactaagtaagtgggaagcgagtgtcggccttgctgagcagtacgacgtccccaaaggtagcaagaatcgtaaatgtatccccggcagtataaaacttgactcagaagaagacatgccttttgaagactgtaccaacgatccagagtccgagcacgatctgctgttaaatgggtgtttgaagagcctggcattcgactctgagcactcagctgatgagaaagagaagccctgcgcaaagagcagagccaggaaatcatccgacaatcctaaaagaacatccgtgaagaaagggcacatccagtttgaggctcataaagacgagcggagagggaaaatccccgagaatcttggcttaaattttatttcaggtgacatttctgatacccaagcctccaacgaattatctaggatagcaaactcgcttacggggagtaataccgcccctggcagcttcttatttagtagttgtggaaagaacacggccaagaaagagttcgagacctcaaacggagacagcctcttgggtcttcctgagggagccctgatctccaaatgtagccgggaaaaaaacaagccccagcgctcgctagtgtgcggtagtaaagtcaagctctgttacattggtgctggcgatgaagaaaagagaagcgatagcatcagcatttgtacaacttccgatgacggcagttcagatcttgatcccatcgagcactctagtgaatcggataacagcgtcctcgaaatccccgacgccttcgaccgcaccgaaaatatgctatcaatgcaaaagaacgagaaaataaagtactctcggtttgccgcaactaatacccgtgtgaaagccaagcagaagcctttaatttctaatagccatacagatcatctcatgggctgcacaaagagcgctgaacccggcactgagacttctcaagttaatctttctgacctgaaggcaagcaccttggtccataagccccagtccgatttcaccaatgacgccctcagcccaaagttcaacctcagctcctccatatctagcgagaacagcctgatcaaggggggagctgctaatcaggctttgctgcattccaaatctaagcaacctaaatttaggagcattaagtgcaaacataaagagaacccagtgatggcagaacctcccgtcattaatgaggagtgtagtctcaaatgctgttcaagcgatactaaaggcagccctctagctagcatcagcaagtcgggaaaggtggacggcttgaagctacttaacaatatgcatgaaaagactagagactccagtgatatcgagaccgcggtggttaaacacgtcctgtctgagcttaaggaactgagctaccggagcctgggtgaggatgttagcgactccgggacatctaagcctagtaagcctctgctgtttagctccgcttcttcccagaatcacataccaatcgagcccgattacaaattcagcactctgcttatgatgctcaaggacatgcacgattcaaaaacaaaggaacagagattgatgacagcacagaacctggtatcctaccgcagcccaggacgaggcgactgctccacaaatagcccagtgggcgtgtctaaagtcttagtaagcggcggtagtactcataactctgagaagaagggggatggtacacagaatagtgccaatccatctcctagtgggggagactccgctctgtctggggagctatctgccagcctgcccggacttctgagtgacaaacgggacctgcccgctagcgggaaaagccggtctgactgcgtgaccagaaggaattgcgggagatccaagccaagtagcaaactaagggatgcattcagtgctcagatggttaaaaatacagtaaatagaaaggccctcaagacagagcgcaaaagaaagttgaaccaactgcccagcgttaccttggatgctgtgttgcaaggcgatcgagagcgggggggtagcctgaggggcggtgctgaggatcccagcaaggaggatcctctgcaaataatgggccatcttacctcagaggatggggaccattttagcgatgtgcattttgattctaaagtaaagcagtccgacccaggcaagataagcgagaagggtctgtccttcgagaatgggaaaggaccagagttggacagcgtgatgaactctgaaaatgacgagctgaatggcgtaaatcaagtagtcccgaagaaacggtggcaaagactgaaccagcgcagaactaagcctcgcaaacggatgaacaggtttaaggagaaggagaacagcgagtgtgccttccgcgttttactgccaagcgaccccgtccaggaaggtagggacgaattccccgagcaccgcacaccctccgctagcattctagaggaaccactgaccgagcagaaccacgcagattgcctggatagcgccggaccgagacttaacgtctgtgacaagtcttctgcgtcgattggagacatggagaaggaaccagggattccctccctcactccccaggctgaactgcctgagcccgctgtgaggtctgaaaaaaaaagactgcgaaagccctccaaatggctactcgaatacacagaagaatacgaccagatctttgctccaaagaaaaaacaaaaaaaggtacaggagcaagtgcacaaggtctcgtccagatgcgaggaagagtctttactcgcccgaggtcgctcctctgctcaaaacaagcaggtcgatgagaattcactgattagcacaaaagaagagccacccgttctcgagagggaagctccatttctggagggtcctttagcacaatccgagcttgggggggggcacgcagagttgccccagctgacactctccgtccctgtggcaccagaggtgtctccccgcccagctttagagtccgaggagctacttgtcaagactccaggtaattacgagtctaaacgccaacggaagccaaccaagaagcttctggaatccaacgacttagacccaggtttcatgcccaagaagggagatttagggctgagcaagaaatgctacgaagcagggcatctggagaacggcattaccgaatcttgcgctacatcttactccaaggatttcggaggtggtacaactaagatcttcgacaaaccaaggaagcggaaacggcaaaggcacgcagccgcaaagatgcagtgtaagaaagtcaagaacgacgacagttccaaggaaatccccggatcagagggagagctgatgccacaccgtactgccacctcaccaaaggaaaccgttgaggagggagttgaacacgatccaggtatgccagccagtaaaaagatgcagggagagagaggcgggggagccgccctgaaggagaatgtctgtcagaattgtgagaagttaggcgagttgctactgtgtgaagcgcagtgctgcggcgccttccacctggagtgcctgggcctgactgagatgcctcgcggcaagttcatctgcaacgagtgcaggacaggcattcacacttgttttgtgtgtaaacagtccggcgaggacgtaaaacggtgcctcctgccgctctgtggtaagttctaccatgaagagtgtgtgcagaagtatccccctacagtaatgcagaacaaaggtttccggtgcagcttgcatatttgcattacgtgtcacgctgccaatcctgccaacgtgagtgcttccaaaggcagactgatgagatgtgtccgatgtccagttgcctaccacgccaatgatttctgtctagctgcaggatcgaaaattctggcctccaatagcataatctgccctaaccatttcactccgcggcgaggctgtcgcaatcacgagcatgtcaatgtctcttggtgtttcgtctgtagcgagggtggatccctcttatgttgcgattcttgcccagctgcctttcaccgtgagtgccttaacatcgacatcccagagggaaactggtactgtaacgattgtaaagccgggaagaaaccacactaccgcgagatcgtatgggtaaaggtaggaagatatcggtggtggcctgctgagatctgccaccctcgtgctgtaccttcaaacattgataagatgcgccatgatgtgggcgagtttcctgtacttttcttcggctctaacgactacctttggacccaccaggcaagggttttcccatatatggagggggatgtgtcatccaaggacaagatgggtaagggtgtggacggcacttataagaaagccctgcaggaggcagcggcccggtttgaagagctcaaagctcagaaggagctcagacagttgcaggaagatcgtaagaacgataaaaagcctcctccctataagcatatcaaagttaacagacccatcggtcgcgtgcagatctttacagcagatctcagcgaaattcctaggtgcaactgtaaagccactgatgaaaacccctgtggtattgactcagaatgcatcaaccgcatgctcctctacgagtgccacccgactgtgtgtccagcgggcggcaggtgccagaatcagtgttttagcaagcgacaatatcccgaggtggagattttccgaactcttcagagggggtggggtttgagaacaaagacggatatcaaaaagggcgaattcgttaacgagtatgttggcgagcttatagacgaggaggagtgcagagcccgtattcggtatgcacaggagcatgatattacaaacttttacatgttgacgctggacaaagatcggatcattgacgccggcccaaaaggcaactacgcaaggtttatgaaccactgctgccagcctaactgcgaaacccagaagtggagtgttaacggagatactagagtgggtctgtttgccctgtcagacatcaaggcggggacagagctgacctttaactacaacctggaatgcctgggaaacggaaaaaccgtctgtaagtgtggagccccaaattgtagtggcttcctaggcgtgcgtcctaagaaccaacccattgccacagaggagaaatcaaagaaattcaagaaaaaacagcaaggcaagagacggacccagggcgaaatcaccaaggagcgggaagacgagtgcttctcttgtggagacgccggacagctggtctcctgcaagaaaccaggatgccctaaggtgtatcacgcagactgtctgaacctgacaaaaagacccgctgggaaatgggaatgcccatggcaccagtgtgatatatgcggcaaagaagcagcttctttctgcgagatgtgtccctcttcattctgcaaacagcacagggaaggaatgctcttcatttccaagctggatggccgtctgagctgtacggagcatgacccatgtggtccgaatccgctagaacctggtgaaatacgagaatacgttcccccccctgtccctctgcctccaggaccgagtactcacctggcggaacagagcactggcatggcggctcaagcaccgaaaatgtctgataagcctccagccgacaccaaccaaatgctgtcactcagtaagaaggcccttgctggcacttgtcaacgtcccctgctgccagagagacccctggagagaactgatagcaggcctcagcccttagacaaggtccgagacctcgcgggaagcggaacaaagtctcagtctctggtgtcaagccagcggcccctcgataggcctcccgccgttgctggccctcgcccccagctctccgacaaaccgagccccgttacgtcccctagctcttctccatccgtgcggtctcaaccactggaaagacctctgggcaccgccgatcctcgactggataaatccattggtgccgctagtcccaggccccagtcccttgagaagaccagtgtacccacaggcttacggctccctccacccgaccggctgctgattacttcgtcgccaaagcctcagaccagtgatcgacccaccgacaaaccccacgccagcttgtcgcaacggctgccacccccagaaaaggttttgagcgccgtcgtacaaactctggtcgcaaaagaaaaggcgctgcggcccgtcgaccagaacactcagtcaaaaaatcgcgcagcacttgtgatggatttaatcgatctgactcccagacaaaaggaaagggctgcatcaccacatcaagtgacaccccaggccgacgaaaagatgccagtgctggagagtagctcctggcctgctagcaagggactaggccatatgccccgcgctgtggaaaaggggtgcgtatcggaccctctccagactagcggcaaggccgctgcccctagcgaggacccatggcaggccgtcaaatcactgacccaggcccgtctgttgtcccagccacctgctaaagccttcctgtatgaacccaccacacaggctagtggacgggccagcgcgggagctgaacaaaccccagggcccttgtcgcagagcccaggattggtgaaacaggctaaacagatggttggaggccaacaactccctgcactggcagccaagagcggtcagtccttcaggagtcttggtaaagcccctgcaagcctccctacagaggagaagaagctggtcacaaccgaacaatcaccctgggccctgggcaaggcatccagtagggcaggcttgtggcctatcgtggctggacaaaccttggcacaatcttgttggagcgccgggagcactcaaaccctggcacagacatgttggtccctaggtaggggtcaggaccctaagccagaacaaaacactctccctgcactcaatcaggctcccagctctcacaaatgtgctgagagcgagcaaaagtag

SEQ ID NO: 279862 - DNA, 7284 bp, Artificial Sequence
  derived and/or modified sequence
atgcctctgaagacgcggaccgccctgagtgatgatccggattcaagtacatctacgctcggtaacatgttggagcttccgggaacgtcttcttcctctacctcacaggagctgccattttgtcaaccgaaaaagaaatctacacctcttaaatatgaggttggcgatcttatctgggccaaatttaaacggaggccatggtggccctgccgaatatgcagcgatccactgatcaacactcactctaagatgaaggtttcgaaccgaaggccatacaggcagtattacgttgaggccttcggggatccatccgaaagggcttgggtcgccggtaaggccatcgtgatgttcgaggggaggcaccagttcgaagagcttccagtgctaaggaggcgggggaaacaaaaggagaaaggttatagacacaaagtcccccagaagattctgtcaaagtgggaagcttccgtggggctcgccgagcagtacgacgtgccaaaggggagtaaaaataggaagtgcatacctgggagcatcaagttagattccgaagaagacatgcctttcgaggattgcactaatgatccagagtctgagcacgacttgctgctgaatgggtgcttgaagtcactagctttcgattcagaacattcggcagacgaaaaggagaagccctgtgctaagtctagggcccgcaaaagcagtgataacccaaaaaggacctccgtgaagaagggccacatacagttcgaagcgcataaagacgaacggagaggtaagatccccgaaaaccttgggctgaactttatttcaggagatatctcagatactcaggccagtaatgagctctcccgtattgctaacagtttgactggcagcaacacagctcccggttcctttctttttagctcctgcggcaaaaacacagcaaaaaaagaattcgagacatctaatggcgactccctgttgggactacccgaaggggctctgatttctaaatgctccagagaaaagaataagccacagcgcagtttggtgtgcggtagcaaggtcaaactatgctatatcggtgcaggggatgaagagaagagatccgacagtatatccatctgcacaacttccgacgacggctccagtgacctggatcctatcgagcactcctcggagagcgacaattccgtgctcgaaattcccgatgcattcgatcgcaccgagaatatgctttccatgcagaagaatgagaagataaagtattcaaggttcgcagcgactaatactcgcgttaaggctaaacaaaaaccactaatctctaactctcacacagatcacttaatgggttgtacaaagagtgcggagcctggaacagaaaccagccaagttaacctctctgacctcaaggcctcgactctggttcacaagccgcagagcgattttaccaatgacgccctctccccaaaatttaacctctcttcttctatttcaagcgagaacagcttgatcaaaggaggggccgccaatcaggccctgctccattctaagagcaagcaaccaaaatttaggtcaataaaatgtaagcacaaagaaaaccccgtgatggccgaacctccagtgattaacgaagaatgctcactcaaatgctgcagctcagataccaaaggatcgccattggcctctatttctaagtcggggaaggtggacgggctgaagctcctgaataacatgcatgaaaaaaccagggatagttctgacatagagacagcagtcgtcaaacacgtattgagcgagctgaaggaactgtcctacaggtccttaggcgaggatgtcagtgattccggcacttctaaacccagcaagcccctcctgttcagtagcgcgtcatcccaaaatcacatccctattgaaccagactacaaattctccacgctgttaatgatgctgaaagacatgcacgacagcaaaaccaaagagcaacgcctgatgacggcacagaacttggtatcctatagatcaccagggagaggggactgctctaccaactcccctgttggcgtgtctaaggttctggtgtctggagggtccacacacaatagtgagaagaagggggacgggacacagaacagcgctaatcctagccctagcggaggagactcagccctgtcaggagagctgtctgctagcctgcctggtctcttgtccgataaaagagatctccctgcgagcggtaagagtaggagcgattgcgtgacccgacgtaattgcgggcgttcgaagccttcttccaagctcagggacgctttcagcgcccagatggtgaaaaatactgtaaataggaaggccttgaagacggagagaaagagaaagctcaatcaactgccctcagtaacgttggatgcggtgctacagggtgaccgggagcgcggggggtcattgagagggggagccgaggaccctagcaaagaagacccgctccagataatgggccatctcacctccgaggatggcgaccacttctcagatgtacacttcgacagtaaagtgaagcagtcagatcctggcaaaataagcgaaaaaggcctcagctttgagaatgggaaagggccagagctcgactctgtaatgaactccgagaacgatgagctaaatggagtgaatcaggtcgttcccaagaaaagatggcagaggctgaatcagcgaagaactaaacccaggaagaggatgaacagatttaaagagaaggagaacagcgagtgtgcctttagagtgctgcttccttctgatcctgttcaggagggaagagatgagtttccagagcacaggacccctagcgcaagcatcctggaggagcctcttacagagcagaaccatgccgattgcttagactccgcaggcccgcgcctgaatgtgtgtgacaagtcctctgccagtatcggggacatggagaaagaacccgggattccaagcctcacgccgcaggccgagctccctgaacccgccgtgcgaagcgaaaaaaagcgcctacggaagccctcgaagtggctgctggaatacactgaagagtacgatcagatatttgcaccgaaaaagaagcagaagaaggtgcaggagcaagtgcacaaagtctcctcacgatgcgaggaagagtctcttttggctcggggccggtctagtgctcagaataaacaggtggatgaaaattcactcataagtactaaggaagaaccacccgttttggagagggaggccccattcttggagggtccactggcccagtcagaactcggtggtggtcacgcagagctgccacagctcactttgtccgtgccggttgccccagaggtgtctccacgcccagcactggaatctgaggaactgctcgttaaaactccaggcaattatgagtctaagaggcagcgcaagcctaccaagaagttactggaaagcaacgatttggaccctggatttatgccgaaaaaaggagatctggggctttcaaagaagtgttatgaggcgggccacctggagaacggcattacggagagctgtgccacaagttactcaaaagacttcggtggcggaactactaaaattttcgacaagccgcgcaaaagaaagcgccagagacatgccgcggctaagatgcaatgcaagaaggtcaagaatgacgattctagtaaggaaatcccgggatcagagggtgaacttatgccccatcgcactgccaccagtcctaaggagaccgtggaggaaggagtcgaacatgacccaggcatgcccgccagtaagaaaatgcagggcgaacgcggcgggggcgccgcgctgaaggaaaatgtgtgccagaactgcgaaaagcttggggaactgctgctctgtgaagcccagtgctgtggagctttccatctggagtgcctgggactcactgagatgccaaggggcaagtttatatgcaacgagtgccgtactggcattcacacctgtttcgtttgtaaacaatccggtgaagacgtgaagcgctgtctgctccccttgtgtgggaagttttaccacgaggagtgtgtccaaaaatacccccctaccgttatgcagaacaaggggtttcgatgctcgctacatatctgtataacttgtcatgccgctaatccggctaacgttagcgcctccaagggacgtctgatgcgatgtgttaggtgccctgtcgcctatcacgctaacgacttctgtctagccgcagggtctaaaatccttgcctccaacagcattatctgcccaaatcattttacccctaggaggggatgccggaaccacgaacatgtcaacgtgtcatggtgttttgtgtgttcagaggggggatcattactatgctgcgactcttgcccagccgcgttccatagggaatgtctcaacatcgacatacccgaagggaactggtactgtaacgattgcaaggccggcaaaaagcctcattatcgagagatcgtttgggtgaaggtagggcggtacaggtggtggccagccgaaatctgtcacccgcgtgccgtcccgtccaacatcgacaagatgcgccatgatgtcggggaatttccagtcttattttttggcagtaatgattacttatggacacaccaggctagagtgtttccctatatggaaggcgatgtttcatcaaaggataaaatgggcaagggcgttgacggcacctacaagaaggctctgcaagaggccgccgcaaggtttgaggaactgaaggctcagaaggaactgcggcagctacaagaagatcggaagaacgacaagaagcccccaccatataaacacatcaaagttaatagaccgatcgggcgcgtgcagattttcacagcagacctgtccgagatcccccgttgtaactgtaaagctacagatgagaacccatgcggcatcgatagcgaatgtattaacagaatgctcctgtacgagtgtcatccgacagtgtgtcccgcagggggcagatgccaaaatcagtgtttcagtaagaggcagtaccccgaggtggaaattttccggacacttcagcggggctggggtttacgtacaaaaactgacatcaagaaaggagaattcgttaacgagtatgtgggagaactcattgacgaggaggagtgccgtgctaggatccgttacgctcaagagcatgatataaccaatttctatatgctgacactcgataaggataggatcatcgatgcaggacccaaaggcaattacgcccggtttatgaatcattgctgtcagcccaattgcgagacccaaaagtggtccgtaaatggcgatacacgtgtggggctcttcgctctctccgacatcaaggcaggcaccgagctgacttttaattataatctggagtgtttgggcaatgggaaaacggtatgtaaatgtggcgcccctaattgtagtggattcctgggggttaggcccaaaaatcagcccatcgctacagaggagaaaagcaagaagttcaaaaaaaaacagcaggggaaacgcaggactcagggcgaaataaccaaagaacgtgaagacgagtgcttttcctgcggcgatgctggacagctcgtcagctgcaagaagcctggctgcccaaaggtttatcatgccgattgcctgaatctcaccaagagaccggccggcaagtgggaatgcccgtggcatcagtgcgacatttgcggcaaggaagcagcgagtttttgcgagatgtgtccttcctccttttgcaagcagcatcgagagggaatgctgtttataagcaagcttgatggaaggctcagctgcacagagcatgacccctgcgggcctaaccctctcgaacccggagagatcagagagtacgttccaccaccggtccctctacctcccggaccgtccacccatcttgctgaacagtcgacaggaatggcagctcaggcgcccaagatgtccgacaaacctccggccgacaccaaccagatgctgagccttagtaagaaagccctggcgggtacatgtcagagacccctgctgccagagagaccccttgaacggaccgacagccgcccccagccacttgataaagtacgcgacttagccggctccggaaccaagtcacagtccctggtgagcagtcagcgcccgctggaccgcccaccagccgtggcaggaccgcggccccagttatccgacaagccatcacctgttacctcaccctcatcctcaccaagtgtgcgctcacagccgctcgaaaggccactcgggactgccgacccacgtctcgacaaaagtattggcgccgcctcaccaaggcctcagagcttggagaaaaccagcgtgcctactggcctgcgtctcccccctccagatcggctattaatcactagctcacctaaaccccaaacctcggatagaccaacagataagcctcatgcctccctgagccagaggctgccacctcccgagaaggttctcagtgccgtggtacagaccctggtcgccaaggaaaaagccctgcgccccgtggatcaaaatacacagtccaagaaccgcgccgcactggtaatggacctaatcgacttgacccccaggcagaaagagcgggccgcatcccctcaccaagtgacgccgcaagcggacgagaaaatgccagtactggaaagttctagctggcctgcaagcaaagggttaggtcatatgcctagagctgtggaaaagggatgcgtgtccgatccgctccagaccagcggcaaagccgcagccccctccgaggacccatggcaggccgtgaagtctctaactcaggcacggctcctgagccaacctcctgccaaggccttcttatacgagcccacgacccaggctagcggcagagctagtgctggagcggagcaaactccaggacccctctcccagtctcccggtctggtgaagcaggccaagcagatggtcggcggacaacagcttcccgctttagccgccaagtcagggcagtcatttcgctccctgggaaaggcccctgcaagtttgcctacagaggaaaagaaactggtgacgaccgaacaaagcccatgggccctcggaaaggcgagtagtagggctggcctgtggcctattgtggcaggccagaccctggcgcagtcttgttggagtgctggttctacgcagaccttggcccaaacctgctggtctttgggccggggacaggaccccaaaccggagcagaatacgctgccggctctgaaccaggctcccagctcacataaatgtgctgagtcggaacaaaagtag

SEQ ID NO: 279863 - DNA, 1692 bp, Artificial Sequence
  derived and/or modified sequence
atgcccctaaaaaccaggaccgcactcagcgatgatcctgacagctctacaagtacactggggaatatgctggaactgcccggcacatcttcctcatcaacaagccaagaactgcctttttgtcagcccaagaaaaaatctacccccctgaagtatgaggtcggcgatctgatttgggctaaattcaagcgtcggccatggtggccgtgtcgcatttgctcagatccactgattaatacccactccaaaatgaaagtttccaatcggcggccttatcggcaatattatgtggaagctttcggcgacccttcagagcgggcatgggtagcggggaaagctatagtgatgtttgagggcagacatcagttcgaggagctccccgtactccggcgtagagggaagcagaaggaaaaaggatacaggcacaaggtgccccagaaaattcttagcaagtgggaggctagtgttggcctggccgaacagtatgatgtccccaagggatctaaaaaccgaaaatgcatccccgggtctattaaactcgatagcgaggaggacatgccattcgaagattgtacaaatgatcccgagtctgagcacgatttgctgctcaatggctgtttgaagtctttagcatttgactctgagcacagtgcagacgaaaaggaaaagccttgcgccaaatccagagctcgcaaatctagcgataatcctaaacggactagcgtgaagaagggccatatccagttcgaggcacataaggacgaacgcaggggaaagatccccgagaacctgggactgaattttatttccggcgatatatcggacacgcaagcgtcaaacgagctctcccgaatagccaatagtcttacaggttctaacaccgctcccggatccttcttgttcagttcgtgcggcaaaaatactgcgaaaaaagagttcgaaacctctaatggagattccctcttagggctcccagagggtgcgcttatttccaagtgctcacgggaaaagaataaaccacagcggtctctggtgtgcggctcaaaggtgaaactctgctatataggcgccggagacgaagagaaacgctctgacagcattagcatttgcactacctcagatgatgggagttccgatctggaccctattgagcacagcagcgaatcagacaacagcgtgttggagatccctgatgctttcgaccggaccgagaatatgcttagtatgcaaaagaatgaaaaaatcaaatactccaggtttgcagccactaatactcgtgttaaggccaagcagaagccactcatctcgaacagccatacagaccatttgatgggttgcacaaaatccgccgagcctggcactgaaaccagccaggtcaacctgagcgatctgaaagcaagcacactggtgcacaagcctcaatcggattttactaacgacgcactctctcccaagttcaatctgagcagttcgatatcatccgagaactccctcataaaggggggcgcggctaaccaagcccttcttcacagcaagtctaagcagccaaagtttaggtctatcaaatgtaagcacaaagaaaaccctgtaatggctgagcccccggtgatcaatgaggaatgctccctgaagtgctgtagcagcgacaccaagggctcaccgctggctagtatctctaaaacaccaccctag

SEQ ID NO: 279864 - DNA, 468 bp, Artificial Sequence
  derived and/or modified sequence
atgcccctcaaaacccggactgctctgagcgatgatcctgattctagcacttccaccctaggtaatatgctggagcttcccggcacctccagcagttctacgtcccaggagctgccattttgccaaccgaaaaagaagagcacgcctttaaaatacgaggttggagacctgatatgggctaagttcaagaggcggccctggtggccttgccgaatctgttctgatcctcttatcaatacccacagtaagatgaaggtcagtaaccgccgaccttacagacaatattatgttgaagccttcggagatccctctgaaagggcatgggtggcgggaaaagcaattgtaatgttcgaggggcgtcaccagttcgaagagctacctgtgcttcgaagacgcgggaagcagaaggagaaaggctatcgccataaagtaccacagaagattttaagtaagtgggaagcctcatag

SEQ ID NO: 279865 - DNA, 375 bp, Artificial Sequence
  derived and/or modified sequence
atgccactcaagacacgaacagctttgtccgatgatccggatagttccacatccactctcggtaacatgctcgaactgccggggacatctagcagttccacctctcaggaacttcctttctgccagcccaagaaaaaaagtactcccctcaagtatgaagtgggcgacctgatttgggctaagttcaagcggcggccttggtggccttgtcgaatttgctcggacccgctgattaatacacacagcaagatgaaggtgtctaatagacgaccttaccgccagtattacgtcgaagcattcggggatcccagcgaaagagcatgggtggctggcaaggctatcgtcatgttcgagggtagacatcagttcgaatag

SEQ ID NO: 279866 - DNA, 7284 bp, Artificial Sequence
  derived and/or modified sequence
atgcccctgaagaccaggacagccctgagtgatgatcctgacagcagcaccagcaccctgggcaacatgctggagctgcccggcaccagcagcagcagcaccagccaggagctgcccttctgccagcccaagaagaagagcacccccctgaagtatgaggtgggggacctgatctgggccaagttcaagaggcggccctggtggccctgccgcatctgcagcgaccccctcatcaacacccacagcaagatgaaggtgagcaacagaagaccctaccggcagtactacgtggaggccttcggggaccccagcgagcgggcctgggtggccggcaaggccatcgtgatgtttgagggccgccaccagtttgaggagctgcctgtgctgcggcggcggggcaagcagaaggagaagggctaccgccacaaggtgccccagaagatcctgagcaagtgggaggcctctgtgggcctggccgagcagtatgatgtgcccaagggcagcaagaacaggaagtgcatccctggcagcatcaagctggacagcgaggaggacatgccctttgaggactgcaccaatgaccctgagagcgagcatgacctgctgctgaatggctgcctgaagagcctggcctttgacagcgagcacagcgcagatgagaaggagaagccctgtgccaagagccgggccaggaagagcagtgacaaccccaagaggacctctgtgaagaagggccacatccagtttgaggcccacaaggatgagcggcggggcaagatccctgagaacctgggcctgaacttcatcagcggggacatcagtgacacccaggccagcaatgagctgagcagaattgccaacagcctgaccggcagcaacacagcccctggcagcttcctgttcagcagctgtgggaagaacacagccaagaaggagtttgagaccagcaatggagacagcctgctgggcctgcctgagggcgccctgatcagcaagtgcagccgggagaagaacaagccccagaggagcctggtgtgtggcagcaaggtgaagctgtgctacatcggggctggagatgaggagaagagaagtgacagcatcagcatctgcaccaccagtgatgatggcagcagtgacctggaccccatcgagcacagcagcgagagtgacaacagcgtgctggagatcccagatgcctttgacagaacagagaacatgctgtccatgcagaagaatgagaagatcaagtacagcagatttgctgccaccaacaccagggtgaaggccaagcagaagcccctcatcagcaacagccacacagaccacctgatgggctgcaccaagtctgctgagcccggcacagagaccagccaggtgaacctgagtgacctgaaggccagcaccctggtgcacaagccccagagcgacttcaccaatgatgccctgagccccaagttcaacctgagcagcagcatcagcagcgagaacagcctcatcaagggcggggccgccaaccaggccctgctgcacagcaagagcaagcagcccaagttccgcagcatcaagtgcaagcacaaggaaaatcctgtgatggccgagccccctgtgatcaatgaggagtgcagcctgaagtgctgcagcagtgacaccaagggcagccccctggccagcatcagcaagagcggcaaggtggatggcctgaagctgctgaacaacatgcatgagaagacccgggacagcagtgacattgaaacagctgtggtgaagcacgtgctgtctgagctgaaggagctgagctaccgcagcctgggagaagatgtgtctgacagcggcaccagcaagcccagcaagcccctgctcttcagcagcgccagcagccagaaccacatccccatcgagccagactacaagttcagcaccctgctgatgatgctgaaggacatgcatgacagcaagaccaaggagcagaggctgatgacagcccagaacctggtgtcctaccgcagccctggccgcggggactgcagcaccaacagccctgtgggcgtgtccaaggtgctggtgtctgggggcagcacccacaacagcgagaagaagggagatggcacccagaacagcgccaaccccagccccagcggcggggacagcgccctgtctggagagctgagcgccagcctgcccggcctgctgagtgacaagagggacctgcctgccagcggcaagagcagaagtgactgtgtgaccaggaggaactgtggccgcagcaagcccagcagcaagctgagagatgccttcagcgcccagatggtgaagaacacagtgaacaggaaggccctgaagacagagaggaagaggaagctgaaccagctgcccagcgtgaccctggatgctgtgctgcagggcgaccgggagcggggcggcagcctgcggggcggcgctgaggaccccagcaaagaagaccccctgcagatcatgggccacctgaccagtgaagatggagaccacttcagtgatgtgcactttgacagcaaggtgaagcagagcgaccccgggaagatcagcgagaagggcctgagctttgaaaatggcaagggccctgagctggacagcgtgatgaacagtgaaaatgatgagctgaatggagtgaaccaggtggtgcccaagaagcgctggcagaggctgaaccagaggaggaccaagcccaggaagaggatgaaccgcttcaaggagaaggagaacagtgaatgtgccttccgggtgctgctgcccagcgaccctgtgcaggagggcagagatgagttccctgagcacaggaccccatctgccagcatcctggaggagcccctgacagagcagaaccacgccgactgcctggacagcgctggcccccggctgaatgtgtgtgacaagagcagcgccagcattggagacatggagaaggagcccggcatccccagcctgaccccccaggccgagctgcctgagcctgctgtgcgctctgagaagaagaggctgaggaagcccagcaagtggctgctggagtacacagaggagtatgaccagatctttgcccccaagaagaagcagaagaaggtgcaggagcaggtgcacaaggtgagcagccgctgtgaggaggagagcctgctggcccggggccgcagcagcgcccagaacaagcaggtggatgagaacagcctcatcagcaccaaggaggagccccctgtgctggagcgggaggcccccttcctggagggccccctggcccagagcgagctgggcggcggccatgctgagctgccccagctgaccctgtctgtgcctgtggcccctgaggtgagccccaggcctgccctggagagcgaggagctgctggtgaagaccccaggcaactatgagagcaagaggcagaggaagcccaccaagaagctgctggagagcaatgacctggaccccggcttcatgcccaagaagggggacctgggcctgagcaagaagtgctatgaagctggccacctggagaatggcatcacagagagctgtgccaccagctacagcaaggactttggaggcggcaccaccaagatctttgacaagcccaggaagaggaagaggcagagacatgctgctgccaagatgcagtgcaagaaggtgaagaatgatgacagcagcaaggagatccctggcagcgagggggagctgatgccccacaggacagccaccagccccaaggagaccgtggaggagggcgtggagcatgaccccggcatgcctgccagcaagaagatgcagggcgagcggggcggcggggccgccctgaaggaaaatgtgtgccagaactgtgagaagctgggggagctgctgctgtgtgaggcccagtgctgcggggccttccacctggagtgcctgggcctgacagagatgccccggggcaagttcatctgcaatgaatgtagaacaggcatccacacctgctttgtgtgcaagcagagcggggaggatgtgaagcgctgcctgctgcccctgtgtgggaagttctaccatgaagaatgtgtgcagaagtacccacccaccgtgatgcagaacaagggcttccgctgcagcctgcacatctgcatcacctgccacgccgccaacccagccaacgtgtctgccagcaagggccgcctgatgagatgtgtgcgctgccctgtggcctaccacgccaatgacttctgcctggccgccggcagcaagatcctggccagcaacagcatcatctgccccaaccacttcaccccaagaagaggctgcagaaatcatgaacatgtgaatgtgtcctggtgctttgtgtgcagcgagggcggcagcctgctgtgctgtgacagctgcccagctgccttccacagagaatgtctgaacatcgacatccctgagggcaactggtactgcaatgactgcaaggccggcaagaagccccactaccgggagatcgtgtgggtgaaggtgggccgctaccgctggtggccagctgagatctgccaccccagggctgtgcccagcaacatcgacaagatgagacatgatgtgggggagttccctgtgctcttcttcggcagcaatgactacctgtggacccaccaggcccgggtcttcccctacatggagggagatgtgagcagcaaggacaagatgggcaaaggagtggatggcacctacaagaaggccctgcaggaggccgccgccaggtttgaggagctgaaggcccagaaggagctgcggcagctgcaggaggacaggaagaatgacaagaagcccccaccctacaagcacatcaaggtgaaccggcccatcggccgggtgcagatcttcaccgctgacctgtctgagatcccccgctgcaactgcaaggccacagatgagaacccctgtggcatcgacagcgagtgcatcaacaggatgctgctgtatgagtgccaccccaccgtgtgcccagctgggggccgctgccagaaccagtgcttcagcaagaggcagtacccagaggtggagatcttccgcaccctgcagaggggctggggcctgcggaccaagacagacatcaagaagggggagtttgtgaatgaatatgtgggggagctgattgatgaggaggagtgccgggcccgcatccgctatgcccaggagcatgacatcaccaacttctacatgctgaccctggacaaggaccgcatcattgatgctggccccaagggcaactatgcccgcttcatgaaccactgctgccagcccaactgtgagacccagaagtggagcgtgaatggagacaccagggtgggcctgtttgccctgagtgacatcaaggccggcacagagctgaccttcaactacaacctggagtgcctgggcaatggcaagacagtgtgcaagtgtggggcccccaactgcagcggcttcctgggcgtgcggcccaagaaccagcccatcgccacagaggagaagagcaagaagttcaagaagaagcagcagggcaagaggaggacccagggcgagatcaccaaggagagagaagatgagtgcttcagctgtggagatgctggccagctggtgtcctgcaagaagccaggctgccccaaggtgtaccacgccgactgcctgaacctgaccaagaggcctgctgggaagtgggagtgcccctggcaccagtgtgacatctgtgggaaggaggccgccagcttctgtgagatgtgccccagcagcttctgcaagcagcaccgggagggcatgctgttcatcagcaagctggatggccgcctgagctgcacagaacatgacccctgtggccccaaccccctggagcccggggagatccgggagtatgtgcccccacctgtgcccctgcccccaggccccagcacccacctggccgagcagagcacaggcatggccgcccaggcccccaagatgtctgacaagcccccagctgacaccaaccagatgctgagcctgagcaagaaggccctggccggcacctgccagaggcccctgctgcctgagcggcccctggagaggacagacagccggccccagcccctggacaaggtgcgggacctggccggcagcggcaccaagagccagagcctggtgagcagccagaggcccctggaccggcccccagctgtggccggcccccggccccagctgagtgacaagcccagccctgtgaccagccccagcagcagccccagcgtgcgcagccagcccctggagcggcccctgggcacagctgacccccggctggacaagagcatcggggccgccagcccccggccccagagcctggagaagacctctgtgcccaccggcctgcggctgcccccaccagaccggctgctgatcaccagcagccccaagccccagaccagtgaccggcccacagacaagccccacgccagcctgagccagaggctgcccccacctgagaaggtgctgtctgctgtggtgcagaccctggtggccaaggagaaggccctgcggcctgtggaccagaacacccagagcaagaacagagctgccctggtgatggacctgattgacctgaccccccggcagaaggagcgggccgccagcccccaccaggtgaccccccaggctgatgagaagatgcctgtgctggagagcagctcctggccagccagcaagggcctgggccacatgcccagggctgtggagaagggctgtgtgtctgaccccctgcagaccagcggcaaggctgctgcccccagcgaggacccctggcaggccgtgaagagcctgacccaggcccggctgctgagccagcccccagccaaggccttcctgtatgagcccaccacccaggccagcggccgggccagcgctggagctgagcagaccccaggccccctgagccagagccctggcctggtgaagcaggccaagcagatggtgggcggccagcagctgcctgccctggccgccaagagcggccagagcttccgcagcctgggcaaggccccagccagcctgcccacagaggagaagaagctggtgaccacagagcagagcccctgggccctgggcaaggccagcagcagagctggcctgtggcccatcgtggccggccagaccctggcccagagctgctggagcgctggcagcacccagaccctggcccagacctgctggagcctgggccggggccaggaccccaagccagagcagaacaccctgcctgccctgaaccaggcccccagcagccacaagtgtgccgagagcgagcagaagtag

SEQ ID NO: 279867 - DNA, 1692 bp, Artificial Sequence
  derived and/or modified sequence
atgcccctgaagaccaggacagccctgagtgatgatcctgacagcagcaccagcaccctgggcaacatgctggagctgcccggcaccagcagcagcagcaccagccaggagctgcccttctgccagcccaagaagaagagcacccccctgaagtatgaggtgggggacctgatctgggccaagttcaagaggcggccctggtggccctgccgcatctgcagcgaccccctcatcaacacccacagcaagatgaaggtgagcaacagaagaccctaccggcagtactacgtggaggccttcggggaccccagcgagcgggcctgggtggccggcaaggccatcgtgatgtttgagggccgccaccagtttgaggagctgcctgtgctgcggcggcggggcaagcagaaggagaagggctaccgccacaaggtgccccagaagatcctgagcaagtgggaggcctctgtgggcctggccgagcagtatgatgtgcccaagggcagcaagaacaggaagtgcatccctggcagcatcaagctggacagcgaggaggacatgccctttgaggactgcaccaatgaccctgagagcgagcatgacctgctgctgaatggctgcctgaagagcctggcctttgacagcgagcacagcgcagatgagaaggagaagccctgtgccaagagccgggccaggaagagcagtgacaaccccaagaggacctctgtgaagaagggccacatccagtttgaggcccacaaggatgagcggcggggcaagatccctgagaacctgggcctgaacttcatcagcggggacatcagtgacacccaggccagcaatgagctgagcagaattgccaacagcctgaccggcagcaacacagcccctggcagcttcctgttcagcagctgtgggaagaacacagccaagaaggagtttgagaccagcaatggagacagcctgctgggcctgcctgagggcgccctgatcagcaagtgcagccgggagaagaacaagccccagaggagcctggtgtgtggcagcaaggtgaagctgtgctacatcggggctggagatgaggagaagagaagtgacagcatcagcatctgcaccaccagtgatgatggcagcagtgacctggaccccatcgagcacagcagcgagagtgacaacagcgtgctggagatcccagatgcctttgacagaacagagaacatgctgtccatgcagaagaatgagaagatcaagtacagcagatttgctgccaccaacaccagggtgaaggccaagcagaagcccctcatcagcaacagccacacagaccacctgatgggctgcaccaagtctgctgagcccggcacagagaccagccaggtgaacctgagtgacctgaaggccagcaccctggtgcacaagccccagagcgacttcaccaatgatgccctgagccccaagttcaacctgagcagcagcatcagcagcgagaacagcctcatcaagggcggggccgccaaccaggccctgctgcacagcaagagcaagcagcccaagttccgcagcatcaagtgcaagcacaaggaaaatcctgtgatggccgagccccctgtgatcaatgaggagtgcagcctgaagtgctgcagcagtgacaccaagggcagccccctggccagcatcagcaagaccccaccctag

SEQ ID NO: 279868 - DNA, 468 bp, Artificial Sequence
  derived and/or modified sequence
atgcccctgaagaccaggacagccctgagtgatgatcctgacagcagcaccagcaccctgggcaacatgctggagctgcccggcaccagcagcagcagcaccagccaggagctgcccttctgccagcccaagaagaagagcacccccctgaagtatgaggtgggggacctgatctgggccaagttcaagaggcggccctggtggccctgccgcatctgcagcgaccccctcatcaacacccacagcaagatgaaggtgagcaacagaagaccctaccggcagtactacgtggaggccttcggggaccccagcgagcgggcctgggtggccggcaaggccatcgtgatgtttgagggccgccaccagtttgaggagctgcctgtgctgcggcggcggggcaagcagaaggagaagggctaccgccacaaggtgccccagaagatcctgagcaagtgggaggccagctag

SEQ ID NO: 279869 - DNA, 375 bp, Artificial Sequence
  derived and/or modified sequence
atgcccctgaagaccaggacagccctgagtgatgatcctgacagcagcaccagcaccctgggcaacatgctggagctgcccggcaccagcagcagcagcaccagccaggagctgcccttctgccagcccaagaagaagagcacccccctgaagtatgaggtgggggacctgatctgggccaagttcaagaggcggccctggtggccctgccgcatctgcagcgaccccctcatcaacacccacagcaagatgaaggtgagcaacagaagaccctaccggcagtactacgtggaggccttcggggaccccagcgagcgggcctgggtggccggcaaggccatcgtgatgtttgagggccgccaccagtttgaatag

SEQ ID NO: 279870 - DNA, 7284 bp, Artificial Sequence
  derived and/or modified sequence
atgcccctgaagacccggaccgccctgagcgacgaccccgacagcagcacctccaccctgggcaatatgctagaactaccggggacgtcgagctcttccacctcacaggaactccctttttgccagcctaagaaaaaatccacccccctgaagtatgaagtgggggacttaatttgggcgaagtttaaacgccgtccctggtggccttgtcgcatttgctccgatccgctcataaacactcatagtaaaatgaaggtcagcaaccggagaccctatagacagtattacgttgaagcttttggcgatccgtccgagcgcgcttgggtggccggcaaagctatcgtgatgtttgagggtcgccaccagtttgaggagcttcctgttctaaggcgaagaggtaaacagaaagagaaagggtatcggcacaaagtaccccagaagatcttaagcaagtgggaagcttctgtgggtctggccgagcaatacgacgtgccaaaaggctctaagaataggaaatgcatccctgggtctattaaactggattccgaggaggacatgccttttgaggattgcaccaacgacccagaatcagagcatgacctgctgctcaacggatgcttgaaaagcttagcattcgattcagagcattcagccgacgagaaggagaagccttgcgcaaagtctcgcgcaaggaaatccagcgacaacccaaagagaacctccgtcaaaaaggggcacattcagtttgaggcgcataaggacgagcgccgcggaaagatacccgaaaacctgggactaaatttcatcagtggggatattagcgacacgcaggcctctaatgagctctccaggatagcaaactccctcactggctctaatacagctccgggttccttcctgttctccagctgtggcaagaacaccgcaaagaaggagttcgaaacctctaacggtgattcactccttgggctacccgaaggcgccctaatctctaaatgttcccgagagaagaacaaaccccagcgaagcctcgtgtgtgggagcaaggtgaagctgtgctacatcggggccggcgacgaggagaagaggtccgattctatctccatttgtacaacatccgacgacggctcaagcgacctggaccctatcgagcacagttctgaatccgataactctgtgctggaaattcctgatgcttttgacagaactgaaaatatgctgtccatgcaaaagaacgagaaaataaaatactcaagatttgccgccaccaatactagagttaaagcaaagcaaaaacccttgatttccaactcacacacagaccaccttatgggatgcactaaaagcgcagaacctggaacggagacctcccaggtgaatctctccgatctcaaggcttctactctagtgcataagccccagtccgacttcactaatgatgctctctcacccaagttcaatctcagcagtagcatcagctccgaaaactctcttatcaaggggggggccgccaatcaggcattgctccattcaaagagcaaacagcctaaattccgctctataaagtgcaagcacaaggagaaccctgttatggcggagccaccagtaattaacgaagagtgctcactgaagtgttgctcctcagacacaaagggctctcctctcgctagtattagcaagtctggcaaagtcgacgggcttaaacttctcaacaacatgcatgagaagactcgcgattccagcgatatcgagacggccgtggtcaaacatgtcctgtctgagctgaaagagctgtcctacaggagtctgggcgaggatgtcagtgacagcggtacctcaaagccgtctaaaccactcctattttcaagtgcctcgagccaaaaccacatccccattgagccagactataagttcagcaccctacttatgatgttgaaagacatgcacgactcaaagacgaaagaacaaagacttatgaccgcccaaaatttggtgagctataggtccccaggtcgcggagactgttctacaaactctcctgtaggcgtaagcaaggtgctcgtttctggggggagcacccacaatagcgagaagaagggggatgggactcagaatagcgctaacccctcgcctagcggaggggatagcgccctttcgggggagctgtccgcctctctgccagggcttctctctgataagagagatctacctgcttctggtaagagccggagcgactgtgtgacgcgcagaaattgcgggaggtctaagccatcctccaagctcagggacgccttctctgctcaaatggtaaagaataccgtcaaccggaaagctctgaagactgagagaaaacggaaactcaatcagttgcctagcgtgactctcgatgctgtgcttcaaggggaccgcgaaagagggggtagtcttcgcggcggcgcagaggatccctcaaaggaggacccactacagataatgggccatctgacctccgaggatggggatcacttttccgacgtgcacttcgattctaaggtgaagcagagtgatccaggaaagatcagcgagaagggtttgagtttcgagaacggcaagggaccggagctcgattctgtgatgaactcagagaacgatgaacttaacggggtaaatcaagtcgtgcctaagaaaaggtggcagcggctgaatcaaaggcggactaaaccgcggaagcggatgaacaggttcaaggaaaaggaaaatagcgaatgcgctttcagagtgttgttacctagcgaccctgtgcaagagggccgggacgagtttcctgaacaccggactccctcagcatctatactggaagaaccattgaccgagcagaaccacgctgactgtcttgactccgccggcccacgactgaacgtgtgcgataaaagcagcgctagcatcggcgacatggaaaaggagccaggcatcccaagcctgactccacaggctgagctgcctgaacccgctgtcagaagcgaaaagaagcgcctcaggaagcccagtaagtggttgctagagtacaccgaagaatacgatcaaatattcgcacctaaaaagaagcagaaaaaggtgcaggagcaggtgcacaaagtctcatcaaggtgcgaggaagagtccctcctggcccgcgggaggagcagcgcacagaacaagcaggttgacgagaactccttgattagtactaaagaggagccgcccgtgctggaaagggaggctccattcctcgagggaccactcgcacagtccgaactcggaggtggacatgctgagctgccacagctgactctgtctgtgcccgtagcaccagaagtgtccccacgccccgccctggagtccgaggaactgctcgttaagactcctgggaactacgagtccaagaggcagcgaaaaccaacgaaaaaacttctggagagcaatgatctggatcctggatttatgcccaaaaaaggggacctgggtcttagtaaaaagtgttatgaagccggccacctggagaacggtatcactgaatcttgcgccaccagttattccaaggattttggagggggaacaacgaaaatcttcgacaagcctcgcaagcgtaagaggcagcggcatgcagctgcaaagatgcagtgtaaaaaggtgaagaacgacgactctagcaaggaaatcccagggtctgagggagagctgatgccacaccggaccgctaccagtccaaaagaaacagtggaggaaggagtggagcatgatccgggaatgccggcctccaaaaagatgcagggggagaggggaggaggcgctgccctgaaggagaacgtctgccagaattgcgagaagctgggagaattattactttgcgaggcacaatgctgtggcgcctttcatctggaatgcctgggactcactgagatgcctagaggcaagttcatatgtaacgaatgccgtaccgggatccatacttgttttgtctgcaagcagtctggggaagacgtgaagagatgtcttttacccctgtgtgggaagttttaccatgaggaatgtgtgcagaaatacccgcccacggtcatgcaaaacaagggcttcaggtgctctttgcatatctgtataacctgccacgctgcgaacccagccaatgtctccgcatctaaaggtaggttgatgcgctgcgttagatgccccgtcgcttaccacgccaatgatttttgtttggccgctgggagcaagattctcgctagcaattccatcatatgcccaaaccactttactccccggcgaggatgtcgtaaccacgagcatgtcaacgtgtcatggtgctttgtgtgcagtgagggtggtagcctcctctgttgcgactcttgtcctgctgcatttcatagagagtgcttaaacatcgatattccagagggtaactggtattgtaatgactgcaaagcgggcaaaaagccgcactatcgcgaaatcgtgtgggtgaaagtcggtagataccgatggtggcccgccgaaatatgtcacccacgagccgtgccttcaaacattgataaaatgcgacacgacgtaggagaattccctgtgctattcttcggaagcaacgattacctatggactcaccaggcccgggtctttccctacatggaaggagacgtttcaagcaaagacaagatgggaaaaggtgtcgacggcacatacaaaaaggcgctacaggaggccgccgcgcggttcgaggagctaaaagctcagaaggagctgcgccaactgcaggaagaccgcaaaaatgacaaaaaaccacctccatataaacatatcaaagtgaataggcccattggaagagtgcagatttttaccgctgatttgtccgaaatacctcgatgtaattgtaaggcgaccgacgagaacccatgcggcatcgactcggaatgtattaataggatgcttctctatgaatgtcacccaacagtgtgccctgcgggagggaggtgccaaaatcagtgcttctccaagagacaatatccggaggttgagattttcaggacacttcagagaggttggggcctccggactaagaccgatattaagaaaggggagttcgttaacgagtatgtgggcgagctgatcgatgaggaagaatgtcgtgcgcggattaggtatgctcaagagcacgacataactaacttctatatgcttaccctggacaaagatcggattatcgatgccggtcccaaagggaattatgccaggttcatgaatcattgttgccaacctaactgcgaaacccagaaatggagtgtgaatggggatacacgggtgggactgtttgcactgagcgatatcaaagcagggacagagttaactttcaattataatctcgaatgtctgggcaacgggaaaaccgtgtgcaaatgcggggcccccaattgctcaggcttcctgggagtgaggcctaaaaatcaacccatcgcaactgaagaaaaatcaaagaagtttaaaaagaagcaacaggggaagcgaaggacacagggagagatcactaaggagagggaagatgaatgtttctcttgcggcgatgccggccagttagtctcctgcaagaagcccggctgtccaaaggtgtaccacgccgattgtcttaatctcaccaaacgcccggccggaaagtgggaatgcccttggcaccagtgtgacatttgcgggaaagaagccgctagtttttgcgagatgtgtcccagctccttctgtaagcagcacagggagggaatgctttttatctcaaagctggatggccggctgtcttgtaccgagcatgacccttgtggccccaaccctctagaacctggcgaaatcagagaatacgtgccaccacccgtgcctctgccccctggaccttccacacatctcgccgaacagagcacaggtatggcggctcaagcgccaaagatgtcagacaagccccccgctgatacaaaccagatgttatcattgtccaagaaagcgctggccgggacctgtcagcgcccactactgccagagcgccccctcgagcgaaccgacagtaggcctcagcccctggataaggtgagggatctggcggggtcaggcacaaaaagccaaagtctggtctcaagccagagaccactcgaccgccccccggcagtggctgggcctcggccacagctctcagataaaccgagtcccgtcacttctcccagctcctccccgagcgtcaggagccaacctttggagagaccacttggcactgccgaccccagattagacaagtcgataggagctgcatctccacggcctcaaagcctggagaaaacatctgttccaacaggattacgcctgccccctccagaccggcttctcatcactagttcccctaagcctcagaccagcgatcgtcccacagataagccacatgcgagcttgagtcagaggttaccacctcccgaaaaagtgctcagcgccgtggtgcaaacccttgttgccaaggagaaagcgctccggccagtggatcagaatactcagtcaaaaaatagagccgcgctggtcatggaccttattgatttgacaccacgccaaaaggagcgtgccgcgtcaccacaccaagttactccccaggccgatgaaaaaatgcctgtactggagtcgtcctcttggcccgcgtctaagggcctgggacacatgcctagggccgtggagaagggttgtgtatccgaccctttgcagacaagcggcaaggcagccgcccccagcgaggacccctggcaggcagttaaatctttgacccaggcccgcttgttgtcacaaccccccgctaaggccttcttgtacgagccaacaacccaagcctcaggccgcgcgtcggcgggtgcagaacaaacccctggacccctgtctcagagccccggtctggtcaaacaagccaaacagatggtgggcggccagcagcttccagcattagcagccaagagtggccaatcattcagatccctaggcaaggcaccggctagcctgccaactgaagagaaaaagcttgtgactactgaacagtctccctgggcgttggggaaagcaagctcaagggcaggactgtggcctattgtcgccggtcagacactggctcagtcatgctggtccgcaggctccactcagacactagcacagacatgctggagtctgggccgtgggcaggaccccaagcccgaacagaacactttaccagccttaaaccaggcaccctccagccataaatgcgccgaatccgaacagaaatag

SEQ ID NO: 279871 - DNA, 7284 bp, Artificial Sequence
  derived and/or modified sequence
atgcccctgaagacccggaccgccctgagcgacgaccccgacagctccacatccacactcggtaatatgctggaactacccggaacatcctcttccagtaccagccaggaacttccattttgccagccaaaaaagaagagtaccccgttgaaatatgaggtgggcgatctgatttgggccaagttcaagcggaggccttggtggccctgccgtatctgcagcgatccccttataaacactcattccaagatgaaggtttcaaatcgaaggccctacagacagtactacgtcgaggcctttggcgacccttcagagcgcgcctgggttgcgggaaaggcaattgtgatgtttgagggaaggcaccagttcgaagagctgccagtgctgcgcagaaggggcaaacaaaaagagaagggctaccgtcacaaggtgccccaaaagatattgagcaagtgggaggcaagcgtcggactggccgaacagtacgatgttcccaagggttccaaaaaccgaaagtgtatacccgggtccataaagcttgattccgaagaagatatgccattcgaggactgtactaatgatcctgaaagcgaacacgatttgctgctgaacggatgtctgaaatctctcgcctttgattcagaacactctgctgacgagaaggaaaagccttgtgccaaatctagagccagaaaatcctctgacaatcctaagcggacaagcgtcaagaaaggccatatacagtttgaggctcacaaagacgaacgacgtggaaagatacctgaaaatttgggactgaactttatctccggcgacatcagtgacacccaggcctctaacgagctttctaggattgcaaactcactcaccggaagcaacacagccccaggttcgtttctatttagcagctgcggaaaaaatacagccaaaaaggagttcgaaacttctaacggagacagtctgttaggccttcctgagggcgcactgatctctaagtgctcacgggagaaaaataaaccccagcggtctctggtttgtgggtctaaagtgaagctgtgctacataggggccggagatgaagagaagcgctccgattcaattagtatctgtactacttccgatgacggcagcagtgacctcgatcctattgagcactctagcgagtcagataacagtgtgttagagatacctgatgctttcgacaggacggagaacatgctgtctatgcagaagaacgagaagatcaagtactccaggttcgctgctacaaacactagggtaaaggctaagcagaaacctcttatcagtaactctcatactgaccacctcatgggctgcaccaaatctgctgagccgggaacagagacatcgcaagtaaacttaagcgatctcaaagcaagcacactcgtgcacaagccacaatctgacttcactaacgatgctctgtccccgaaatttaacctctcgtcctctatcagtagtgaaaattctcttatcaaaggcggggccgccaaccaagcgctgctgcacagtaagtcaaaacagcctaagttccgtagcatcaagtgcaagcacaaggaaaaccctgtgatggccgagccaccagtgatcaacgaggaatgcagtctgaaatgttgttccagcgatactaagggctccccactcgcctctataagcaaatcggggaaagtggacgggctgaagctccttaacaacatgcacgagaagaccagggattccagcgatattgagaccgccgtagttaagcacgtactctctgagctgaaggaattgagttaccgttctctaggcgaagacgtgtcggattccgggacgagcaaaccctcgaagccacttttgttttcaagtgcatcgagccagaatcacattccgatagagcccgattacaagttttcaacactgctgatgatgctgaaggatatgcacgactccaaaacgaaagagcaaagactgatgactgcccagaatctggtgtcttatcgctcccccgggcgaggtgactgttctacgaatagcccagtcggagtcagtaaggtgctcgtgagtggcggaagtacacataattcggagaaaaagggcgatggaactcagaattcagcgaatccgtctccttcgggcggcgacagtgcactctcaggagaactgagcgcctctctgcctggacttctgtctgacaaacgggacctgcctgcttctggcaaatccaggtctgactgcgttactaggcgtaactgtgggagaagtaagccatcctcaaagctcagggatgcattttctgcccagatggtgaagaacactgttaacaggaaggctctgaagaccgaaagaaaaaggaaactgaatcagcttccttcagtgactctcgacgccgttcttcaaggcgatcgggaacgtgggggctccttgcggggcggtgcggaggacccctccaaggaagaccctcttcagatcatgggtcatctgacatcagaggatggcgaccatttctcagacgtccactttgattccaaggtaaaacagtcagaccccggaaagatcagcgaaaaggggttgagcttcgagaacggcaagggccccgagctggattccgtgatgaattctgagaacgatgagcttaacggcgtgaaccaggtcgttccaaagaagcgctggcagcgtctaaatcagagaaggaccaaacctcggaaaagaatgaatagattcaaggaaaaggagaatagcgagtgtgcattccgtgtgcttctgcccagtgaccccgtccaggagggcagggacgagtttcccgaacaccggacaccctccgctagcattctggaagagccactcacagaacaaaaccatgccgactgcttggattcagccggtcctcgtctgaacgtctgcgacaagtcaagcgccagcattggtgacatggagaaggagccaggcattccatccctgacccctcaggccgaattacctgagccagcagtccgtagtgaaaaaaaacggctgaggaaaccctccaaatggctgctcgaatacacggaggaatacgaccagatcttcgcaccaaagaagaagcagaaaaaggttcaagagcaggttcacaaggtgtcatctcggtgtgaggaggagagcttgctggcaagagggcgcagcagcgcgcagaacaagcaggtcgatgaaaacagtctcattagtacaaaggaggagcctcctgtgctggagcgcgaagcgccgttcttggaggggcccctcgcgcagtcggagctcggcggaggacatgccgagctcccacaattgacattgtccgttccagtggccccggaggtcagccctaggcctgcgcttgagagtgaggagctcctcgtcaagactccagggaactatgagtcaaaaagacagcgcaaaccgacaaaaaagctgctggaatctaacgacctggatcctgggttcatgcctaagaagggagatcttggattgtccaaaaaatgctatgaggctggacacctggagaacggcattaccgagagctgtgccacaagctactccaaggactttggtggaggcacaacgaaaattttcgataagccccggaaacggaagaggcagaggcatgcagctgctaaaatgcaatgcaagaaggtgaaaaacgatgactcatctaaggagatccccggatcagagggtgagctgatgccacaccggacggcaacttctcccaaggaaactgtcgaggaaggggtcgaacatgaccccggtatgccggcttctaagaagatgcagggagaaagaggcggaggggccgctctaaaagaaaacgtgtgtcagaattgtgagaagctaggggagctgctcctctgtgaggcccaatgttgtggcgcattccacctggaatgtctcggacttacagaaatgcccagagggaaatttatttgtaatgagtgtagaaccgggatccatacgtgctttgtctgcaagcagagcggcgaggacgtcaagcgctgtctgctacccctatgtggcaagttttaccatgaagaatgtgtccaaaagtatccgcctacagtcatgcaaaacaagggctttcgctgttctctgcacatctgcatcacctgccatgcagccaaccctgcaaatgtgagcgcttccaaggggaggttaatgagatgcgtccgctgccctgttgcataccatgcaaatgatttctgcctcgcggctggatctaagattttggcttccaattctatcatttgccccaaccactttacccctcgtcgagggtgcaggaaccacgaacatgtaaacgttagttggtgttttgtgtgctccgagggaggatcgttactatgctgcgacagttgtccagccgcttttcaccgggaatgtcttaacatcgatatcccagaaggtaactggtactgtaatgattgcaaggcaggcaaaaagccccattatcgggaaattgtgtgggttaaagtgggccgctacagatggtggcctgccgaaatttgccaccccagggcagtgccttccaacatcgataaaatgcgacacgatgttggcgagttccccgtgttgttttttggatccaacgactatctgtggacgcaccaggccagagtgtttccatacatggaaggtgatgtgagttcaaaagacaaaatggggaagggcgtagacggcacctataaaaaggctctgcaagaggcagccgcaaggtttgaagaactgaaagcccaaaaggagttgcggcagctgcaggaagatcgtaagaacgataagaaaccaccaccgtataagcacatcaaagtaaatcggcccattgggcgcgtccaaatttttaccgccgatctgagtgaaatcccccggtgcaactgcaaagctaccgacgaaaacccctgcggcattgattccgagtgtataaatcggatgctcctctatgagtgtcaccccactgtttgtccggctggcggaaggtgtcagaaccaatgtttctctaaaagacagtaccctgaagtggaaatatttcgcaccctgcagcgaggttggggcctgagaacaaaaaccgacatcaaaaaaggagaattcgtgaacgagtatgtcggggagctgattgatgaggaggagtgcagagcgcggatccgatacgcacaggagcatgatattaccaatttttatatgctcacccttgataaagaccggatcattgatgccggccctaaaggcaattacgcacggttcatgaaccactgttgccagcccaattgcgaaacacagaaatggtccgtgaacggtgatactcgggttggcctgttcgccctcagtgatattaaggccggcacagagctgacttttaactacaacctcgaatgtcttgggaatggcaaaactgtttgtaaatgtggagcgccgaactgcagtgggttcctcggggtgcgaccaaaaaaccagcctatcgcgaccgaggaaaaatctaaaaaatttaaaaagaagcagcaggggaaacgacgaacccaaggcgagatcactaaagagagagaagatgaatgtttctcttgcggcgatgcgggccaattggtatcttgcaaaaagcccggctgtccaaaggtttatcatgcggactgtctgaacctgacgaaaaggcctgcaggtaaatgggaatgcccctggcatcaatgcgatatatgtggaaaagaagcagcctctttttgcgagatgtgtccatccagcttctgcaaacagcaccgcgagggaatgctattcattagcaagctagatggtagactgagttgcacagagcatgatccttgcggcccgaaccctctagaacctggagagatccgtgagtatgtgccgccccccgtgccattaccccccgggccttccacccacctcgcagagcagtctacaggaatggcagcgcaagcgcccaagatgtccgacaagccccccgcagatacaaaccagatgctatcattgtcgaagaaggctttagccggcacatgccaacgtccactgctcccagagcggccactagaaaggacagacagcaggccccagcccttggacaaggtgagggacttggcaggaagcggtacgaaatcccaatcactggtttcctctcagaggcccttggaccgacctcccgcggtggccgggcctcgacctcagctcagcgacaaaccttccccagttaccagtcctagttcttcaccatccgtcagatcacagcccctcgagaggcctcttggaacagccgaccctcgcctggataagtccataggagctgcatccccccggccccagagtttggagaagacctccgttcccaccggcctgagacttcctccaccagacagactgttaatcacaagctcaccaaaacctcagacgagcgatagacctacagataagcctcacgcttccttaagtcagaggttacctccgcccgagaaggtgctttcagcggtggtgcagaccttggtcgctaaagaaaaggccctgaggcccgtcgatcagaatactcaatccaaaaacagggccgcactggtaatggatctcattgacctgacgcctcggcagaaagagcgggcagcttccccacatcaggtgacacctcaggccgatgaaaagatgcctgtgctcgaaagcagttcctggcctgcttcgaagggtcttggtcacatgccccgggctgtagaaaagggctgcgtgtctgaccctctccaaaccagcggaaaagccgccgcaccttcagaagacccctggcaggcggtgaaaagcctaacccaggcaagactgttgtcacagcccccggccaaggcttttctatacgaacctacgacacaggccagcggccgtgcgtccgccggcgcagagcaaactccagggccgctctcccaatctcccggactcgtgaaacaggcaaagcagatggtcggaggccagcaattgcccgcactggccgctaagagtggccagtcattccggtcgttagggaaagccccagcttccttaccaactgaggagaagaagctagtgactacagaacaatcaccctgggctctggggaaagcctcaagcagggcaggactctggcctatcgtagccggtcagactttagcccagagctgttggtccgcagggtctacgcagactctcgcccagacctgctggtcccttggacgcgggcaggaccctaagcctgagcagaacactcttccagcactgaaccaggccccatccagccataaatgcgccgagtccgagcagaagtag

SEQ ID NO: 279872 - DNA, 1692 bp, Artificial Sequence
  derived and/or modified sequence
atgcccctgaagacccggaccgccctgagcgacgaccccgacagcagcacctccactctgggtaatatgctggaactgcccggcaccagcagctcaagtactagccaggaactcccattctgccagcccaagaaaaaatcaaccccactgaagtatgaagtaggcgatctcatatgggcgaagtttaagcgacggccttggtggccatgtaggatctgcagcgacccgctcataaacacacattccaaaatgaaggtgtccaaccgccgaccatatagacagtactacgtggaagccttcggcgacccatctgagagggcttgggtagctggtaaagctattgtgatgttcgaaggcaggcaccagttcgaggaactaccagtgctgagacgaaggggcaaacagaaggagaaaggatataggcataaggtgcctcaaaaaatcctgagtaagtgggaggcatccgtcggcctggcagaacaatatgatgtccctaaaggttccaagaatagaaaatgtattcccggcagcatcaaactcgacagcgaagaagacatgccctttgaggactgcactaacgatccggagagtgaacatgatctgctgttgaatgggtgcctgaagtcgctggcttttgattctgaacattcggccgacgaaaaggagaagccttgtgccaagagccgcgcaaggaaaagcagcgacaacccgaaacggacatccgtgaagaaggggcacattcaatttgaggcccacaaggatgagcgcaggggcaagattcccgaaaatctcggtctgaattttatctctggtgacatatccgacacccaggcttctaatgagctcagtcggatcgcaaatagtctgacaggttctaatacagcccctgggagctttctattctcctcctgcgggaaaaatacagcgaaaaaagagtttgaaacgagcaacggagatagcctgttaggacttccagagggggcgctaatatccaaatgttcaagggagaagaacaaaccacagcgatcgctcgtatgtggtagcaaagtgaagttatgctacatcggagccggcgacgaggagaaacgcagtgattctatcagcatctgtaccacaagcgacgatggcagctccgatttagatcccattgagcattcctccgaatcagataactctgtacttgaaatcccggacgcgtttgatcgcacggagaacatgttgtccatgcagaagaacgagaagataaaatacagtcggttcgcagccactaacacccgggtgaaagccaaacagaaacccctgatttccaatagtcacactgaccacctcatgggctgcactaaatctgcagagcccggcacagaaacatctcaggttaatctgagcgacctgaaagccagtactttagtgcacaagccccaaagtgactttaccaatgatgctctgtcaccgaaattcaacctctcatcatcaatcagcagtgagaactctttaattaagggaggggcggcaaaccaggcacttctccattcaaaatccaagcaaccaaaatttcggtctatcaagtgtaaacataaagaaaaccccgtcatggctgaacctcccgtgatcaacgaggaatgctcccttaaatgttgtagttctgataccaaagggtcaccactggccagcatatccaagacgcccccttag

SEQ ID NO: 279873 - DNA, 468 bp, Artificial Sequence
  derived and/or modified sequence
atgcccctgaagacccggaccgccctgagcgacgaccccgacagctctaccagcaccctcggcaatatgttggaactgccaggtacgagctcatcctcaacgtctcaggaactacccttctgtcagcctaagaaaaaaagcactccactgaagtatgaggtcggcgacttaatttgggctaagtttaaaagacgcccttggtggccttgccggatttgcagtgatccactgattaacacgcactctaagatgaaggtatccaatcgaaggccatacaggcaatattatgtcgaagcatttggcgatccttctgaacgggcctgggtggcaggcaaagctattgtgatgtttgagggccgccatcagtttgaagagttgcccgttctgaggcggaggggtaaacagaaggagaaggggtaccggcacaaggttccacagaagatactcagcaaatgggaggcttcatag

SEQ ID NO: 279874 - DNA, 375 bp, Artificial Sequence
  derived and/or modified sequence
atgcccctgaagacccggaccgccctgagcgacgaccccgacagctccaccagcaccctgggtaacatgctcgagttgcctggtaccagttcttccagcacctctcaggagcttccattctgtcagcctaaaaaaaagtctacacctctgaaatatgaagtcggcgacctaatttgggcgaagtttaaacgacgaccgtggtggccctgcaggatttgtagtgacccactgatcaacacacactcaaagatgaaggttagtaaccgtcgcccataccgtcagtactacgtcgaagccttcggggaccccagtgagcgtgcttgggtggcaggaaaagcaatcgttatgttcgagggccggcaccaatttgagtag

SEQ ID NO: 279875 - DNA, 7688 bp, Artificial Sequence
  derived and/or modified sequence
cctccgcctcccctcaggttgatgccggcccaggatggatcagacctgtgaactacccagaagaaattgtctgctgcccttttccaatccagtgaatttagatgcccctgaagacaaggacagccctttcggatgatccagattccagtaccagtacattaggaaacatgctagaattacctggaacttcatcatcatctacttcacaggaattgccattttgtcaacctaagaaaaagtctacgccactgaagtatgaagttggagatctcatctgggcaaaattcaagagacgcccatggtggccctgcaggatttgttctgatccgttgattaacacacattcaaaaatgaaagtttccaaccggaggccctatcggcagtactacgtggaggcttttggagatccttctgagagagcctgggtggctggaaaagcaatcgtcatgtttgaaggcagacatcaattcgaagagctacctgtccttaggagaagagggaaacagaaagaaaaaggatataggcataaggttcctcagaaaattttgagtaaatgggaagccagtgttggacttgcagaacagtatgatgttcccaaggggtcaaagaaccgaaaatgtattcctggttcaatcaagttggacagtgaagaagatatgccatttgaagactgcacaaatgatcctgagtcagaacatgacctgttgcttaatggctgtttgaaatcactggcttttgattctgaacattctgcagatgagaaggaaaagccttgcgctaaatctcgagccagaaagagctctgataatccaaaaaggactagtgtgaaaaagggccacatacaatttgaagcacataaagatgaacggaggggaaagattccagagaaccttggcctaaactttatctctggggatatatctgatacgcaggcctctaatgaactttccaggatagcaaatagcctcacagggtccaacactgccccaggaagttttctgttttcttcctgtggaaaaaacactgcaaagaaagaatttgagacttcaaatggtgactctttattgggcttgcctgagggtgctttgatctcaaagtgttctcgagagaagaataaaccccaacgaagcctggtgtgtggttcaaaagtgaagctctgctatattggagcaggtgatgaggaaaagcgaagtgattccattagtatctgtaccacttctgatgatggaagcagtgacctggatcccatagaacacagctcagagtctgataacagtgtccttgaaattccagatgctttcgatagaacagagaacatgttatctatgcagaaaaatgaaaagataaagtattctaggtttgctgccacaaacactagggtaaaagcaaaacagaagcctctcattagtaactcacatacagaccacttaatgggttgtactaagagtgcagagcctggaaccgagacgtctcaggttaatctctctgatctgaaggcatctactcttgttcacaaaccccagtcagattttacaaatgatgctctctctccaaaattcaacctgtcatcaagcatatccagtgagaactcgttaataaagggtggggcagcaaatcaagctctattacattcgaaaagcaaacagcccaagttccgaagtataaagtgcaaacacaaagaaaatccagttatggcagaacccccagttataaatgaggagtgcagtttgaaatgctgctcttctgataccaaaggctctcctttggccagcatttctaaaagtgggaaagtggatggtctaaaactactgaacaatatgcatgagaaaaccagggattcaagtgacatagaaacagcagtggtgaaacatgttttatccgagttgaaggaactctcttacagatccttaggtgaggatgtcagtgactctggaacatcaaagccatcaaaaccattacttttctcttctgcttctagtcagaatcacatacctattgaaccagactacaaattcagtacattgctaatgatgttgaaagatatgcatgatagtaagacgaaggagcagcggttgatgactgctcaaaacctggtctcttaccggagtcctggtcgtggggactgttctactaatagtcctgtaggagtctctaaggttttggtttcaggaggctccacacacaattcagagaaaaagggagatggcactcagaactccgccaatcctagccctagtgggggtgactctgcattatctggcgagttgtctgcttccctacctggcttactgtccgacaagagagacctccctgcttctggtaaaagtcgttcagactgtgttactaggcgcaactgtggacgatcaaagccttcatccaaattgcgagatgctttttcagcccaaatggtaaagaacacagtgaaccgtaaagccttaaagaccgagcgcaaaagaaaactgaatcagcttccaagtgtgactcttgatgctgtactgcagggagaccgagaacgtggaggttcattgagaggtggggcagaagatcctagtaaagaggatccccttcagataatgggccacttaacaagtgaagatggtgaccatttttctgatgtgcatttcgatagcaaggttaagcaatctgatcctggtaaaatttctgaaaaaggactctcttttgaaaacggaaaaggcccagagctggactctgtaatgaacagtgagaatgatgaactcaatggtgtaaatcaagtggtgcctaaaaagcggtggcagcgtttaaaccaaaggcgcactaaacctcgtaagcgcatgaacagatttaaagagaaagaaaactctgagtgtgcctttagggtcttacttcctagtgaccctgtgcaggaggggcgggatgagtttccagagcatagaactccttcagcaagcatacttgaggaaccactgacagagcaaaatcatgctgactgcttagattcagctgggccacggttaaatgtttgtgataaatccagtgccagcattggtgacatggaaaaggagccaggaattcccagtttgacaccacaggctgagctccctgaaccagctgtgcggtcagagaagaaacgccttaggaagccaagcaagtggcttttggaatatacagaagaatatgatcagatatttgctcctaagaaaaaacaaaagaaggtacaggagcaggtgcacaaggtaagttcccgctgtgaagaggaaagccttctagcccgaggtcgatctagtgctcagaacaagcaggtggacgagaattctttgatttcaaccaaagaagagcctccagttcttgaaagggaggctccgtttttggagggccccttggctcagtcagaacttggaggtggacatgctgagttgccgcagctgaccttgtctgtgcctgtggctccggaagtctctccacggcctgcccttgagtctgaggaattgctagttaaaacgccaggaaattatgaaagtaaacgtcaaagaaaaccaactaagaaacttcttgaatccaatgatttagaccctggatttatgcccaagaagggggaccttggcctttctaaaaagtgctatgaagctggtcacctggagaatggcataactgaatcttgtgccacatcttattcaaaagattttggtggaggcactaccaagatatttgacaagccaaggaagcgaaaacgacagaggcatgctgcagccaagatgcagtgtaaaaaagtgaaaaatgatgactcgtcaaaagagattccaggctcagagggagaactaatgcctcacaggacggccacaagccccaaggagactgttgaggaaggtgtagaacacgatcccgggatgcctgcctctaaaaaaatgcagggtgaacgcggtggaggagctgcactcaaggagaatgtctgtcagaattgtgaaaaattgggtgagctgctgttatgtgaggctcagtgctgtggggctttccacctggagtgccttggattgactgagatgccaagaggaaaatttatctgcaatgaatgtcgcacaggaatccatacctgttttgtatgtaagcagagtggggaagatgttaaaaggtgccttctacccttgtgtggaaagttttaccatgaagagtgtgtccagaagtacccacccactgttatgcagaacaagggcttccggtgctccctccacatctgtataacctgtcatgctgctaatccagccaatgtttctgcatctaaaggtcggttgatgcgctgtgtccgctgtcctgtggcataccacgccaatgacttttgcctggctgctgggtcaaagatccttgcatctaatagtatcatctgccctaatcactttacccctaggcggggctgccgaaatcatgagcatgttaatgttagctggtgctttgtgtgctcagaaggaggcagccttctgtgctgtgattcttgccctgctgcttttcatcgtgaatgcctgaacattgatatccctgaaggaaactggtattgcaatgactgtaaagcaggcaaaaagccacactacagggagattgtctgggtaaaagttggacgatacaggtggtggccagctgagatctgccatcctcgagctgttccttccaacattgataagatgagacatgatgtgggagagttcccagtcctcttttttggatctaatgactatttgtggactcaccaggcccgagtcttcccttacatggagggtgacgtgagcagcaaggataagatgggcaaaggagtggatgggacatataaaaaagctcttcaggaagctgcagcaaggtttgaggaattaaaggcccaaaaagagctaagacagctgcaggaagaccgaaagaatgacaagaagccaccaccttataaacatataaaggtaaaccgtcctattggcagggtacagatcttcactgcagacttatctgaaataccccgttgcaactgtaaagctactgatgagaacccctgtgggatagactctgaatgcatcaaccgcatgctgctctatgagtgccaccccacagtgtgtcctgccggagggcgctgtcaaaaccagtgcttttccaagcgccaatatccagaggttgaaattttccgcacattacagcggggttggggtctacggacaaaaacagatattaaaaagggtgaatttgtgaatgagtatgtgggtgagcttatagatgaagaagaatgcagagctcgaattcgctatgctcaagaacatgatatcactaatttctatatgctcaccctagacaaagaccgaatcattgatgctggtcccaaaggaaactatgctcggttcatgaatcattgctgccagcccaactgtgaaacacagaagtggtctgtgaatggagatacccgtgtaggcctttttgcactaagtgacattaaagcaggcactgaacttaccttcaactacaacctagaatgtcttgggaatggaaagactgtttgcaaatgtggagccccgaactgcagtggcttcttgggtgtaaggccaaagaatcaacccattgccacggaagaaaagtcaaagaaattcaagaagaagcaacagggaaagcgcaggacccagggtgaaatcacaaaggagcgagaagatgagtgttttagttgtggggatgctggccagctcgtctcctgcaagaaaccaggctgcccaaaagtttaccacgcagactgtctcaatctgaccaagcgaccagcagggaaatgggaatgtccgtggcatcagtgtgacatctgcgggaaggaagcagcctccttctgtgagatgtgccccagctccttttgtaagcagcatcgagaagggatgcttttcatttccaaactggatgggcgtctgtcttgtactgagcatgacccctgtgggcccaatcctctggaacctggggagatccgtgagtatgtgcctcccccagtaccgctgcctccagggccaagcactcacctggcagagcaatcaacaggaatggctgctcaggcacccaaaatgtcagataaacctcctgctgacaccaaccagatgctgtcgctctccaaaaaagctctggcagggacttgtcagaggccattgctacctgaaagacctcttgagagaactgactccaggccccagcctttagataaggtcagagacctcgctgggtcagggaccaaatcccaatccttggtttccagccagaggccactggacaggccaccagcagtggcaggaccaagaccccagctaagcgacaaaccctctccagtgaccagcccaagctcctcaccctcagtcaggtcccaaccactggaaagacctctggggacggctgacccaaggctggataaatccataggtgctgccagcccaaggccccagtcactggagaaaacctcagttcccactggcctgagacttccgccgccagacagactgctcattactagcagtcccaaaccccagacttcagacaggcctactgacaaaccccatgcctctttgtcccagagactcccacctcctgagaaagtactatcagctgtggtccagacccttgtagctaaagaaaaagcactgaggcctgtggaccagaatactcagtcaaaaaatagagctgctttggtgatggatctcatagacctaactcctcgccagaaggagcgggcagcttcacctcatcaggtcacaccacaggctgatgagaagatgccagtgttggagtcaagttcatggcctgccagcaaaggtctggggcatatgccgagagctgttgagaaaggctgtgtgtcagatcctcttcagacatctgggaaagcagcagccccttcagaggacccctggcaagctgttaaatcactcacccaggccagacttctttctcagcctcctgccaaggcctttttatatgagccaacaactcaggcctcaggaagagcttctgcaggggctgagcagaccccagggcctcttagccaatccccgggcctggtgaagcaggcgaagcagatggtcggaggccagcaactacctgcacttgccgccaagagtgggcaatcttttaggtctctcgggaaggccccagcctccctccccactgaagaaaagaagttggtaaccacagagcaaagtccctgggccctgggaaaagcctcatcacgggcagggctctggcccatagtggctggacagacactggcacagtcttgctggtctgctgggagcacacagacattggcacagacttgctggtctcttggaagagggcaagaccccaaaccagagcaaaatacacttccagctcttaaccaggctccttccagtcacaagtgtgcagaatcagaacagaagtagtaccaatcaatgtcacatgaacaaacaagctgcccccagggtaccatttggggaggggaaatcttttctttctttcccccttaaaaaaaaacacatctgccccgaacactttcccactgttattctttcctcatatcccaacactcagaactcttgtgacattagccagtgggggcttatggttgtgtgaaccatgtatgaaaatccagtgggccccaaccaaggagacagacagacttgggtctctttcccccaacttttccacatggtcatcgtgaaataaaaagtccactctggagtcaa

SEQ ID NO: 279876 - DNA, 12195 bp, Artificial Sequence
  derived and/or modified sequence
ggccgggtagggggttcgcctgcggccgcgtctgctcggggcctgaggcctcgaagaccccagcccaagcccccaggttgatgccggcccaggatggatcagacctgtgaactacccagaagaaattgtctgctgcccttttccaatccagtgaatttagatgcccctgaagacaaggacagccctttcggatgatccagattccagtaccagtacattaggaaacatgctagaattacctggaacttcatcatcatctacttcacaggaattgccattttgtcaacctaagaaaaagtctacgccactgaagtatgaagttggagatctcatctgggcaaaattcaagagacgcccatggtggccctgcaggatttgttctgatccgttgattaacacacattcaaaaatgaaagtttccaaccggaggccctatcggcagtactacgtggaggcttttggagatccttctgagagagcctgggtggctggaaaagcaatcgtcatgtttgaaggcagacatcaattcgaagagctacctgtccttaggagaagagggaaacagaaagaaaaaggatataggcataaggttcctcagaaaattttgagtaaatgggaagccagtgttggacttgcagaacagtatgatgttcccaaggggtcaaagaaccgaaaatgtattcctggttcaatcaagttggacagtgaagaagatatgccatttgaagactgcacaaatgatcctgagtcagaacatgacctgttgcttaatggctgtttgaaatcactggcttttgattctgaacattctgcagatgagaaggaaaagccttgcgctaaatctcgagccagaaagagctctgataatccaaaaaggactagtgtgaaaaagggccacatacaatttgaagcacataaagatgaacggaggggaaagattccagagaaccttggcctaaactttatctctggggatatatctgatacgcaggcctctaatgaactttccaggatagcaaatagcctcacagggtccaacactgccccaggaagttttctgttttcttcctgtggaaaaaacactgcaaagaaagaatttgagacttcaaatggtgactctttattgggcttgcctgagggtgctttgatctcaaagtgttctcgagagaagaataaaccccaacgaagcctggtgtgtggttcaaaagtgaagctctgctatattggagcaggtgatgaggaaaagcgaagtgattccattagtatctgtaccacttctgatgatggaagcagtgacctggatcccatagaacacagctcagagtctgataacagtgtccttgaaattccagatgctttcgatagaacagagaacatgttatctatgcagaaaaatgaaaagataaagtattctaggtttgctgccacaaacactagggtaaaagcaaaacagaagcctctcattagtaactcacatacagaccacttaatgggttgtactaagagtgcagagcctggaaccgagacgtctcaggttaatctctctgatctgaaggcatctactcttgttcacaaaccccagtcagattttacaaatgatgctctctctccaaaattcaacctgtcatcaagcatatccagtgagaactcgttaataaagggtggggcagcaaatcaagctctattacattcgaaaagcaaacagcccaagttccgaagtataaagtgcaaacacaaagaaaatccagttatggcagaacccccagttataaatgaggagtgcagtttgaaatgctgctcttctgataccaaaggctctcctttggccagcatttctaaaagtgggaaagtggatggtctaaaactactgaacaatatgcatgagaaaaccagggattcaagtgacatagaaacagcagtggtgaaacatgttttatccgagttgaaggaactctcttacagatccttaggtgaggatgtcagtgactctggaacatcaaagccatcaaaaccattacttttctcttctgcttctagtcagaatcacatacctattgaaccagactacaaattcagtacattgctaatgatgttgaaagatatgcatgatagtaagacgaaggagcagcggttgatgactgctcaaaacctggtctcttaccggagtcctggtcgtggggactgttctactaatagtcctgtaggagtctctaaggttttggtttcaggaggctccacacacaattcagagaaaaagggagatggcactcagaactccgccaatcctagccctagtgggggtgactctgcattatctggcgagttgtctgcttccctacctggcttactgtccgacaagagagacctccctgcttctggtaaaagtcgttcagactgtgttactaggcgcaactgtggacgatcaaagccttcatccaaattgcgagatgctttttcagcccaaatggtaaagaacacagtgaaccgtaaagccttaaagaccgagcgcaaaagaaaactgaatcagcttccaagtgtgactcttgatgctgtactgcagggagaccgagaacgtggaggttcattgagaggtggggcagaagatcctagtaaagaggatccccttcagataatgggccacttaacaagtgaagatggtgaccatttttctgatgtgcatttcgatagcaaggttaagcaatctgatcctggtaaaatttctgaaaaaggactctcttttgaaaacggaaaaggcccagagctggactctgtaatgaacagtgagaatgatgaactcaatggtgtaaatcaagtggtgcctaaaaagcggtggcagcgtttaaaccaaaggcgcactaaacctcgtaagcgcatgaacagatttaaagagaaagaaaactctgagtgtgcctttagggtcttacttcctagtgaccctgtgcaggaggggcgggatgagtttccagagcatagaactccttcagcaagcatacttgaggaaccactgacagagcaaaatcatgctgactgcttagattcagctgggccacggttaaatgtttgtgataaatccagtgccagcattggtgacatggaaaaggagccaggaattcccagtttgacaccacaggctgagctccctgaaccagctgtgcggtcagagaagaaacgccttaggaagccaagcaagtggcttttggaatatacagaagaatatgatcagatatttgctcctaagaaaaaacaaaagaaggtacaggagcaggtgcacaaggtaagttcccgctgtgaagaggaaagccttctagcccgaggtcgatctagtgctcagaacaagcaggtggacgagaattctttgatttcaaccaaagaagagcctccagttcttgaaagggaggctccgtttttggagggccccttggctcagtcagaacttggaggtggacatgctgagttgccgcagctgaccttgtctgtgcctgtggctccggaagtctctccacggcctgcccttgagtctgaggaattgctagttaaaacgccaggaaattatgaaagtaaacgtcaaagaaaaccaactaagaaacttcttgaatccaatgatttagaccctggatttatgcccaagaagggggaccttggcctttctaaaaagtgctatgaagctggtcacctggagaatggcataactgaatcttgtgccacatcttattcaaaagattttggtggaggcactaccaagatatttgacaagccaaggaagcgaaaacgacagaggcatgctgcagccaagatgcagtgtaaaaaagtgaaaaatgatgactcgtcaaaagagattccaggctcagagggagaactaatgcctcacaggacggccacaagccccaaggagactgttgaggaaggtgtagaacacgatcccgggatgcctgcctctaaaaaaatgcagggtgaacgcggtggaggagctgcactcaaggagaatgtctgtcagaattgtgaaaaattgggtgagctgctgttatgtgaggctcagtgctgtggggctttccacctggagtgccttggattgactgagatgccaagaggaaaatttatctgcaatgaatgtcgcacaggaatccatacctgttttgtatgtaagcagagtggggaagatgttaaaaggtgccttctacccttgtgtggaaagttttaccatgaagagtgtgtccagaagtacccacccactgttatgcagaacaagggcttccggtgctccctccacatctgtataacctgtcatgctgctaatccagccaatgtttctgcatctaaaggtcggttgatgcgctgtgtccgctgtcctgtggcataccacgccaatgacttttgcctggctgctgggtcaaagatccttgcatctaatagtatcatctgccctaatcactttacccctaggcggggctgccgaaatcatgagcatgttaatgttagctggtgctttgtgtgctcagaaggaggcagccttctgtgctgtgattcttgccctgctgcttttcatcgtgaatgcctgaacattgatatccctgaaggaaactggtattgcaatgactgtaaagcaggcaaaaagccacactacagggagattgtctgggtaaaagttggacgatacaggtggtggccagctgagatctgccatcctcgagctgttccttccaacattgataagatgagacatgatgtgggagagttcccagtcctcttttttggatctaatgactatttgtggactcaccaggcccgagtcttcccttacatggagggtgacgtgagcagcaaggataagatgggcaaaggagtggatgggacatataaaaaagctcttcaggaagctgcagcaaggtttgaggaattaaaggcccaaaaagagctaagacagctgcaggaagaccgaaagaatgacaagaagccaccaccttataaacatataaaggtaaaccgtcctattggcagggtacagatcttcactgcagacttatctgaaataccccgttgcaactgtaaagctactgatgagaacccctgtgggatagactctgaatgcatcaaccgcatgctgctctatgagtgccaccccacagtgtgtcctgccggagggcgctgtcaaaaccagtgcttttccaagcgccaatatccagaggttgaaattttccgcacattacagcggggttggggtctacggacaaaaacagatattaaaaagggtgaatttgtgaatgagtatgtgggtgagcttatagatgaagaagaatgcagagctcgaattcgctatgctcaagaacatgatatcactaatttctatatgctcaccctagacaaagaccgaatcattgatgctggtcccaaaggaaactatgctcggttcatgaatcattgctgccagcccaactgtgaaacacagaagtggtctgtgaatggagatacccgtgtaggcctttttgcactaagtgacattaaagcaggcactgaacttaccttcaactacaacctagaatgtcttgggaatggaaagactgtttgcaaatgtggagccccgaactgcagtggcttcttgggtgtaaggccaaagaatcaacccattgccacggaagaaaagtcaaagaaattcaagaagaagcaacagggaaagcgcaggacccagggtgaaatcacaaaggagcgagaagatgagtgttttagttgtggggatgctggccagctcgtctcctgcaagaaaccaggctgcccaaaagtttaccacgcagactgtctcaatctgaccaagcgaccagcagggaaatgggaatgtccgtggcatcagtgtgacatctgcgggaaggaagcagcctccttctgtgagatgtgccccagctccttttgtaagcagcatcgagaagggatgcttttcatttccaaactggatgggcgtctgtcttgtactgagcatgacccctgtgggcccaatcctctggaacctggggagatccgtgagtatgtgcctcccccagtaccgctgcctccagggccaagcactcacctggcagagcaatcaacaggaatggctgctcaggcacccaaaatgtcagataaacctcctgctgacaccaaccagatgctgtcgctctccaaaaaagctctggcagggacttgtcagaggccattgctacctgaaagacctcttgagagaactgactccaggccccagcctttagataaggtcagagacctcgctgggtcagggaccaaatcccaatccttggtttccagccagaggccactggacaggccaccagcagtggcaggaccaagaccccagctaagcgacaaaccctctccagtgaccagcccaagctcctcaccctcagtcaggtcccaaccactggaaagacctctggggacggctgacccaaggctggataaatccataggtgctgccagcccaaggccccagtcactggagaaaacctcagttcccactggcctgagacttccgccgccagacagactgctcattactagcagtcccaaaccccagacttcagacaggcctactgacaaaccccatgcctctttgtcccagagactcccacctcctgagaaagtactatcagctgtggtccagacccttgtagctaaagaaaaagcactgaggcctgtggaccagaatactcagtcaaaaaatagagctgctttggtgatggatctcatagacctaactcctcgccagaaggagcgggcagcttcacctcatcaggtcacaccacaggctgatgagaagatgccagtgttggagtcaagttcatggcctgccagcaaaggtctggggcatatgccgagagctgttgagaaaggctgtgtgtcagatcctcttcagacatctgggaaagcagcagccccttcagaggacccctggcaagctgttaaatcactcacccaggccagacttctttctcagcctcctgccaaggcctttttatatgagccaacaactcaggcctcaggaagagcttctgcaggggctgagcagaccccagggcctcttagccaatccccgggcctggtgaagcaggcgaagcagatggtcggaggccagcaactacctgcacttgccgccaagagtgggcaatcttttaggtctctcgggaaggccccagcctccctccccactgaagaaaagaagttggtaaccacagagcaaagtccctgggccctgggaaaagcctcatcacgggcagggctctggcccatagtggctggacagacactggcacagtcttgctggtctgctgggagcacacagacattggcacagacttgctggtctcttggaagagggcaagaccccaaaccagagcaaaatacacttccagctcttaaccaggctccttccagtcacaagtgtgcagaatcagaacagaagtagtaccaatcaatgtcacatgaacaaacaagctgcccccagggtaccatttggggaggggaaatcttttctttctttcccccttaaaaaaaaacacatctgccccgaacactttcccactgttattctttcctcatatcccaacactcagaactcttgtgacattagccagtgggggcttatggttgtgtgaaccatgtatgaaaatccagtgggccccaaccaaggagacagacagacttgggtctctttcccccaacttttccacatggtcatcgtgaaataaaaagtccactctggagtcaagtatggaattcaattccgctggtcaggttggaaggtataggggctctcaaagcgatttccccaaccagacagagccccattgagggcacctaggaacccttgggaggaaatggtgttctttcaaatcagtggcgatttcctgagcattcacgtgttctaggccgggtgctagtcactgatgagagatacaggcctcatccctgtgagcctggattccaaggctttcaggaacctttgaccaggaagtaacaggaagttctgaggggccctggggctttagactcattttgaaatgtcctttgtggcaccagaagtggttgtgttgaggaagtgtctcttggctgcggtgtgcatgggtgcgtgtgcatgcgcgcacactcacagaggtctcctctatagatgcaagggtgctgcattgaggccagcaaggctgttggctgtggggtcgccgctgctgcttttgtctgggctgtgcagagtctcaagatcagtccttggaggagcaggtggtcaggggcagtcgggctctgtgcgaatgtagatttccagcagtggaagaaggcatttggcaagcttctctttctttgcttttgtttctacctatttttctctttgtacatgaatccaccccatccctatttccctaaaacactcaggtgctttcagatttcagagcctcgggcagtggacatagggaatctctggcaagctctgagctagacacaccagcttcaggaagagtaccagatcctgatgggaaatttcttttccccattccttttccctcctgagtggagggagtcctcttcttcgcctccctgagaattgctgtgctctgtattgagagcacctgcctgctgacttagctcaaaggcaagccagaacccttccctgaagactggcaagaggtggtgtttagagcaacgtccaggctaagagatgactcctattaactgctgattatctgttactgctgccctgagctggggcccaagggctgggaaatctgttggtgctaccctgccctaccattcacccagctcacagactgccaacaggaagtgctgtttggctagtttcctcccacttgtctacccctcctttgtccttagaccaacatgtttacctctctgctttgccaacttagccagcaggccatccccggccctaacgtctcctggccattatctcttagttatggctttcacgctctcaataggattctgtatttggtcccaatttcctcaagttcttattgaggttactcccatcaattccacggagggaacagtagttattatagaagcatttgcgctttatctaaagattaaaaatagaatctgcttttatttcccaaagtctgtctctgaggttgagacacttgaactcaggcagagggacgaggctgggcagggctgtcctgagtttaggggcctatccctgcatttcactgagacctcggaatctcctctgtgaattccacctgcctagttctcccctttcatcctctctctcttcccacatcatcaaagaggaaaagctctttgttcaaaaggaagagaaaacgtaaagcatcttattttcttttaaaagaattttaaaccatgaaaaagatatttttaaagaaattcaccgagaacattaaagttcattatattaagtatttatcatgtgtgagaataataaatatataactgcagctagtaggtccctttccctaatcttttaggtcatatgagtagggtttgcttggtgccagtcctgtgcccttttctctccagtcatctgtagttgtgatcagaaaaaggtatctgcactgcactgtcagagtctcctttcactatgttgtgtgttaaattaccgtagctctttgtttcatgaaataaactgtgaatttggggggggcggggggagggcgtgcaggccatgtaaaaattttccgtggagaagtttgattctaaagtagcttctctaaagtaggctttggtaggtaatcaacttgacagcagtctagatgtctcacaggacaggagggagtgagggaaaggggccatgattggctgctttgtggttttattttggttctttccattctccgccattcattggaggcttcgttccagacctgcctgggaaaacagcttctgagccattttggggagcagttcttcatctgaatggatggacatctgggcttccttcaagggccattgaatgggaactagaaaaccactggaaactagaaatttgagctattgggcccaccagtagcagcatgtgatactagatggttaaaatcatgaaagcagtcactatccaattagaagcagagtcacaacaactgttgggaaatgtgactcttggaggaaggtggggagggagtggccttgccagccctgtgggacgtcccctgaagtttgtaataagaccccttttccaaagggatgtgaattggagtgaaaaggaaatctttcatcttagaaaacttctggtccttaacgcagggtggtatttgggtatgtgcttggaaattgagatctcaagagtgtttgccttggagccagctccccaggaggccttttccagggacaaggcaaaagttgaaattctccatgggtagctagaaagccaatacatctagccctgctaagtcagaaaaagattatgaaaaatgttgaaatttacattcaaagcctcatttgcttatcttgctggagccaacccagtctaatagcaaaatagctgtcattgatacagaaacatcctcatttttaaatgtctgctttaccctgttactgagtttgagatgacttaaatcactgtgttgaccctcttctgaaccaaatctttagcattgatgaaaatagttattttattctttacatccttcaccccacactatggtcagggcatgaaacaccctgttgatcccttcccaggctcggcactgtctgctcactggagccggactcccaggttgtaattctaatgttgcctcatgagaacagaatggcagaaagtttagtcctgacagattcccccatagggagtaatgaggacagcatgaaacttggataggttttacccttagtccctataaggtggattttactaaggttttttaaatgatactgtcatcctcttggggtttatcagccaggttagaggagcccagtgtcctaacctctctcagatcatggcagagaaggagctgcctccagcccctttcttgctgagtttcatttgagcagttccatgtgtagacattccaagtcactgcttggtagttgctgtgggagcctgtcattggctatggccagttagttctcagctgagcttcctagggccagtgcaacagggccagaggctgctatagtgtaaattgaaataagaatagatcattgttttgtacacacacacaataaaatgtaatgatggtgctaatttcacggtataaataagcactgccaagggttgagggactggcagctcaagaaacccgggttcctgtttgggaggagattttatgtagaaaagtttgaggctttgttaaaagtggggagaaggaagatcctcagtgaagcctgcacccaaccctggagtggcccagtgcaatccagaggtggaagagatcctatatccaggtgaaggtggccattgagtttctcagggctggggccaccttgtccatagcctccgtccacgctgcctggagcaggttgttagagagctctggttgttgggtcttcctcagctcccttctgcccctctctacctcttccactcatggaagcccctctactgcttatgaagattaagggtagtattttctaaggaagtggaaagaattaaactagaaatccacaacctcggaagaagtgtttcgagtttaacatgcgctgtttctgcttatgtggttccttctctagagctgctttcccatggctttcaaaacatcaggttattgtggggcttcaggtgtaaggtcctggaagttcagcaaagtttcgtggacaagacatgggcacagagagtagaagcagaaataaatggttctatgttttcaacttccagggttggggcaggccagagcaaggcggtctcatcgaggtgggtgctacctgtgtgtgtgtagatgagtgtgctgaaggtggggagggcagcacacagcagctcatggcagagccgcctcctaggtcttggcaaagaggcaagctgacgatagacatctacctatattgttaagaaaggggtcggggggatcagccaaggtccatcattgcttttttgccgcgcccccccccccccgcccccatagattgtcagctgtaagtgaaactcctagtgaaaaagaggggagccctgtgttaggagtccccataaacatgtactgtaattctttgtatatagaaaaaaaatttactgtaaagtaaagtttaactttactc

SEQ ID NO: 279877 - DNA, 1849 bp, Artificial Sequence
  derived and/or modified sequence
ggccgggtagggggttcgcctgcggccgcgtctgctcggggcctgaggcctcgaagaccccagcccaagcccccaggttgatgccggcccaggatggatcagacctgtgaactacccagaagaaattgtctgctgcccttttccaatccagtgaatttagatgcccctgaagacaaggacagccctttcggatgatccagattccagtaccagtacattaggaaacatgctagaattacctggaacttcatcatcatctacttcacaggaattgccattttgtcaacctaagaaaaagtctacgccactgaagtatgaagttggagatctcatctgggcaaaattcaagagacgcccatggtggccctgcaggatttgttctgatccgttgattaacacacattcaaaaatgaaagtttccaaccggaggccctatcggcagtactacgtggaggcttttggagatccttctgagagagcctgggtggctggaaaagcaatcgtcatgtttgaaggcagacatcaattcgaagagctacctgtccttaggagaagagggaaacagaaagaaaaaggatataggcataaggttcctcagaaaattttgagtaaatgggaagccagtgttggacttgcagaacagtatgatgttcccaaggggtcaaagaaccgaaaatgtattcctggttcaatcaagttggacagtgaagaagatatgccatttgaagactgcacaaatgatcctgagtcagaacatgacctgttgcttaatggctgtttgaaatcactggcttttgattctgaacattctgcagatgagaaggaaaagccttgcgctaaatctcgagccagaaagagctctgataatccaaaaaggactagtgtgaaaaagggccacatacaatttgaagcacataaagatgaacggaggggaaagattccagagaaccttggcctaaactttatctctggggatatatctgatacgcaggcctctaatgaactttccaggatagcaaatagcctcacagggtccaacactgccccaggaagttttctgttttcttcctgtggaaaaaacactgcaaagaaagaatttgagacttcaaatggtgactctttattgggcttgcctgagggtgctttgatctcaaagtgttctcgagagaagaataaaccccaacgaagcctggtgtgtggttcaaaagtgaagctctgctatattggagcaggtgatgaggaaaagcgaagtgattccattagtatctgtaccacttctgatgatggaagcagtgacctggatcccatagaacacagctcagagtctgataacagtgtccttgaaattccagatgctttcgatagaacagagaacatgttatctatgcagaaaaatgaaaagataaagtattctaggtttgctgccacaaacactagggtaaaagcaaaacagaagcctctcattagtaactcacatacagaccacttaatgggttgtactaagagtgcagagcctggaaccgagacgtctcaggttaatctctctgatctgaaggcatctactcttgttcacaaaccccagtcagattttacaaatgatgctctctctccaaaattcaacctgtcatcaagcatatccagtgagaactcgttaataaagggtggggcagcaaatcaagctctattacattcgaaaagcaaacagcccaagttccgaagtataaagtgcaaacacaaagaaaatccagttatggcagaacccccagttataaatgaggagtgcagtttgaaatgctgctcttctgataccaaaggctctcctttggccagcatttctaaaacacccccg

SEQ ID NO: 279878 - DNA, 585 bp, Artificial Sequence
  derived and/or modified sequence
acaagcccgacttcacccgccctgaaccccgaagagttgatgccggcccaggatggatcagacctgtgaactacccagaagaaattgtctgctgcccttttccaatccagtgaatttagatgcccctgaagacaaggacagccctttcggatgatccagattccagtaccagtacattaggaaacatgctagaattacctggaacttcatcatcatctacttcacaggaattgccattttgtcaacctaagaaaaagtctacgccactgaagtatgaagttggagatctcatctgggcaaaattcaagagacgcccatggtggccctgcaggatttgttctgatccgttgattaacacacattcaaaaatgaaagtttccaaccggaggccctatcggcagtactacgtggaggcttttggagatccttctgagagagcctgggtggctggaaaagcaatcgtcatgtttgaaggcagacatcaattcgaagagctacctgtccttaggagaagagggaaacagaaagaaaaaggatataggcataaggttcctcagaaaattttgagtaaatgggaagccagtg

SEQ ID NO: 279879 - DNA, 533 bp, Artificial Sequence
  derived and/or modified sequence
ggccgggtagggggttcgcctgcggccgcgtctgctcggggcctgaggcctcgaagaccccagcccaagcccccaggttgatgccggcccaggatggatcagacctgtgaactacccagaagaaattgtctgctgcccttttccaatccagtgaatttagatgcccctgaagacaaggacagccctttcggatgatccagattccagtaccagtacattaggaaacatgctagaattacctggaacttcatcatcatctacttcacaggaattgccattttgtcaacctaagaaaaagtctacgccactgaagtatgaagttggagatctcatctgggcaaaattcaagagacgcccatggtggccctgcaggatttgttctgatccgttgattaacacacattcaaaaatgaaagtttccaaccggaggccctatcggcagtactacgtggaggcttttggagatccttctgagagagcctgggtggctggaaaagcaatcgtcatgtttgaaggcagacatcaattcgaag

SEQ ID NO: 279880 - DNA, 7283 bp, Artificial Sequence
  derived and/or modified sequence
atgcctttaaagaccagaaccgctctttcggatgaccctgatagcagtaccagtacattgggcaacatgctggagctccctgggacatcatcatctagtaccagccaggagctgcccttttgccagcctaaaaagaagtctacacccctgaagtacgaagtcggagacctcatctgggccaagtttaagcgcagaccttggtggccctgcagaatttgcagtgatcccttaatcaacacccacagtaaaatgaaggtttctaatagaagaccatacagacagtattatgtcgaggcctttggggatcctagcgaaagggcctgggtggcagggaaggccatcgtcatgttcgagggacgccaccagttcgaggagctgccagtgcttcgaagacggggtaagcagaaggaaaagggatatcgccacaaggtgccacaaaaaattctttcaaagtgggaggcatccgtgggactggcagaacagtatgatgtcccaaagggtagcaaaaaccggaagtgtattcccggtagtatcaagcttgactctgaggaagacatgcccttcgaagactgtactaatgaccccgagtccgaacatgatttgctgctgaacggctgcttgaagagcctagcctttgactctgagcattctgccgatgagaaagaaaaaccatgcgctaagtcccgggctcggaagtcaagcgacaaccccaaaagaacttctgttaagaagggacacatccagtttgaggcccacaaggatgagcggaggggtaaaatacctgaaaacctgggtctgaattttatctctggtgatattagcgacacacaggcaagtaatgagttgagtaggatcgcgaatagtctcactgggtccaacactgccccaggctcctttttgttctcgagctgtggcaagaacaccgctaaaaaagagttcgagactagcaatggcgattctttacttggcctccctgaaggggctctcatttccaagtgcagcagggagaaaaataaaccacaaagatcattggtgtgcggctcaaaggttaagctatgctacattggcgcaggtgatgaagaaaagagatcggatagcataagcatttgtactactagcgacgacggctccagcgatctggaccccatcgagcactccagcgaatctgataatagcgtgctcgagatcccagatgccttcgaccggacagaaaacatgttgtctatgcagaagaacgaaaaaattaaatatagccgctttgccgctaccaatacaagggtgaaggctaaacagaaacccctcatctctaatagtcatacagatcacctaatgggttgcactaagtcggccgagcccggaaccgaaacgtcccaggtcaacctgtctgatttgaaggcatcgacattggtgcacaaaccccagagcgattttactaatgatgccctttcacccaagttcaacctcagcagcagcatctcgagcgaaaatagcctaatcaaagggggtgcagcaaaccaggccctgttgcactccaagagtaaacaaccaaaatttaggagcattaaatgtaaacataaagaaaatcctgtgatggctgagcccccagtcattaatgaggagtgctccctcaagtgttgcagcagcgacacaaagggtagcccactggcctcgatctctaaaagcggcaaggtagacggcctaaagctcctcaataatatgcacgagaagacaagagactcctcggacatagagaccgctgtggtgaagcatgtgttgtccgagttaaaagaactgtcatacagatctctgggggaggatgtgtccgacagtgggaccagtaaaccgtccaaacctctgctattcagtagcgctagttcccagaaccacatacctattgagcctgactacaaattcagtacattactcatgatgttgaaagacatgcacgacagcaaaacgaaggagcagcggctcatgaccgctcaaaacctggtaagttatcgttctcctggcaggggtgactgttctacgaattctcccgtcggcgtatcaaaagtgctggtctccggtggcagtacccataactccgagaagaagggcgacgggactcaaaattccgcaaatccgtccccctcaggcggagactcagcactgtcaggcgaactgtccgccagcctgcccggtctgctgtccgacaagagagatttaccagcaagcggtaagtctcgaagtgattgcgtgacaagaagaaactgtgggagatctaagccttcttccaagcttcgtgacgccttttctgcccagatggttaagaataccgttaaccggaaagcgctgaaaacagagaggaaacgtaagttaaatcagctcccctccgttactctggatgcagtcctccagggcgatagagagagaggcggatctttgcggggaggcgctgaggacccgtcaaaagaggaccccctgcagattatgggccacctcactagcgaggatggtgatcacttcagcgacgtacacttcgattcgaaggtgaagcagtcagaccccggaaaaatttccgaaaagggcctaagtttcgagaatggcaaggggcctgagttagactccgtcatgaacagcgagaacgacgaactgaatggagttaatcaggtggtcccaaagaagaggtggcagagactgaatcagcggaggaccaaaccgagaaaacgaatgaatcgattcaaggagaaggagaacagtgagtgcgctttccgtgttctgctccccagcgatccagttcaagagggacgtgatgagttccctgagcataggaccccgagcgcctcaattcttgaagagcctctgacagaacaaaatcatgcggactgtttagacagtgccggtcctcgcctaaatgtgtgcgataagtccagtgcttctatcggcgacatggagaaggaacccggtatcccttcactgaccccccaggccgaactgccagagcctgcagttcggtctgaaaagaagcggctccgtaaaccaagcaagtggctgctcgaatataccgaggagtatgatcagattttcgcacctaaaaagaaacaaaagaaggtgcaggaacaggttcataaggtttcttcgcgatgtgaagaggaatcattgctcgctcggggtcggagcagtgcacagaacaagcaggtggacgaaaattctcttatcagcacaaaagaagaaccccctgttctagaacgtgaggctccatttttggagggacctttagcacagtcagaactcggaggcggacatgctgagttgccgcagctgacactgagtgtgcctgttgccccagaggtgtcaccaagaccagctctagagtccgaggaactgctagtcaagacaccaggcaattatgagagcaagcgacaaagaaaacccacgaaaaagctgcttgagagcaacgacttggatccgggttttatgcccaaaaaaggcgacctgggcctctccaagaaatgctacgaagcgggtcatctggagaacggaatcactgagtcatgtgccacgtcatacagcaaggacttcgggggaggaaccaccaagattttcgataaaccacgtaagagaaagagacagcgccatgcagccgctaaaatgcagtgcaaaaaggttaagaacgatgatagttctaaggaaatcccaggctcagagggcgaactaatgcctcatagaaccgccacaagcccaaaagagactgttgaggaaggcgtcgagcatgatcccggaatgcccgctagtaaaaaaatgcagggagaaaggggcggaggggcagcgctgaaggaaaatgtgtgtcagaattgcgagaagctcggcgaattgttactgtgtgaggcccagtgttgtggggctttccatctcgagtgcctggggctgacagaaatgcccagaggcaaatttatctgtaatgagtgccgcactggcattcacacatgtttcgtctgtaaacaatcgggagaggatgtgaagaggtgtctactaccactctgcgggaaattttaccacgaagagtgcgtgcaaaaatatccacccacagtgatgcagaataagggtttcaggtgttcccttcacatctgtattacatgccacgctgcaaaccccgctaacgtctccgcctcaaaaggcaggctcatgcggtgcgttcgatgccccgttgcttaccatgctaacgacttttgcctggctgctgggagtaaaatacttgccagcaactcaattatttgtcctaaccatttcacaccccgaagaggatgccgcaatcacgagcacgtaaacgtgagctggtgtttcgtttgcagcgagggcggatcactcttgtgttgtgacagctgccccgctgcattccatcgagaatgcttgaacatcgatattccggaaggcaattggtattgcaatgactgcaaagcagggaaaaagccgcattatcgagagatcgtttgggtgaaagttggccgatatagatggtggcccgctgaaatttgtcaccccagggctgtcccctctaatatcgacaaaatgagacacgacgtgggcgaattcccagtgctatttttcgggagcaatgattatttgtggactcaccaggcaagagtgttcccgtacatggagggcgacgtcagctccaaggacaagatgggaaagggcgtcgatggcacgtacaaaaaggctttacaggaggccgcagcccgattcgaggaacttaaagcacaaaaggaactgaggcaactgcaagaagatagaaagaatgacaagaaaccaccgccatacaaacacattaaggttaaccggccaatcgggagggtccaaatcttcacggctgacctgagcgaaattccaagatgcaattgtaaggctactgatgagaacccatgcggcatagatagtgaatgtatcaataggatgcttctttacgagtgtcatcctaccgtgtgtcccgcaggcggacgttgccaaaaccagtgcttttcgaaaaggcagtatcctgaagtggagatctttaggactctgcagaggggatggggcttgcggacaaagacagatatcaagaaaggggaattcgtgaatgaatatgttggtgaactgatagatgaagaggagtgtcgggctaggatcagatacgcacaggaacacgatataactaacttttatatgttaacactggacaaagacagaattatcgatgctgggccaaaggggaattacgcaagattcatgaaccactgttgtcagcccaactgcgaaactcaaaaatggtctgtcaatggtgataccagggtcggcctgtttgctctaagcgatattaaagccggaacagagctgacatttaactacaatctggaatgcctcggcaacgggaagacggtctgcaaatgtggcgcacccaactgcagtggcttccttggcgttcgcccaaagaatcaaccaatcgctaccgaagagaagtctaaaaaattcaagaagaagcagcaggggaagaggcggacccaaggggaaatcacgaaagagcgcgaggacgaatgttttagctgcggggatgccggtcaactcgtgtcatgtaagaaaccgggatgtccaaaagtgtatcacgccgattgtttaaaccttaccaagcgcccagccggaaagtgggaatgtccttggcaccaatgcgatatctgcggtaaagaagccgctagtttctgtgaaatgtgccccagcagtttctgtaaacaacatagggaaggcatgctgttcatcagtaagttggacgggagactcagctgcactgagcatgatccttgcggacccaacccgcttgaacctggtgaaattcgcgaatatgttccaccaccggttcctttaccccctggcccttctacgcatctggctgaacaaagtacagggatggcggctcaagctcccaagatgtcagataagccccctgcggacacaaatcagatgctcagcctcagcaagaaggcacttgcaggcacctgccagcgccctctactccctgaacgtccattggagagaaccgactctcggccacaaccactcgacaaggtgagagacctcgcaggctccgggaccaaaagccaaagcctcgtgtcatcacagcgacccctggatagacctccagctgtggctggtcctcgaccccagttgtcggacaaaccttctcctgtgactagcccatcttcctccccatccgtgcgcagccaacctcttgagcggccacttggcactgcagacccccgactagacaagtccataggggctgccagtccccgacctcagtcactcgaaaagacttctgtgccaaccgggctgcgattgcctccccctgatagattactgatcacgtcgtcgcctaaaccacagaccagtgatcgacccaccgacaagccccacgccagtctgtcccaacgcttgccccctccagagaaggtgctaagcgctgtcgtccaaacacttgtagctaaagagaaagccctgcgcccagtcgaccagaacacccaatccaaaaaccgggctgcactggtcatggatttgatagacctgacccctagacaaaaagaacgcgcagcatctcctcaccaagtcaccccacaggcagacgaaaagatgccagtcttggaaagcagttcctggccagcctcaaaggggctcggacatatgcctcgagccgtcgagaagggttgcgtctcagaccctctgcagacatcaggaaaagccgctgcccctagtgaagatccctggcaggctgtgaaaagcctgactcaggctaggctgctgagtcagccacccgctaaagccttcttgtatgagcccaccacgcaggcaagcggccgagcgtcagcaggcgcagagcagacaccaggacctctttctcaaagccccggactcgtcaagcaggctaagcagatggtcggaggacagcagctgccagccctggccgctaaaagcggccagagctttcgcagtctcggcaaggcacctgcgagtctcccgaccgaggaaaagaaacttgtgaccactgaacagtctccttgggcgctggggaaggcatcatcgagagctggtttgtggccaatcgtggccggacagacattggcacagtcttgttggagcgccggttcaacccagaccctcgcacagacttgctggagtctgggtcggggtcaggacccaaagcccgagcagaataccctgccagctcttaatcaggcaccatcctcccacaagtgtgccgaaagtgagcagaaata

SEQ ID NO: 279881 - DNA, 7283 bp, Artificial Sequence
  derived and/or modified sequence
atgccactgaagacacggaccgcgctgtctgacgatcccgatagcagcactagcacgctaggtaacatgctggagctccctggaactagcagtagtagtacgtctcaagaactacccttttgccagcctaaaaaaaagagcacaccactgaagtatgaggtcggggatctgatctgggcaaagtttaagaggcgaccttggtggccttgccgcatctgtagtgatcctctgatcaacacccactccaagatgaaggtatctaatcgcagaccctaccgccagtactacgtagaggcctttggggacccatcagagcgagcttgggtcgccggaaaggccatcgtgatgttcgagggacggcatcagtttgaggagctgccagtgctgcgcagacgcggaaagcagaaggaaaagggatacagacacaaggtgccccaaaagatactatcaaaatgggaggccagcgtgggcctggcagagcaatatgacgtcccaaaaggatccaaaaatcgcaagtgtatacctggcagtatcaaactggatagtgaagaggacatgccatttgaagactgtacaaacgaccccgagtcagagcatgatctcctcctgaacggttgtctgaagtcgctcgccttcgacagcgagcactcagccgacgagaaagaaaaaccctgcgcaaaatctcgagctaggaaatcctccgacaatcccaaacggacctccgtgaaaaaaggtcacattcagtttgaggcacataaggatgaacgtcggggtaagatacctgagaacctcggactgaacttcatttctggggatataagcgatacacaggccagtaacgaactctctagaattgccaactctctcacaggctcaaataccgctccaggcagtttcttattctcatcttgtggtaaaaacaccgccaaaaaagaattcgaaacctctaatggcgacagtcttcttggattacctgagggcgcactgatctccaaatgctctagagaaaagaacaagccacagcgcagcctcgtctgcggatcgaaggttaagctgtgttatattggagcaggtgatgaagagaaacggtcagacagtatcagcatctgtacgacatcagacgatggaagtagtgacctcgacccaattgagcacagtagcgagtccgataactctgtgttggagatccctgacgcgttcgatcgaacagaaaacatgttgagcatgcagaagaatgagaaaatcaaatattctcgattcgctgcaactaacacacgggtaaaggcgaaacagaagcctcttatatccaatagtcacaccgatcatttgatgggatgcacaaagagcgctgagccgggaaccgagaccagccaggttaacctcagcgacctgaaagctagcaccctcgtgcataagccgcaatcagactttacaaacgacgccctgtcgccaaagtttaacctgtcttcaagcatttcaagcgaaaattccctgatcaagggtggtgccgcaaatcaggccctgctgcattcgaagtccaagcagccgaagttcagatcaatcaaatgcaagcataaggagaatcctgtcatggccgagccaccggtgattaacgaagaatgttcactgaagtgctgctcttctgacaccaagggttcaccactggcctccatcagcaagagtggaaaggtggacggactgaaattgctgaataacatgcatgagaagacaagggacagttcagacattgagaccgcagtggtgaaacatgtgctctccgagctgaaagaactctcctatcgctcgctgggcgaggacgtttccgatagcggcactagtaaaccttcgaagccattactgttctcctctgcctcaagccagaaccacatacctatcgaacctgactacaagttctcaactcttctcatgatgctgaaagatatgcatgactccaagaccaaggagcagcgattgatgacagcacaaaacctggtgagctacaggtctccaggtcgaggcgattgtagtactaacagtcccgtgggcgtttctaaagtgctcgtgtctggcggatctacccataacagtgagaagaagggggatggcacacaaaacagtgccaatccaagtccctctgggggagactctgcactgagcggagagctgtcagccagtctgccagggctactgtccgataaaagagatctgccggctagtggtaagtcccgatccgattgcgtcacacgccgtaactgcggtcggtctaaaccttcaagcaaactgagagatgctttcagcgcacagatggttaaaaacactgtgaaccgtaaggccctgaagaccgagaggaaacgaaagctcaaccagttgcctagcgtgacactggacgctgtcctgcagggtgacagagagaggggagggtcccttaggggcggagccgaggaccctagcaaagaggatcccctgcaaatcatgggccacttaacttcagaggacggagaccattttagcgatgtccacttcgactccaaagtaaagcagagtgatcctggcaaaatcagcgaaaagggcctgagcttcgagaatggaaagggccctgagctggactcagtgatgaattctgagaatgatgagctgaacggcgtgaatcaggtcgttccaaagaaaaggtggcagagacttaaccagcgccgtactaaaccacgaaagcgcatgaacagatttaaggagaaagagaacagtgagtgcgcctttcgcgtgctcctcccaagcgaccccgtgcaggagggtcgagatgaattcccagaacataggacccctagtgcttccatcttagaagaacccttgactgaacagaatcacgccgactgtctggactctgcaggccctcggctgaatgtgtgtgacaaatccagcgcgagcattggagatatggaaaaggagcccggaatcccctccctgactccacaggcagagctgcctgagcccgcagtgagatcggaaaaaaaacggttgagaaaaccttcaaaatggctccttgagtacaccgaagaatatgatcagatcttcgctcccaaaaagaagcagaaaaaagtccaagaacaggtccacaaggtatccagccgatgcgaggaggaaagccttttggcgagaggacgctctagcgcacaaaacaagcaggttgacgagaactcactgatctccaccaaagaagaaccacctgtattggagagggaagctccgttcctggagggacccctggcacaatccgagttgggcggaggtcacgcagagctcccccagcttaccctgtcagtccctgtcgcacccgaagtgtctccacgcccagcgctggaatcagaggaactcttagtgaagacgccaggaaactacgagtcaaaacggcagcgtaaaccaactaaaaaactcttggagtctaacgatctggacccaggattcatgccgaagaagggcgatttggggttgtccaagaagtgctatgaggcgggacacctcgagaacgggattactgaatcttgcgccacttcatatagcaaggattttggcggtgggactactaagatattcgacaagcctaggaagcgtaagagacagcggcacgccgcagcaaagatgcagtgcaagaaggtgaagaacgatgacagctcaaaagagattcccggaagcgagggcgaactgatgccccaccggaccgcaacctcaccaaaggaaacggtagaagagggtgtggagcacgatcccggtatgccagctagtaagaaaatgcagggcgaacggggaggcggtgccgctctgaaagagaatgtttgtcagaactgtgagaagttgggtgagctcctgttgtgtgaagctcagtgctgcggcgcatttcatctcgaatgcctaggtctcacggaaatgccgagaggaaaatttatttgcaatgagtgtaggaccggtatacatacgtgctttgtctgtaagcagtctggcgaagatgtgaagaggtgcttattacccctctgtgggaagttctaccacgaagaatgcgtccagaagtatcccccaaccgtcatgcagaacaaaggcttccgttgttccctgcatatctgtattacctgccacgctgccaatccagcaaacgtcagtgctagcaaggggcgtctgatgcgctgcgtgagatgcccggttgcttatcatgccaacgatttttgcctggccgctgggtccaagattctggcctccaacagcatcatctgcccaaaccacttcacaccaagaagaggttgtcggaaccatgaacacgtgaacgtttcctggtgctttgtttgtagtgaaggtggcagtctgctatgctgcgacagctgtcccgctgcattccaccgcgaatgcctaaacatcgacatcccggagggtaactggtattgcaatgactgtaaggccggtaagaagcctcactaccgcgagatcgtgtgggtcaaggtgggtcgataccgctggtggccggctgaaatatgccacccaagggcagttccatccaacatagacaaaatgagacatgatgttggggagttccccgtcctgttttttggatctaacgattacctttggacccatcaagctcgagtgtttccatacatggagggcgatgtgtcctccaaagataaaatgggcaaaggagtagacggcacttataaaaaagccctccaagaagctgcagccagattcgaggagctcaaggcccagaaggaactccggcagctgcaagaggacaggaaaaacgacaaaaaacctcccccatacaagcacattaaggtgaaccgtccaattggacgggtgcagatctttacagcggacctgagcgagataccccgatgcaactgtaaggcaaccgatgagaacccctgtggcatagatagtgagtgcataaacagaatgcttctctacgaatgccatcctactgtctgtccagctggcggaaggtgccagaaccagtgtttcagcaagcgacagtaccccgaagtggaaatcttccgcactctgcagagaggatgggggctccggacgaagactgacatcaaaaagggcgagtttgtaaatgaatacgttggagaactgattgacgaagaagagtgtcgcgctagaatacgctatgcccaggagcacgacatcactaatttctacatgttgacactggataaagatcgcatcattgatgcaggacccaaaggcaattacgccaggtttatgaatcactgttgccaacccaattgtgagacacaaaaatggtcagtaaatggcgatacccgagttggattatttgccctcagcgacatcaaggctggaacagagcttacctttaattataacctggaatgcctaggaaatggcaaaaccgtttgtaagtgcggcgctcccaattgcagcggcttcttgggcgttagacctaaaaatcagccgatcgcaactgaagagaagtccaaaaagttcaagaagaagcagcaggggaagcgacgcacccagggcgagattactaaagagcgcgaggatgaatgtttctcatgtggagacgccggtcaactcgtctcctgcaagaaacccggatgcccaaaagtttatcacgccgactgccttaacctgacgaagagacccgcagggaagtgggaatgcccttggcaccagtgtgacatctgcggcaaggaggcggcaagcttctgcgagatgtgccctagttcattctgtaagcaacatcgagagggtatgctttttatctccaaactggatggtaggttgtcttgcacagagcatgatccttgtgggccaaaccccctcgagccaggggaaatacgagagtacgttccccctcctgtgccacttcctccaggaccaagtacccatttggcggaacagtcaacgggtatggccgctcaggctcccaaaatgagcgacaagccgcctgccgacacaaaccaaatgctctctctgagcaaaaaggccctagcgggaacttgccagcggccactgctccccgagagaccgctggagagaacagactcccggccacagccactggataaggtcagagacctggctgggtcagggaccaagtcccagtcgctcgtgtccagtcagcgccctctcgatcgcccaccggcagtagctggaccaaggccgcagttgtccgacaagccttctcctgttaccagtcctagctctagcccctctgtgcggagccagccacttgagagaccattgggaacggctgatcccaggctggacaaaagcatcggtgccgcttcaccgagacctcaatctttggaaaagacctctgtgcccacgggactccgcctgcccccaccagataggctactcattacatcgtcccccaaacctcagacttctgaccggcctactgacaagccacatgcttccctctcgcagaggttacccccaccagagaaagtactgtccgccgtcgtacagacgttggtggcgaaagaaaaggcactccgaccggtggaccaaaacacacaaagcaaaaatcgagccgcattggtcatggatctgatagatctaacccctagacagaaggagcgtgccgcttccccccaccaagtgacacctcaggccgacgaaaaaatgccagtcttggaaagttcaagttggccagcctccaaaggtctgggacacatgcctcgggcagttgaaaagggctgtgtcagtgaccctctccagaccagcggaaaggccgcagccccaagcgaagacccttggcaggctgtcaaatccctcacacaagccaggctcctgtcgcagccacccgctaaagccttcctgtatgagcctactacgcaggcaagcggtcgtgcctctgcaggggcagagcagactcccggtcccctcagccagtcccccggattggtgaagcaagcgaagcaaatggtgggtgggcagcaacttccggctctggctgccaaaagcggacagtcatttaggtcccttggcaaggcgccagcctctttgccgaccgaggagaagaaactggtgacaacggaacagtctccgtgggctctggggaaagcttcaagccgcgctggcttgtggcctatcgtagccggacaaacccttgcacagagttgctggtctgcaggctcaactcagaccctagcccagacttgctggagtctgggaagaggtcaggatcccaagcccgaacaaaacaccctgccggcactgaaccaagccccatcctcccataagtgtgcagaatccgagcaaaagta

SEQ ID NO: 279882 - DNA, 1692 bp, Artificial Sequence
  derived and/or modified sequence
atgcctttgaagaccagaacagccttgagcgatgatccggacagctccacctctacgttggggaatatgctggagctgcctggtacaagctcaagttcgacttcccaagagctgcccttctgtcagcctaaaaagaaatccaccccgctgaaatatgaggtgggggacttaatctgggccaaatttaagcggaggccttggtggccttgccgcatatgttctgaccccctgatcaacacacactcaaagatgaaggtgtcaaatagacggccttatagacagtattacgtggaggcatttggggatccctctgagagggcttgggttgctggaaaagcaattgtgatgtttgaaggcagacaccagtttgaggaactgccggtcctgagaagaagaggcaagcagaaggagaagggttaccgacacaaggtacctcagaaaattctgagcaagtgggaggcctcagtgggcctagcggaacagtacgatgtgccgaagggctccaagaatcgcaaatgcattccaggtagcattaagctggacagtgaggaagacatgccatttgaagactgcacaaacgaccctgaatcggagcacgatctgttgctcaacggatgtcttaaaagccttgccttcgactccgagcactcggcagacgagaaggaaaagccctgtgctaaaagccgagccagaaaatcatcagacaacccaaaacggacttctgttaagaagggacacatacaatttgaggcacacaaagatgaaaggaggggcaaaatccctgaaaacctaggtctgaactttatttcgggtgatattagtgacacccaagcaagtaatgaactcagtcgtatcgccaattcactaacaggctcaaacacagcacctgggtcatttttattttcttcctgcgggaagaacaccgctaaaaaagaattcgagacctccaatggagatagcttgctgggcctccctgaaggcgcactaatctcaaagtgcagtagagagaaaaacaaaccgcaacggagcctagtgtgcggttcgaaagtgaagttatgctatatcggcgctggtgacgaggagaaacggtcagattctattagcatctgcacgacttcagatgacggctcctctgacctggaccctatcgagcactcatctgaatcggacaatagcgtgctcgaaatccccgatgcattcgatcggactgagaacatgctgtcaatgcagaagaacgagaaaatcaagtattcgaggttcgccgcaaccaatacgcgcgtgaaggcaaagcaaaagccgctgataagcaactcacatacagaccatttgatgggctgtactaaatcagccgagcccggtactgagaccagtcaggtgaaccttagtgatctcaaggccagcactctcgtacataaaccacagtcggattttacgaatgatgcccttagtcctaaatttaatctgagttcctctatctcttcagagaacagcttgattaagggaggtgccgctaatcaggcactgctgcactccaaatccaagcagcctaagttccgctccattaaatgcaagcacaaggagaatcctgtcatggcagaaccacccgtaatcaatgaggagtgttctctgaaatgctgctctagtgatacaaaggggagccccctggcttcgattagcaaaacacctccctag

SEQ ID NO: 279883 - DNA, 468 bp, Artificial Sequence
  derived and/or modified sequence
atgcccctcaagactagaacggccttgagcgacgatcccgacagctctaccagtacattaggaaatatgcttgagctgcctggaacaagctcatcttccaccagtcaggagctacccttttgccagcctaaaaagaaatctacacccctgaagtatgaagtcggagacctgatttgggctaagtttaagagacgcccttggtggccctgtaggatttgcagtgatccccttatcaacacacactccaagatgaaggtgtcaaatcggagaccttaccgacaatactacgttgaggccttcggcgacccttcagaaagagcctgggttgccggaaaggccatcgttatgtttgaaggcaggcatcagttcgaggaactacctgtactacgtcggcgaggaaaacagaaggaaaaaggataccgtcataaggtccctcaaaaaatattatctaagtgggaggcatcctag

SEQ ID NO: 279884 - DNA, 375 bp, Artificial Sequence
  derived and/or modified sequence
atgcctctcaaaacacgaacagctctgtccgacgatcccgattctagtacctcaacacttggcaacatgctggagctgcctgggacaagctccagtagtacaagccaggaactgccgttctgccagcctaagaagaaatccacacctctgaaatatgaggttggcgatctgatctgggcaaaatttaagcgtcgcccttggtggccctgtagaatatgcagtgatcctctgattaacactcactccaaaatgaaggtcagcaatcggagaccatacaggcagtactacgttgaggcattcggtgacccttccgaacgcgcttgggtcgctggcaaggctatcgtcatgttcgagggacggcatcagttcgagtag

SEQ ID NO: 279885 - DNA, 7284 bp, Artificial Sequence
  derived and/or modified sequence
atgcccctgaagaccagaaccgccctgagcgacgaccccgacagcagcaccagcaccctgggcaacatgctggagctgcccggcaccagcagcagcagcaccagccaggagctgcccttctgccagcccaagaagaagagcacccccctgaagtacgaggtgggcgacctgatctgggccaagttcaagagaagaccctggtggccctgcagaatctgcagcgaccccctgatcaacacccacagcaagatgaaggtgagcaacagaagaccctacagacagtactacgtggaggccttcggcgaccccagcgagagagcctgggtggccggcaaggccatcgtgatgttcgagggcagacaccagttcgaggagctgcccgtgctgagaagaagaggcaagcagaaggagaagggctacagacacaaggtgccccagaagatcctgagcaagtgggaggccagcgtgggcctggccgagcagtacgacgtgcccaagggcagcaagaacagaaagtgcatccccggcagcatcaagctggacagcgaggaggacatgcccttcgaggactgcaccaacgaccccgagagcgagcacgacctgctgctgaacggctgcctgaagagcctggccttcgacagcgagcacagcgccgacgagaaggagaagccctgcgccaagagcagagccagaaagagcagcgacaaccccaagagaaccagcgtgaagaagggccacatccagttcgaggcccacaaggacgagagaagaggcaagatccccgagaacctgggcctgaacttcatcagcggcgacatcagcgacacccaggccagcaacgagctgagcagaatcgccaacagcctgaccggcagcaacaccgcccccggcagcttcctgttcagcagctgcggcaagaacaccgccaagaaggagttcgagaccagcaacggcgacagcctgctgggcctgcccgagggcgccctgatcagcaagtgcagcagagagaagaacaagccccagagaagcctggtgtgcggcagcaaggtgaagctgtgctacatcggcgccggcgacgaggagaagagaagcgacagcatcagcatctgcaccaccagcgacgacggcagcagcgacctggaccccatcgagcacagcagcgagagcgacaacagcgtgctggagatccccgacgccttcgacagaaccgagaacatgctgagcatgcagaagaacgagaagatcaagtacagcagattcgccgccaccaacaccagagtgaaggccaagcagaagcccctgatcagcaacagccacaccgaccacctgatgggctgcaccaagagcgccgagcccggcaccgagaccagccaggtgaacctgagcgacctgaaggccagcaccctggtgcacaagccccagagcgacttcaccaacgacgccctgagccccaagttcaacctgagcagcagcatcagcagcgagaacagcctgatcaagggcggcgccgccaaccaggccctgctgcacagcaagagcaagcagcccaagttcagaagcatcaagtgcaagcacaaggagaaccccgtgatggccgagccccccgtgatcaacgaggagtgcagcctgaagtgctgcagcagcgacaccaagggcagccccctggccagcatcagcaagagcggcaaggtggacggcctgaagctgctgaacaacatgcacgagaagaccagagacagcagcgacatcgagaccgccgtggtgaagcacgtgctgagcgagctgaaggagctgagctacagaagcctgggcgaggacgtgagcgacagcggcaccagcaagcccagcaagcccctgctgttcagcagcgccagcagccagaaccacatccccatcgagcccgactacaagttcagcaccctgctgatgatgctgaaggacatgcacgacagcaagaccaaggagcagagactgatgaccgcccagaacctggtgagctacagaagccccggcagaggcgactgcagcaccaacagccccgtgggcgtgagcaaggtgctggtgagcggcggcagcacccacaacagcgagaagaagggcgacggcacccagaacagcgccaaccccagccccagcggcggcgacagcgccctgagcggcgagctgagcgccagcctgcccggcctgctgagcgacaagagagacctgcccgccagcggcaagagcagaagcgactgcgtgaccagaagaaactgcggcagaagcaagcccagcagcaagctgagagacgccttcagcgcccagatggtgaagaacaccgtgaacagaaaggccctgaagaccgagagaaagagaaagctgaaccagctgcccagcgtgaccctggacgccgtgctgcagggcgacagagagagaggcggcagcctgagaggcggcgccgaggaccccagcaaggaggaccccctgcagatcatgggccacctgaccagcgaggacggcgaccacttcagcgacgtgcacttcgacagcaaggtgaagcagagcgaccccggcaagatcagcgagaagggcctgagcttcgagaacggcaagggccccgagctggacagcgtgatgaacagcgagaacgacgagctgaacggcgtgaaccaggtggtgcccaagaagagatggcagagactgaaccagagaagaaccaagcccagaaagagaatgaacagattcaaggagaaggagaacagcgagtgcgccttcagagtgctgctgcccagcgaccccgtgcaggagggcagagacgagttccccgagcacagaacccccagcgccagcatcctggaggagcccctgaccgagcagaaccacgccgactgcctggacagcgccggccccagactgaacgtgtgcgacaagagcagcgccagcatcggcgacatggagaaggagcccggcatccccagcctgaccccccaggccgagctgcccgagcccgccgtgagaagcgagaagaagagactgagaaagcccagcaagtggctgctggagtacaccgaggagtacgaccagatcttcgcccccaagaagaagcagaagaaggtgcaggagcaggtgcacaaggtgagcagcagatgcgaggaggagagcctgctggccagaggcagaagcagcgcccagaacaagcaggtggacgagaacagcctgatcagcaccaaggaggagccccccgtgctggagagagaggcccccttcctggagggccccctggcccagagcgagctgggcggcggccacgccgagctgccccagctgaccctgagcgtgcccgtggcccccgaggtgagccccagacccgccctggagagcgaggagctgctggtgaagacccccggcaactacgagagcaagagacagagaaagcccaccaagaagctgctggagagcaacgacctggaccccggcttcatgcccaagaagggcgacctgggcctgagcaagaagtgctacgaggccggccacctggagaacggcatcaccgagagctgcgccaccagctacagcaaggacttcggcggcggcaccaccaagatcttcgacaagcccagaaagagaaagagacagagacacgccgccgccaagatgcagtgcaagaaggtgaagaacgacgacagcagcaaggagatccccggcagcgagggcgagctgatgccccacagaaccgccaccagccccaaggagaccgtggaggagggcgtggagcacgaccccggcatgcccgccagcaagaagatgcagggcgagagaggcggcggcgccgccctgaaggagaacgtgtgccagaactgcgagaagctgggcgagctgctgctgtgcgaggcccagtgctgcggcgccttccacctggagtgcctgggcctgaccgagatgcccagaggcaagttcatctgcaacgagtgcagaaccggcatccacacctgcttcgtgtgcaagcagagcggcgaggacgtgaagagatgcctgctgcccctgtgcggcaagttctaccacgaggagtgcgtgcagaagtacccccccaccgtgatgcagaacaagggcttcagatgcagcctgcacatctgcatcacctgccacgccgccaaccccgccaacgtgagcgccagcaagggcagactgatgagatgcgtgagatgccccgtggcctaccacgccaacgacttctgcctggccgccggcagcaagatcctggccagcaacagcatcatctgccccaaccacttcacccccagaagaggctgcagaaaccacgagcacgtgaacgtgagctggtgcttcgtgtgcagcgagggcggcagcctgctgtgctgcgacagctgccccgccgccttccacagagagtgcctgaacatcgacatccccgagggcaactggtactgcaacgactgcaaggccggcaagaagccccactacagagagatcgtgtgggtgaaggtgggcagatacagatggtggcccgccgagatctgccaccccagagccgtgcccagcaacatcgacaagatgagacacgacgtgggcgagttccccgtgctgttcttcggcagcaacgactacctgtggacccaccaggccagagtgttcccctacatggagggcgacgtgagcagcaaggacaagatgggcaagggcgtggacggcacctacaagaaggccctgcaggaggccgccgccagattcgaggagctgaaggcccagaaggagctgagacagctgcaggaggacagaaagaacgacaagaagccccccccctacaagcacatcaaggtgaacagacccatcggcagagtgcagatcttcaccgccgacctgagcgagatccccagatgcaactgcaaggccaccgacgagaacccctgcggcatcgacagcgagtgcatcaacagaatgctgctgtacgagtgccaccccaccgtgtgccccgccggcggcagatgccagaaccagtgcttcagcaagagacagtaccccgaggtggagatcttcagaaccctgcagagaggctggggcctgagaaccaagaccgacatcaagaagggcgagttcgtgaacgagtacgtgggcgagctgatcgacgaggaggagtgcagagccagaatcagatacgcccaggagcacgacatcaccaacttctacatgctgaccctggacaaggacagaatcatcgacgccggccccaagggcaactacgccagattcatgaaccactgctgccagcccaactgcgagacccagaagtggagcgtgaacggcgacaccagagtgggcctgttcgccctgagcgacatcaaggccggcaccgagctgaccttcaactacaacctggagtgcctgggcaacggcaagaccgtgtgcaagtgcggcgcccccaactgcagcggcttcctgggcgtgagacccaagaaccagcccatcgccaccgaggagaagagcaagaagttcaagaagaagcagcagggcaagagaagaacccagggcgagatcaccaaggagagagaggacgagtgcttcagctgcggcgacgccggccagctggtgagctgcaagaagcccggctgccccaaggtgtaccacgccgactgcctgaacctgaccaagagacccgccggcaagtgggagtgcccctggcaccagtgcgacatctgcggcaaggaggccgccagcttctgcgagatgtgccccagcagcttctgcaagcagcacagagagggcatgctgttcatcagcaagctggacggcagactgagctgcaccgagcacgacccctgcggccccaaccccctggagcccggcgagatcagagagtacgtgcccccccccgtgcccctgccccccggccccagcacccacctggccgagcagagcaccggcatggccgcccaggcccccaagatgagcgacaagccccccgccgacaccaaccagatgctgagcctgagcaagaaggccctggccggcacctgccagagacccctgctgcccgagagacccctggagagaaccgacagcagaccccagcccctggacaaggtgagagacctggccggcagcggcaccaagagccagagcctggtgagcagccagagacccctggacagaccccccgccgtggccggccccagaccccagctgagcgacaagcccagccccgtgaccagccccagcagcagccccagcgtgagaagccagcccctggagagacccctgggcaccgccgaccccagactggacaagagcatcggcgccgccagccccagaccccagagcctggagaagaccagcgtgcccaccggcctgagactgcccccccccgacagactgctgatcaccagcagccccaagccccagaccagcgacagacccaccgacaagccccacgccagcctgagccagagactgcccccccccgagaaggtgctgagcgccgtggtgcagaccctggtggccaaggagaaggccctgagacccgtggaccagaacacccagagcaagaacagagccgccctggtgatggacctgatcgacctgacccccagacagaaggagagagccgccagcccccaccaggtgaccccccaggccgacgagaagatgcccgtgctggagagcagcagctggcccgccagcaagggcctgggccacatgcccagagccgtggagaagggctgcgtgagcgaccccctgcagaccagcggcaaggccgccgcccccagcgaggacccctggcaggccgtgaagagcctgacccaggccagactgctgagccagccccccgccaaggccttcctgtacgagcccaccacccaggccagcggcagagccagcgccggcgccgagcagacccccggccccctgagccagagccccggcctggtgaagcaggccaagcagatggtgggcggccagcagctgcccgccctggccgccaagagcggccagagcttcagaagcctgggcaaggcccccgccagcctgcccaccgaggagaagaagctggtgaccaccgagcagagcccctgggccctgggcaaggccagcagcagagccggcctgtggcccatcgtggccggccagaccctggcccagagctgctggagcgccggcagcacccagaccctggcccagacctgctggagcctgggcagaggccaggaccccaagcccgagcagaacaccctgcccgccctgaaccaggcccccagcagccacaagtgcgccgagagcgagcagaagtag

SEQ ID NO: 279886 - DNA, 1692 bp, Artificial Sequence
  derived and/or modified sequence
atgcccctgaagaccagaaccgccctgagcgacgaccccgacagcagcaccagcaccctgggcaacatgctggagctgcccggcaccagcagcagcagcaccagccaggagctgcccttctgccagcccaagaagaagagcacccccctgaagtacgaggtgggcgacctgatctgggccaagttcaagagaagaccctggtggccctgcagaatctgcagcgaccccctgatcaacacccacagcaagatgaaggtgagcaacagaagaccctacagacagtactacgtggaggccttcggcgaccccagcgagagagcctgggtggccggcaaggccatcgtgatgttcgagggcagacaccagttcgaggagctgcccgtgctgagaagaagaggcaagcagaaggagaagggctacagacacaaggtgccccagaagatcctgagcaagtgggaggccagcgtgggcctggccgagcagtacgacgtgcccaagggcagcaagaacagaaagtgcatccccggcagcatcaagctggacagcgaggaggacatgcccttcgaggactgcaccaacgaccccgagagcgagcacgacctgctgctgaacggctgcctgaagagcctggccttcgacagcgagcacagcgccgacgagaaggagaagccctgcgccaagagcagagccagaaagagcagcgacaaccccaagagaaccagcgtgaagaagggccacatccagttcgaggcccacaaggacgagagaagaggcaagatccccgagaacctgggcctgaacttcatcagcggcgacatcagcgacacccaggccagcaacgagctgagcagaatcgccaacagcctgaccggcagcaacaccgcccccggcagcttcctgttcagcagctgcggcaagaacaccgccaagaaggagttcgagaccagcaacggcgacagcctgctgggcctgcccgagggcgccctgatcagcaagtgcagcagagagaagaacaagccccagagaagcctggtgtgcggcagcaaggtgaagctgtgctacatcggcgccggcgacgaggagaagagaagcgacagcatcagcatctgcaccaccagcgacgacggcagcagcgacctggaccccatcgagcacagcagcgagagcgacaacagcgtgctggagatccccgacgccttcgacagaaccgagaacatgctgagcatgcagaagaacgagaagatcaagtacagcagattcgccgccaccaacaccagagtgaaggccaagcagaagcccctgatcagcaacagccacaccgaccacctgatgggctgcaccaagagcgccgagcccggcaccgagaccagccaggtgaacctgagcgacctgaaggccagcaccctggtgcacaagccccagagcgacttcaccaacgacgccctgagccccaagttcaacctgagcagcagcatcagcagcgagaacagcctgatcaagggcggcgccgccaaccaggccctgctgcacagcaagagcaagcagcccaagttcagaagcatcaagtgcaagcacaaggagaaccccgtgatggccgagccccccgtgatcaacgaggagtgcagcctgaagtgctgcagcagcgacaccaagggcagccccctggccagcatcagcaagacccccccctag

SEQ ID NO: 279887 - DNA, 468 bp, Artificial Sequence
  derived and/or modified sequence
atgcccctgaagaccagaaccgccctgagcgacgaccccgacagcagcaccagcaccctgggcaacatgctggagctgcccggcaccagcagcagcagcaccagccaggagctgcccttctgccagcccaagaagaagagcacccccctgaagtacgaggtgggcgacctgatctgggccaagttcaagagaagaccctggtggccctgcagaatctgcagcgaccccctgatcaacacccacagcaagatgaaggtgagcaacagaagaccctacagacagtactacgtggaggccttcggcgaccccagcgagagagcctgggtggccggcaaggccatcgtgatgttcgagggcagacaccagttcgaggagctgcccgtgctgagaagaagaggcaagcagaaggagaagggctacagacacaaggtgccccagaagatcctgagcaagtgggaggccagctag

SEQ ID NO: 279888 - DNA, 375 bp, Artificial Sequence
  derived and/or modified sequence
atgcccctgaagaccagaaccgccctgagcgacgaccccgacagcagcaccagcaccctgggcaacatgctggagctgcccggcaccagcagcagcagcaccagccaggagctgcccttctgccagcccaagaagaagagcacccccctgaagtacgaggtgggcgacctgatctgggccaagttcaagagaagaccctggtggccctgcagaatctgcagcgaccccctgatcaacacccacagcaagatgaaggtgagcaacagaagaccctacagacagtactacgtggaggccttcggcgaccccagcgagagagcctgggtggccggcaaggccatcgtgatgttcgagggcagacaccagttcgagtag

SEQ ID NO: 279889 - DNA, 474 bp, Artificial Sequence
  derived and/or modified sequence
atgcacccctggctgggcagcgccctgggcttccccaagtgccggggcatccacctgtgtgcctgtggaaatggctggaccccaggagagaccctgagccagaacaagacagagatcaccaagaacaaggtgacctgctggaggccccacggctgtgagcccaacacaggcctgggctaccagggcagccacaccagcaagtacaccctgctgccctggaacctgctgaagaccaagcccctgccccccagccacggcaaggagggcggcaaggaggccaaggtgcccagcggggacaacagcggccgcggggaggtgccccgggcccaggagggccaggccgcctgtggccgggccgccagcggggacagccaggagggcatgagaagaggctgtgaggagcgggccacagcccagaggcctgctgtgcgctctgctgagaccacagcccacggcacctggatctacccctag

SEQ ID NO: 279890 - protein, 290 aa, Artificial Sequence
  derived and/or modified sequence
MMPQEQYTHHRSTMPGSVGPQVYKVGIYGWRKRCLYFFVLLLMILILVNLAMTIWILKVMNFTIDGMGNLRITEKGLKLEGDSEFLQPLYAKEIQSRPGNALYFKSARNVTVNILNDQTKVLTQLITGPKAVEAYGKKFEVKTVSGKLLFSADNNEVVVGAERLRVLGAEGTVFPKSIETPNVRADPFKELRLESPTRSLVMEAPKGVEINAEAGNMEATCRTELRLESKDGEIKLDAAKIRLPRLPHGSYTPTGTRQKVFEICVCANGRLFLSQAGAGSTCQINTSVCL

SEQ ID NO: 279891 - DNA, 9805 bp, Artificial Sequence
  derived and/or modified sequence
agagaggacttatctccagcatctagcactacagagcagaggctgtgtggagaatggctgaaaaatcagaattggttgtagaagcagttttctttctggttgtgagtatgagcccggcagacaccatgagcgctgttgcaggggagtcggcctgtgcttgacacatgtgtttcccattgatagctggagacagcccagtagctgtgagtcggtctgacaaagccatattgaagtacggagtacggtttcaaagcagtcagaaaaagaacgggaatgctgttcaggaaattcttcaggcatgggcagggacttggctgcagttctgcagttggaaaatctgactggggcagcttctgagcgcaggctgggcctgcacacactcagcgggccgagtggccacctccttcagagctgctcagcacgccctgggatcgcgggcggttttcatcggccggtttgtgaaacggacaagagagagacattactgccgggagtgttgagtgaagggaccaggtggagatgatgcctcaggagcagtacactcaccaccggagcaccatgcctggctctgtggggccacaggtatacaaggtggggatttatggctggcggaaacgatgcctgtatttctttgtcctgctcctcatgattttaatactggtgaacttggccatgaccatctggattctcaaagtcatgaacttcacaattgatggaatgggaaacctgaggatcacagaaaaaggtctaaagctagaaggagactctgaattcttacaacctctctacgccaaagaaatccagtcccgaccaggtaatgccctgtacttcaagtctgccagaaatgttacagtgaacattctcaatgaccagactaaagtgctaactcagcttataacaggtccaaaagccgtagaagcttatggtaaaaaatttgaggtaaaaactgtttctggaaaattgctcttctctgcagacaataatgaagtggtagtaggagctgaaagattacgagttttaggagcggagggcacagtgttccctaaatctatagaaacacctaatgtcagggcagaccccttcaaagaactaaggttggagtccccaacccggtctctagtgatggaggccccaaaaggagtggaaatcaatgcagaagctggcaatatggaagccacctgcaggacagagctgagactggaatccaaagatggagagattaagttagatgctgcgaaaatcaggctacctagactgcctcatggatcctacacgcctacaggaacgaggcagaaggtcttcgagatctgcgtctgcgccaatgggagattattcctgtctcaggcaggagctgggtccacttgtcagataaacacaagtgtctgcctctgaaagactatccatagtggacattgttggcagcataaaggccttttttggctttagacactggctgccagctatttttactagaacacagaaagcctatcaaagaccttgtgtgtatgtgtacgtgtgtgtgcgtgcttgagtgtgttcgcgtgtgtgggtggatataaatatatataaatatatataaataaatatatatatcctctgtataaaatgaggtttcagtacaaaaggaaccatgggtgaccctgcgatatccactgtcattttccatcccatccccaccacctgagtgacagaaatctaaacacacatccgtcccaacattccccagaccattcagaatcacacagcgtattaaacactgacagaatcttcatctagatattcgagtagcagcatatcttctcttttagtgtcattacgagggagtgatggcgggaatctcagtcgcactcaagctctgagacctttgtatcaaaaataggcatttgatttcctgttttagctttagtaaggctggctaacttccccctcttcaagctaggaactggcaatgctgtagaagtcagccgtaggaattcaaaatggctggcctaccttggctaccagacatattggggtttttgtagttgaatgaatgaggaggatgaatttcagcaaattttgaactgctcacccaacttctgctatcttgctccctccaaactcacagattctcctacagtcaaattaggagctgtaaatcagcacaaaataagataacagctgttcctcagtgagctggaagctacttaatggcctgatgggcaatgaacaaacgggtgatatgtctctgtttaagggaaaaatggcttaaaagctgttctgttctcacttctgactttaaccaaaagatttcaacccacaatgatcaggtcaatcaaaatccctaagagcagaactcctaccccaaaagaagcctggaagtctaattaagagtagcataaggaacctaattatgtttaccatgtttcttgggattggtgggaaatgtcaaaacatgccctttatttttaaaggcattcacaaactctctgactttgttcttcttatatattttttcagtgccgggatattcatattcctaaagccactattgtgttttctctaagaagcactacatgccaccagaattgtgcactgaaagataatacaaactgagtgtctttatgagaatcactgtgtcccctgaggcccagcagtacctgcttccctgtatgtggaagcagcacctcattcccgccatcagctacctctcatcaccccaccttcatcatcatgctccagggtcaccctggccagctcttgtgctgggacaggggattacaccatctctgttcaaagagggggaaatgtgcctatgccttaagtcaatgcactcagcaaggagaagcacatcttatttatcttgttacctatagtttactttgggtgattggaggggaatgacttagttatgactggacatcttaaaagctgatagacaagccaaatggctggcagatgatgtggatttcaaagagcccagaatgaactcatcactggcttagacagtcctggatgccatttggaaagtagtggccctgcaagcctaaatgaagtagtatttgtaggcctgggtggcatttggatttttcttttccctcaacaaggttttactttttcttactttacaagcaagggaagttttgtgataggagagaaataaaagatttgatattttttgagatgacactcaagcatcaggctgagatttgcacacatgggatgtaaaagcaagctgtgtgttgcttagtcacttacttagaagtagatggtgggggacagcggcgtgggtcctagcctggccagtgatgctgctggcgtccagaccccagactcactccaagcactcttgttcaatatctcatgcagaagagttgggctggtcactcttaggggtgagaccccgtgattggttggtttgtagcactaaggtctaaaaaggaaaaccataaaagacatcagattacgctggatcagtataattaatattccatagggccatgttgccagaatctgtatgtatcaatacagggtttttccaagccaggaaacgccctccttggctactaggagcacctatcccatatcattcagataaacaatgatagctacaaagtcatttgtggctagataggttaagacaggtgattttttaaagtagactgtctttgcattttgccatctgaagttcattaatctttagatgacaaaaaagcaaaaagttcccagaacgtttttgcttagattttgttctaatcaccacgtgaaggaatgagattagcaccacaagtttcatgccaataaaagagactggtgtgatcccacatgcaaaatttaatcctaagggtagtgagatcacaaacagaataaaaataagagcaatcaaccatataaatcaagtacctattgggaacagacataacattcaatttttcatttatgctaagtgaccacagtatacaaagtaataagcaggaaatttgatatgggttaaattatgcattttgttcagattttggaaattggtatgcattataagtttctcaatgtacatctttttatcccaacaccctcaaactagaatatttgtcagtggtcaagagaaaaaattttacctgaattcttgggggccggcggggagcttttacattaaaaatctactaacgcctactttttaaaaaatgagattctttctaatctttatatatgacattttctagacaatcgcacctttgggtatattaaacagctggtatcataacaaagaatccaaatgaaccttcaatatactagaagttctagtaggttaatattgttcagaagatttttacaaattaaaaactgatttccaaatatgttcaacatttacttctatttgatatctgctcaagaagtcatagaagtcttgggaaactattcgagtatcacagaggttttcaaaagcccttatggtgacatctacctaggtaaaagcctgacatgtggctttataattgttatgttacccaagggataaacttgaactggctttgaacatcctttaggtcattttctctttggataattttcatcgcatatccagcaactatagaccaaagtttgcttaaggtttgaccctagagcagaggtgggcaaactatgacctggaaaccaaatctgacttaccaccttttcctgtagttaaagttttattgtcacatagccacatacattcatttacatgttttctgattttacactacagcagcaggatggagtagttgtgtcagagactatgtatcccacaaagcatagattacttactatttagtcctttacaggcaaagtttcctcacccctgacctagaggtttttgtggtatgcattggatatagcaggaaagaaagcacatttccaaacagcagggagtaagcttacatttctgtgtaggtttgggaatatagttacttggcaaagtctttcaggaaggaagcccttccttatgttacatgtggaaagcctgccttccaagacatgtggaagtaattgatccacctgccagagaaacacaggctcagaggatgcctgggaacagggaggatgggattagtggaagcttaatggaaaaggaaagttatgatcctccaagacccttaattgatagaccataccaggttctgcaggtcagcatcattgtgtaatgagagtgaagtaggggaccctgtggttcaaccttagaatctgtttcctgtaggctctttctgctgtctatattcattaaagttttccacttcaccctcccatagtctagagggatgcccattccatggtcctccagagaatagttttgacttaacatgtctgtttagcccacatcacgtcagttatcaacaccgccactgtgcttactgttcctacagccacaccaggcttgaagagttagtgagaccaacaaataattggaagtattggaaaaagcaaaatacatggggacaaaaaaaatacagtgaaattctttttatcaaactgatgctgtgagaaaccagatgaatgccagtttggctttatttctaagaatctgggtcttcattctctggtgtagaaggaatgcaaaaaactataacaacaacaacaaaaacatattttgaaaagacatattctgacatctctgcttgtgtgtggtaaggcaggttcctatcagacatttatccctttggtcaagatcccttttgctcatccagggtttcatactcaatatcgcttaaaaaaaaaaaagtatcagctagggatgactctggaagtatgagtatcatggtggggaggaaggaattttttttaaatgtaaatgacccccatttaccagaccctaatcaaagtcacttaagggaatccctcagccttttatttggaaacagttgaaataaactggcagcagctagatcagagtatcttgctttattttataaaggccaaaggtagtatgaagtttggaccaaaaaggtaaatagatccattccagcacctgatactgatttttcaaggctctatgaaaggtcaaaaatttcattaaacaagaccagttctccctcttccccctgtcccaagaaatcttaggcatgaaaaggataaggaaacagctcctggaatgatacatttgcatagtgccctagtagcaggttgggaaaaagttataatataagaaacaaccttcgaaaacaggccttttatctcaaagataaaatgtctttcttgtggtctttcatcactatctccgtggtggaaggttcccctagttccaacatatttccattaaaatagtcaaagccacggcattgggatgtcagatgcctctctttctttgtggtaatcggaatttaaaattatacagttgcctctgaatttctcatgcacaaagccaaaccactgataagagataaagcagtctgaagcctgctgcttcagccagcacagcacaccacacacgctcgcactttcaaaagcaatgtgatttctatggttcttaaaagctttcttcataagggagtccctgaaatttctcaaggcaggtttgaatggcaaagggaaaataattacttgtgggaggtcctccttttgagtattgttagagcatacatgtaaaagaaaataacctttttggggcaactcatgctcacacatgctgttttctttggttctccccctaccttccttttgtagatattgacagaataggaggaaatgagcatccttatttgagaaagagcaagaatgtcatgagcccttgatgcaatagtaagtgtgatgtcatcatacagtgttaatgatgctatcaaatccatcaataaacagtctcaaaccttccaacaacagtgctcactgctgctcctcaacttcagcccagcaagcagtaatatcatcacccattttgagatatgcaggtggaatagaacaaagaaacagccactgtaatcgagaagcatgtttactgtctaaatccacctgttgcagtaggaagccagagtggggttccaaatgcctcattaagtatgtggacagcctcactagtaagtgagtgaatttggcttcatcactgaacattagctaaggtcagcttaataacacaaatatgaggccgacttctttgcgagaagagaaaagaaaacatctgcttgatttaaaatccaccccacatgcctagagttgtctaatagtccctcactttccaatggcttcacatcctacttctacatttggggttttttggtgaaatcagagatagctcaggatttcataaaacgagaaactccaaactggtctattaggttccatgggaacacttgtagccaaaggattgtctgagggcaggaagacgacacttgtcaacaaggaagacagtgtttctttagttcccatattcatctaattcatggggttctaacattttggggggccatagattcttttgacaatctgagccaatctatgaaacttctccccaaaaagaaccaccccacaaaatcttgcaaaacgtaagagattttcctggatctgaagctacccgaagacatgggaagagttgtattctattattcaattttaagaatatttattaatattcactgagctattgctagccactgtgctaaacattttacatacattctcctatttcatcctcaaaacaatcctttgagttgggttttaatatagttccaatattcggatgtgaaaactgaggcttatagtggctaagaaacttgcccaaagccactacctagaaaatggcagagctggaatgtaggtttaactcctgaccactatgctataaagtcaccacatgtcaaactaattttcaagttgttgggacatgtcccctactaggttttaaactagatcttccttggtagatgaagctatagaacttctattttccctgctttctgtagtctctcacagtgacagcatctatactaaagtatagatacctaaggggaaaatatagaaagcctgcctgaataatagaatctagaacaacaacaaaaatattaattttttctgtgtatgcttaggtcaagcttaaaaaaaaaaaaaaaagaccggaaaatacctgggttgttagcctcacatttaggaaaaaattgtaatactcagttatctgtgtgtgtggctaaacaagtcagcatttctgcacacatacatctctttcctttatacttcccttcaaaagacaaatatcttacttttgatctttgacactatttggtcagtattcttctttacctttacttgtggcaaaactcaaggaagcgatcaaatagagggaagctcatttctatcattgtctctgtttccctataagaaagaactaccagggactcactgactgcattaggcatacaatgtcagagctgagctgaccactctggtcctgtaatgtctttggcctcacaccttggcagccatcattaatgggccatacccttccccaggtgcagaattctcctccccagagcactcaggccgttactaccaatttatctgagttggaaataagactcatttgccagttcttatttttaaagtggcaccctttaactttgaacctgtgtattttacactggcatcctagattcagcaatgaggtttggtggtgtttcaactaggaagggagaaaatgagtgcatctgaagttccttacagcttggtttctttggaatgctttcatcttctaagcaaagggatcagggtttgatctgtaagagttaaaaagacaaagtcattttgaagaattaactcagccagggatcatgcaaaaagattagaaaccataatgcccttgttaaagccctgctgtcaacctgccttcacccagagcttagagggccacagcagcaaagaggttggggtccatccctctctgatgtgctttttccacaacacatatctggtcctctggcaggattgtggatagagctcctcaccatacccaaaagactcagccccagtgccagtgctttcctggttcaacaacccaccacaaaaccttagtaaaaggatgagccaaaaatgaaaaagactcgactctacagtaagtcagtcagggatttcctttttaatggtttaagacatccaaatggcaagccaggaatagataccattaaagggtctcataggactaaccttaccagagccagaaatctagctctctggaagagatgcaagattctagaaaagtaaagggaagtgtcggcacatctaaatttagtgaacacaaaattaatttttatctagtctgtgacggagggaataaagtttttcatgtatcaaccacctcccccagtcaggtttctccctttttgagattatgaagaagctgagacatacttcttaaggaggtcgtgttttagaaggaaaaggcagaggctatccatcattatgctggctagatgcgcttctgaagaagccggattctgatgttcttaaccaaaatggtgaggtcatggaagtcccatttgcttggagattttgaaaaaaaaaaaaaaaaaaaacccattcccataaagtaattgagttcagcctttggattatttttggtttggtttttctctggttttgggtgtgatgtaagaagagctttttagttttgttttgaataacatcaatccttgcacactctatgcaaaaattttgtaagcatttcaataatgctatgaattacaaggaactattttaactttattacactttctgtataaaaaatttgtatttaatattatttcgaccacagtcttgtaaaatatattaataaaaataatgattggtaagaaggaaaaaaaaaaaaaaaaaa

SEQ ID NO: 279892 - DNA, 873 bp, Artificial Sequence
  derived and/or modified sequence
atgatgcctcaggaacagtacacgcaccatcggagcactatgccaggcagcgtcggcccacaagtttataaggtggggatctatggctggaggaagcgatgcctgtatttctttgtgctgctcctcatgattctaatccttgttaatctggctatgacgatatggatcctgaaggtaatgaatttcaccatcgacggcatgggcaatctgcgcattacagagaagggactgaagctggaaggtgattctgagttcctgcagccgctttacgcgaaagagatccagtccagaccagggaacgccctgtacttcaaatccgcgcgaaacgttactgtcaacatcttgaatgatcagaccaaagtgctgacacaactgataacagggcccaaggctgtggaggcttatggaaaaaagttcgaggtgaagactgtcagcggaaagctgctgttcagcgcagataacaacgaggtggttgttggagctgaacggcttcgcgttctgggagccgagggaacagtattccccaaatcaattgaaactccgaatgtgagagcagatcccttcaaggagctccgactggaaagccctacccgatctcttgtcatggaggctcccaaaggcgtggaaatcaacgctgaagcgggaaatatggaggccacatgtaggactgagctccgcttggagtctaaggatggggagatcaaactggatgcagcgaaaatcagacttcccaggctgccccacggaagttacacccccaccgggacaagacagaaggtttttgaaatctgcgtgtgcgctaatggccgactgttcctgagtcaggccggagcaggctctacgtgccagattaatactagtgtgtgcttgtag

SEQ ID NO: 279893 - DNA, 873 bp, Artificial Sequence
  derived and/or modified sequence
atgatgccccaggagcagtacacccaccacaggagcaccatgcctggctctgtgggcccccaggtgtacaaggtgggcatctacggctggaggaagcgctgcctgtacttctttgtgctgctgctgatgatcctgatcctggtgaacctggccatgaccatctggatcctgaaggtgatgaacttcaccattgatggcatgggcaacctgcgcatcacagagaagggcctgaagctggagggggacagcgagttcctgcagcccctgtatgccaaggagatccagagcaggcctggaaatgccctgtacttcaagagcgccagaaatgtgacagtgaacatcctgaatgaccagaccaaggtgctgacccagctgatcaccggccccaaggctgtggaggcctacggcaagaagtttgaggtgaagacagtgtctgggaagctgctcttctctgctgacaacaatgaggtggtggtgggcgctgagcggctgcgggtgctgggcgctgagggcaccgtcttccccaagagcattgagacccccaacgtgcgggctgaccccttcaaggagctgcggctggagagccccaccaggagcctggtgatggaggcccccaagggcgtggagatcaatgctgaggccggcaacatggaggccacctgcaggacagagctgcggctggagagcaaggatggagagatcaagctggatgctgccaagatccggctgccccggctgccccacggcagctacacccccaccggcacccggcagaaggtgtttgagatctgtgtgtgtgccaacggccgcctcttcctgagccaggccggggccggcagcacctgccagatcaacacctctgtgtgcctgtag

SEQ ID NO: 279894 - DNA, 873 bp, Artificial Sequence
  derived and/or modified sequence
atgatgccccaggagcagtacacccaccaccggagcaccatgcccggctctgtcgggcctcaggtgtataaagtgggcatctatggctggcgcaaaaggtgtctgtattttttcgtgttacttttgatgatcctcatccttgtcaacttggcaatgacgatctggatccttaaggtaatgaattttaccattgacgggatggggaacctgaggatcaccgagaaagggcttaaactagaaggggactccgaatttctgcaacctctttatgcaaaagagatccagtcgcggcccggcaacgccctgtacttcaaaagtgccaggaacgtgactgtgaatatcctcaatgatcaaacgaaagttctgacccaactcataactggtcctaaggcagttgaggcatatggaaagaagttcgaagttaaaaccgtctccggaaagttgcttttctcggccgacaataacgaagtggtggtgggggcagagcggctgcgagtactcggggcagagggcacagtctttcccaagagtattgagactccgaatgttagggcagacccttttaaggagctcaggctggagtcccccacaaggtctctggtaatggaggcccccaagggagtcgagattaacgccgaggccggtaacatggaggcaacctgtcgcactgaactgcgactggaatccaaggacggagaaatcaagctcgatgctgcaaaaattagactccccaggctgccccacggttcctatactcccactgggacccgccagaaggtgtttgaaatctgtgtgtgcgccaatggcagactctttttgagccaagccggagccgggtcaacatgtcagattaacacgagcgtgtgtctgtag

SEQ ID NO: 279895 - DNA, 873 bp, Artificial Sequence
  derived and/or modified sequence
atgatgccgcaggaacagtatacacatcataggtccactatgcctggaagtgttggaccgcaggtctataaggtgggaatttacggttggcgcaagaggtgcctctacttctttgtgcttctcttgatgattctcatccttgtaaaccttgccatgaccatctggatcttgaaggtgatgaactttacaatagatggcatgggaaacctgcgaataacagagaagggtctgaagcttgaaggagactctgaatttctgcagcccctgtacgcaaaagagattcaatcacgtccaggtaatgccctgtactttaagagtgcgcgaaacgtcacagtcaacattcttaatgatcagaccaaagtcctcacacagctgattacaggtccgaaggccgttgaggcctacgggaagaaattcgaggttaagactgtgtctgggaaactcctgttctccgccgacaacaacgaagttgtggtgggcgcagagcggctgcgggttcttggtgctgaggggacagtgttccccaagtcgattgagaccccaaacgtgagggctgacccttttaaggaactcagattggaatcaccaactagatcattggtgatggaggctcccaagggagttgaaatcaatgcagaagctggaaatatggaagcgacgtgtcgcactgagttacggctggaaagtaaggacggcgagatcaagctggacgctgccaaaattaggctgccgagactgcctcacggatcttacaccccaactgggaccagacaaaaggtgtttgagatctgcgtatgcgcaaatggcagactcttcctcagccaagcgggagccggttcgacatgccaaatcaatacatccgtgtgtttatag

SEQ ID NO: 279896 - DNA, 1606 bp, Artificial Sequence
  derived and/or modified sequence
agagaggacttatctccagcatctagcactacagagcagaggctgtgtggagaatggctgaaaaatcagaattggttgtagaagcagttttctttctggttgtgagtatgagcccggcagacaccatgagcgctgttgcaggggagtcggcctgtgcttgacacatgtgtttcccattgatagctggagacagcccagtagctgtgagtcggtctgacaaagccatattgaagtacggagtacggtttcaaagcagtcagaaaaagaacgggaatgctgttcaggaaattcttcaggcatgggcagggacttggctgcagttctgcagttggaaaatctgactggggcagcttctgagcgcaggctgggcctgcacacactcagcgggccgagtggccacctccttcagagctgctcagcacgccctgggatcgcgggcggttttcatcggccggtttgtgaaacggacaagagagagacattactgccgggagtgttgagtgaagggaccaggtggagatgatgcctcaggagcagtacactcaccaccggagcaccatgcctggctctgtggggccacaggtatacaaggtggggatttatggctggcggaaacgatgcctgtatttctttgtcctgctcctcatgattttaatactggtgaacttggccatgaccatctggattctcaaagtcatgaacttcacaattgatggaatgggaaacctgaggatcacagaaaaaggtctaaagctagaaggagactctgaattcttacaacctctctacgccaaagaaatccagtcccgaccaggtaatgccctgtacttcaagtctgccagaaatgttacagtgaacattctcaatgaccagactaaagtgctaactcagcttataacaggtccaaaagccgtagaagcttatggtaaaaaatttgaggtaaaaactgtttctggaaaattgctcttctctgcagacaataatgaagtggtagtaggagctgaaagattacgagttttaggagcggagggcacagtgttccctaaatctatagaaacacctaatgtcagggcagaccccttcaaagaactaaggttggagtccccaacccggtctctagtgatggaggccccaaaaggagtggaaatcaatgcagaagctggcaatatggaagccacctgcaggacagagctgagactggaatccaaagatggagagattaagttagatgctgcgaaaatcaggctacctagactgcctcatggatcctacacgcctacaggaacgaggcagaaggtcttcgagatctgcgtctgcgccaatgggagattattcctgtctcaggcaggagctgggtccacttgtcagataaacacaagtgtctgcctctgaaagactatccatagtggacattgttggcagcataaaggccttttttggctttagacactggctgccagctatttttactagaacacagaaagcctatcaaagaccttgtgtgtatgtgtacgtgtgtgtgcgtgcttgagtgtgttcgcgtgtgtgggtggatataaatatatataaatatatataaataaatatatatatcctctgtataaaa

SEQ ID NO: 279897 - DNA, 870 bp, Artificial Sequence
  derived and/or modified sequence
atgatgccccaggagcagtacacccaccaccgcagcaccatgcccggcagcgtgggcccccaggtgtacaaggtgggcatctacggctggcgcaagcgctgcctgtacttcttcgtgctgctgctgatgatcctgatcctggtgaacctggccatgaccatctggatcctgaaggtgatgaacttcaccatcgacggcatgggcaacctgcgcatcaccgagaagggcctgaagctggagggcgacagcgagttcctgcagcccctgtacgccaaggagatccagagccgccccggcaacgccctgtacttcaagagcgcccgcaacgtgaccgtgaacatcctgaacgaccagaccaaggtgctgacccagctgatcaccggccccaaggccgtggaggcctacggcaagaagttcgaggtgaagaccgtgagcggcaagctgctgttcagcgccgacaacaacgaggtggtggtgggcgccgagcgcctgcgcgtgctgggcgccgagggcaccgtgttccccaagagcatcgagacccccaacgtgcgcgccgaccccttcaaggagctgcgcctggagagccccacccgcagcctggtgatggaggcccccaagggcgtggagatcaacgccgaggccggcaacatggaggccacctgccgcaccgagctgcgcctggagagcaaggacggcgagatcaagctggacgccgccaagatccgcctgccccgcctgccccacggcagctacacccccaccggcacccgccagaaggtgttcgagatctgcgtgtgcgccaacggccgcctgttcctgagccaggccggcgccggcagcacctgccagatcaacaccagcgtgtgcctg

SEQ ID NO: 279898 - DNA, 873 bp, Artificial Sequence
  derived and/or modified sequence
atgatgccccaggagcagtacacccaccacagaagcaccatgcccggcagcgtgggcccccaggtgtacaaggtgggcatctacggctggagaaagagatgcctgtacttcttcgtgctgctgctgatgatcctgatcctggtgaacctggccatgaccatctggatcctgaaggtgatgaacttcaccatcgacggcatgggcaacctgagaatcaccgagaagggcctgaagctggagggcgacagcgagttcctgcagcccctgtacgccaaggagatccagagcagacccggcaacgccctgtacttcaagagcgccagaaacgtgaccgtgaacatcctgaacgaccagaccaaggtgctgacccagctgatcaccggccccaaggccgtggaggcctacggcaagaagttcgaggtgaagaccgtgagcggcaagctgctgttcagcgccgacaacaacgaggtggtggtgggcgccgagagactgagagtgctgggcgccgagggcaccgtgttccccaagagcatcgagacccccaacgtgagagccgaccccttcaaggagctgagactggagagccccaccagaagcctggtgatggaggcccccaagggcgtggagatcaacgccgaggccggcaacatggaggccacctgcagaaccgagctgagactggagagcaaggacggcgagatcaagctggacgccgccaagatcagactgcccagactgccccacggcagctacacccccaccggcaccagacagaaggtgttcgagatctgcgtgtgcgccaacggcagactgttcctgagccaggccggcgccggcagcacctgccagatcaacaccagcgtgtgcctgtag

SEQ ID NO: 279899 - protein, 638 aa, Artificial Sequence
  derived and/or modified sequence
MCEVSENPYSTLWSFLSWRRKLLAQKYHDNAQLITGMSFHGTTIGLAPLMAMCSVYQSGGVNMDHSENAIGVAATMAHEMGHNFGMTHDSADCCSASAADGGCIMAAATGHPFPKVFNGCNRRELDRYLQSGGGMCLSNMPDTRMLYGGRRCGNGYLEDGEECDCGEEEECNNPCCNASNCTLRPGAECAHGSCCHQCKLLAPGTLCREQARQCDLPEFCTGKSPHCPTNFYQMDGTPCEGGQAYCYNGMCLTYQEQCQQLWGPGARPAPDLCFEKVNVAGDTFGNCGKDMNGEHRKCNMRDAKCGKIQCQSSEARPLESNAVPIDTTIIMNGRQIQCRGTHVYRGPEEEGDMLDPGLVMTGTKCGYNHICFEGQCRNTSFFETEGCGKKCNGHGVCNNNQNCHCLPGWAPPFCNTPGHGGSIDSGPMPPESVGPVVAGVLVAILVLAVLMLMYYCCRQNNKLGQLKPSALPSKLRQQFSCPFRVSQNSGTGHANPTFKLQTPQGKRKVINTPEILRKPSQPPPRPPPDYLRGGSPPAPLPAHLSRAARNSPGPGSQIERTESSRRPPPSRPIPPAPNCIVSQKCLLPPAMILRAPQPSGTVVCLVISFNMAFYRSMRIRIEPGIKTKLLVLLVWKQF

SEQ ID NO: 279900 - protein, 955 aa, Artificial Sequence
  derived and/or modified sequence
MPGGAGAARLCLLAFALQPLRPRAAREPGWTRGSEEGSPKLQHELIIPQWKTSESPVREKHPLKAELRVMAEGRELILDLEKNEQLFAPSYTETHYTSSGNPQTTTRKLEDHCFYHGTVRETELSSVTLSTCRGIRGLITVSSNLSYVIEPLPDSKGQHLIYRSEHLKPPPGNCGFEHSKPTTRDWALQFTQQTKKRPRRMKREDLNSMKYVELYLVADYLEFQKNRRDQDATKHKLIEIANYVDKFYRSLNIRIALVGLEVWTHGNMCEVSENPYSTLWSFLSWRRKLLAQKYHDNAQLITGMSFHGTTIGLAPLMAMCSVYQSGGVNMDHSENAIGVAATMAHEMGHNFGMTHDSADCCSASAADGGCIMAAATGHPFPKVFNGCNRRELDRYLQSGGGMCLSNMPDTRMLYGGRRCGNGYLEDGEECDCGEEEECNNPCCNASNCTLRPGAECAHGSCCHQCKLLAPGTLCREQARQCDLPEFCTGKSPHCPTNFYQMDGTPCEGGQAYCYNGMCLTYQEQCQQLWGPGARPAPDLCFEKVNVAGDTFGNCGKDMNGEHRKCNMRDAKCGKIQCQSSEARPLESNAVPIDTTIIMNGRQIQCRGTHVYRGPEEEGDMLDPGLVMTGTKCGYNHICFEGQCRNTSFFETEGCGKKCNGHGVCNNNQNCHCLPGWAPPFCNTPGHGGSIDSGPMPPESVGPVVAGVLVAILVLAVLMLMYYCCRQNNKLGQLKPSALPSKLRQQFSCPFRVSQNSGTGHANPTFKLQTPQGKRKVINTPEILRKPSQPPPRPPPDYLRGGSPPAPLPAHLSRAARNSPGPGSQIERTESSRRPPPSRPIPPAPNCIVSQDFSRPRPPQKALPANPVPGRRSLPRPGGASPLRPPGAGPQQSRPLAALAPKVSPREALKVKAGTRGLQGGRCRVEKTKQFMLLVVWTELPEQKPRAKHSCFLVPA

SEQ ID NO: 279901 - DNA, 2868 bp, Artificial Sequence
  derived and/or modified sequence
atgccaggcggagccggtgcagctaggttgtgtctgctggcctttgctctgcaacctctccgacccagggcagcaagagagcctggatggacgcgagggagcgaggagggctcccccaaacttcagcacgaactgattataccacagtggaaaacctctgagtcgcccgtgagagagaagcacccccttaaagcagaactgcgggttatggccgaaggtcgtgagttgatactagatctcgagaaaaatgagcagttgtttgcaccttcctatacagaaacccattacacctccagcggcaatcctcagacaaccacccgcaagttagaagatcattgcttttaccacgggactgtgcgagaaaccgaactaagttctgtgacactcagcacgtgtaggggcattcgtggcctcattactgtcagcagcaacctcagttatgtcatcgaaccactccccgacagcaaaggacagcacttgatttatcgctccgagcatctaaagcctccccccgggaactgcggatttgaacacagtaagcctactaccagagactgggcactccagtttacccagcagaccaagaagcggccccgcagaatgaagcgggaagacctgaactctatgaagtacgtggaactgtacctggttgctgactatctggaattccagaagaatcggcgagaccaggacgccaccaaacataagttgatagaaattgcaaattacgtagataaattctaccggtccctcaatatcagaattgctctcgtgggcctcgaggtatggacgcacgggaacatgtgcgaggtgagtgagaatccctattctacgctttggagcttccttagttggcgccggaaactgctggcccagaaatatcacgacaatgcacagcttatcacaggcatgtcctttcacgggaccacaattggcctggcccctctgatggcgatgtgctctgtctaccagagcggtggcgtaaatatggatcattcagaaaatgcaattggagtagcagctaccatggcccacgagatgggtcataacttcggaatgacacacgatagtgcggactgctgctcggcttctgctgctgacggagggtgcataatggcggcggccaccggccaccctttcccaaaggtattcaacggatgcaatagacgcgaacttgaccggtatttacagtcagggggaggaatgtgcttgtctaacatgccagatacgaggatgctttatggagggcgcaggtgcggtaacggatacctagaggatggagaggagtgtgactgcggcgaagaagaggaatgtaataacccttgctgtaacgcatccaactgtacactgaggcctggcgccgaatgtgcacatggctcttgctgccaccagtgcaaactgctcgccccaggcactctgtgtagggagcaggcgcggcagtgcgacctccccgagttttgtaccgggaagtctcctcattgccccacaaacttctatcagatggatggtacaccttgcgagggtggccaagcgtattgttataacggaatgtgtttgacctatcaagaacagtgccaacagctatgggggcccggtgcccggcctgcccctgatttgtgttttgagaaggtgaatgtggctggagatacgttcggaaattgcggcaaagatatgaacggcgaacatcggaaatgcaatatgagggatgcaaagtgcggcaaaatccaatgtcagagctccgaagctaggcccctcgagtctaacgcagtccctatcgacaccaccatcattatgaacggtcgtcagatacagtgccgcggcacccacgtgtatcgaggtcccgaagaagagggggatatgttagatcccggcttggtgatgacaggcaccaagtgtggctataaccatatctgcttcgaaggccaatgccgtaacacttccttcttcgagacagaaggttgtggtaagaagtgtaacggacacggcgtgtgtaacaacaatcaaaattgccactgcctgccgggctgggccccacccttttgtaacacgccaggccacggagggtcaatcgactcaggccctatgccaccagaatccgttggtcctgtggtcgccggcgtcctggtagctatcttagtactcgccgtgttgatgctgatgtactactgctgtcgccagaataataagcttggacagttaaaacccagtgccctcccttccaagttaaggcagcaattcagttgtccgttccgggtgtctcagaatagtggcaccggccatgcaaaccccacatttaaactgcaaacacctcagggaaagaggaaggtgatcaatactcctgagatcctacgaaaaccttcccaacctccccctagaccgccgcccgactatctccggggcggaagtccgcctgctccattacctgcccatttgtccagagcggccagaaactctccagggccgggatcacagattgaaaggaccgagagctcccggagaccacccccttcacggccgatccctcccgcccctaactgcatcgtcagtcaggacttttcccgcccacggccaccacaaaaggccctccccgcaaacccagtgcctggtcgtaggtctttgcccaggccaggcggagccagtcctttgcgccccccaggtgccggcccacaacagagcagaccattggccgcattggctcccaaagtttctcctagagaggctctcaaggtgaaggccgggacgcgtggactgcagggagggagatgcagagtggagaaaaccaaacagtttatgctgctggttgtatggactgaactccctgaacagaaaccacgcgctaagcacagctgtttcctagtgcccgcctag

SEQ ID NO: 279902 - DNA, 2868 bp, Artificial Sequence
  derived and/or modified sequence
atgcctgggggcgctggggccgcccggctgtgcctgctggcctttgccctgcagcccctgcggccccgggccgcccgggagcccggctggacccggggcagcgaggagggcagccccaagctgcagcacgagctgatcatcccccagtggaagaccagcgagagccctgtgcgggagaagcaccccctgaaggccgagctgcgggtgatggccgagggccgggagctgatcctggacctggagaagaatgagcagctgtttgcccccagctacacagagacccactacaccagcagcggcaacccccagaccaccaccaggaagctggaggaccactgcttctaccacggcaccgtgcgggagacagagctgagctctgtgaccctgagcacctgccggggcatccggggcctcatcaccgtgagcagcaacctgtcctatgtgattgagcccctgcctgacagcaagggccagcacctgatctacagaagtgagcacctgaagcccccacctggcaactgtggctttgagcacagcaagcccaccacccgggactgggccctgcagttcacccagcagaccaagaagaggcccaggaggatgaagcgggaggacctgaacagcatgaagtatgtggagctgtacctggtggccgactacctggagttccagaagaacagaagagaccaggatgccaccaagcacaagctgattgagatcgccaactacgtggacaagttctaccgcagcctgaacatcagaattgccctggtgggcctggaggtgtggacccacggcaacatgtgtgaggtgtctgagaacccctacagcaccctgtggagcttcctgtcctggaggaggaagctgctggcccagaagtaccatgacaatgcccagctgatcaccggcatgtccttccacggcaccaccatcggcctggcccccctgatggccatgtgcagcgtgtaccagagcggaggagtgaacatggaccacagtgaaaatgccatcggcgtggccgccaccatggcccacgagatgggccacaactttggcatgacccatgattctgctgactgctgcagcgccagcgctgctgatggcggctgcatcatggccgccgccaccggccaccccttccccaaggtgttcaacggctgcaacagaagagagctggaccgctacctgcagagcggcggcggcatgtgcctgagcaacatgccagacaccaggatgctgtatggaggaagaagatgtggaaatggctacctggaggatggagaagaatgtgactgtggggaggaggaggagtgcaacaacccctgctgcaatgccagcaactgcaccctgcggcctggagcagaatgtgcccacggcagctgctgccaccagtgcaagctgctggcccctggcaccctgtgccgggagcaggcccggcagtgtgacctgcctgagttctgcaccgggaagagcccccactgccccaccaacttctaccagatggatggcaccccctgtgagggcggccaggcctactgctacaacggcatgtgcctgacctaccaggagcagtgccagcagctgtggggccctggggcccggcctgccccagacctgtgctttgagaaggtgaatgtggccggggacacctttggaaactgtgggaaggacatgaatggagagcacaggaagtgcaacatgagagatgccaagtgtgggaagatccagtgccagagcagcgaggcccggcccctggagagcaatgctgtgcccatcgacaccaccatcatcatgaatggccggcagatccagtgccggggcacccacgtgtaccggggccctgaggaggagggggacatgctggaccccggcctggtgatgacaggcaccaagtgtggctacaaccacatctgctttgagggccagtgcaggaacaccagcttctttgaaacagagggctgtgggaagaagtgcaatggacatggagtgtgcaacaacaaccagaactgccactgcctgcccggctgggccccacccttctgcaacaccccaggccacggcggcagcattgacagcggccccatgcctcctgagagcgtgggccctgtggtggccggcgtgctggtggccatcctggtgctggccgtgctgatgctgatgtactactgctgccggcagaacaacaagctgggccagctgaagcccagcgccctgcccagcaagctgcggcagcagttcagctgccccttccgggtgtcccagaacagcggcaccggccacgccaaccccaccttcaagctgcagaccccccagggcaagaggaaggtgatcaacaccccagagatcctgaggaagcccagccagcccccacccaggcctcctccagactacctgcggggcggcagccccccagcccccctgcctgcccacctgagccgggccgccaggaacagccctggccctggcagccagattgaaagaacagagagcagccggcggcccccacccagccggcccatccccccagcccccaactgcatcgtgtcccaggacttcagccggcccaggcctccccagaaggccctgcctgccaaccctgtgcccggccgccgcagcctgcccaggcctgggggcgccagccccctgcggcccccaggagctggcccccagcagagccggcccctggccgccctggcccccaaggtgagcccccgggaggccctgaaggtgaaggccggcacccggggcctgcagggcggccgctgccgggtggagaagaccaagcagttcatgctgctggtggtgtggacagagctgcctgagcagaagccccgggccaagcacagctgcttcctggtgcctgcctag

SEQ ID NO: 279903 - DNA, 2868 bp, Artificial Sequence
  derived and/or modified sequence
atgcccggcggcgccggcgccgcccggctgtgcctgctggccttcgcacttcagcctttgcgacctagagcggcgcgcgaacccggctggactagaggttccgaggaggggtctccgaagctgcaacacgagttgataatcccacagtggaaaactagcgagtctcccgtccgcgagaagcaccccttgaaggccgagctccgcgtgatggcagagggtcgggagttgattctcgaccttgaaaagaacgaacagctgtttgcgccctcttacaccgagacacattacaccagtagcggtaatcctcaaactaccacacggaagctggaggatcactgcttttaccacggcacggttcgggagactgaacttagctccgtgaccctgtccacttgccgcggaattcgcgggctgatcacagtctcgtcgaatctgtcctacgtgatcgaaccactccctgactccaagggtcagcacctgatataccggtccgagcacctcaagcccccacctgggaattgcgggtttgagcactccaaacccacaaccagagactgggcacttcagttcactcagcagacaaagaaacggccacgtcgcatgaaaagagaagatctcaactctatgaagtacgtggaactgtatctggtcgccgattatctcgaattccagaaaaaccgtagagaccaggacgctacaaagcacaaactgatagaaatcgcaaattacgtcgataaattttatcgctcactaaatattagaattgccctagtgggcctggaagtatggacgcatgggaatatgtgcgaggtgtctgagaacccctactctacactttggtcgtttttatcctggaggcgaaagttgctggctcagaaataccacgataatgctcaacttatcacaggtatgagttttcacggaacgactataggcctggctcctcttatggccatgtgttcagtttaccagtcagggggagtgaatatggaccattccgagaatgcaatcggggttgccgccacaatggcccacgagatgggacacaatttcggcatgacccacgatagcgctgactgctgttctgccagcgctgcagacggtgggtgcattatggctgcagccacaggccatccatttcccaaagtttttaacggatgtaacaggcgtgaactggaccgatacttgcagtctggtgggggtatgtgtcttagtaacatgcccgacactcgcatgttgtatggtggccgcagatgtggcaatggctatctggaggatggcgaggaatgcgattgcggcgaagaggaagaatgcaataacccttgttgtaatgcctcaaactgcacactccgcccaggggcagagtgtgcccacggctcatgctgccaccagtgcaagcttctcgcaccgggaactctctgtagggagcaggcccgccaatgtgatctgccggaattctgcaccggcaagagcccccattgtcctactaacttttatcagatggacgggacaccatgcgaagggggccaggcgtattgttacaatggcatgtgtttaacctaccaggagcagtgtcaacagctgtggggaccaggcgcgcgtccggccccagatctttgtttcgagaaggttaatgtggcaggcgataccttcggaaattgcgggaaagacatgaatggcgaacaccggaagtgtaatatgcgcgatgccaagtgtggaaagatccagtgccaatcatctgaggctaggcctctggagtcgaacgccgtccctatcgataccaccattatcatgaacggtagacaaatccagtgccgcggtacccacgtctataggggccctgaagaggagggtgacatgctcgaccctggcttagtgatgacaggcaccaaatgcggatacaatcacatctgcttcgagggccagtgcagaaacacttctttcttcgagacagaggggtgcggaaagaagtgcaatggacacggagtctgcaacaataaccaaaactgccactgtcttcccgggtgggcccccccattctgtaacacccctggccacggcggatctatcgatagtgggcccatgcccccagagtctgtgggccccgtagtcgccggcgtacttgtggccattctagtgctggctgtcctaatgctgatgtactactgttgtcgccagaataacaaactgggccagctcaaaccaagcgcccttccctccaagctgaggcagcaattttcatgcccattccgcgtgtctcagaattcaggaacaggccatgctaaccctaccttcaagctgcaaaccccacagggtaagaggaaggtcattaatacacccgagattcttagaaagcctagccagccaccccctcgacccccaccagattaccttcgagggggatcccctcccgcccctcttcccgcccatttgagcagggcagcccggaacagcccgggccccggatctcagatagaaagaacggagagttccagaagacccccaccaagtagacctatccctccagcccctaactgtattgttagccaggacttttctcggccacgcccacctcagaaggctctgcctgctaatccggtacccggccggagatccctgccccggcccgggggagcctcccctctccgcccgcctggcgcaggaccacagcagtcccggcctttggctgctcttgccccaaaggtgtccccccgcgaggccctgaaggtgaaggctggaacaagagggctccaaggcgggcgttgtcgggtagagaaaaccaagcaattcatgctgctggtggtgtggacagaactaccggagcagaaaccccgagccaagcactcttgctttctggtacccgcgtag

SEQ ID NO: 279904 - DNA, 2868 bp, Artificial Sequence
  derived and/or modified sequence
atgcccggaggtgccggagctgctcggttatgtctgctcgccttcgccctgcagccactaagacccagagctgcaagggagcctggctggactcgcggttctgaggagggcagccctaagctacaacatgaactgataataccccagtggaaaacctccgaaagccccgtccgcgagaagcacccattgaaggctgagctaagggttatggcagaagggagggaattgatactggaccttgagaaaaacgagcagctgttcgccccatcctacaccgagacccactatactagcagcggcaacccacaaaccaccacccgcaagctagaggaccattgcttttatcacgggaccgtcagggaaaccgaactgagctctgtgactctgagtacctgtcggggtatacgcggactcatcactgtgtcgtccaacttgtcatatgtgattgagccactcccagacagcaagggacagcatctgatttataggtcggaacatcttaaaccaccccctggaaactgcggttttgagcatagcaagccaacaacgcgggactgggcccttcagtttacacagcagaccaagaaacgccctagaaggatgaagcgggaagacttgaattccatgaagtatgtggagctatatctggtggcggattatctggaattccaaaaaaaccgccgagatcaggacgcgactaagcacaagcttatcgaaatcgctaattatgtcgataaattttatagatctttgaatattaggattgccctggtggggttggaggtctggacacacggcaatatgtgcgaggtgagcgagaacccctactcaactctgtggagttttctatcttggcgaaggaaattgctggcacagaagtaccacgacaacgcacagttgattactggcatgtcctttcatggaacaaccatcggccttgcccctcttatggctatgtgtagtgtctaccagagcggtggagtgaacatggatcattctgaaaacgctatcggagtagccgctactatggcccacgagatggggcacaatttcggtatgacccacgacagcgccgattgctgcagcgctagtgccgcagacggtggatgcatcatggctgcagccacgggacacccgtttccaaaagtgttcaatgggtgcaatagacgcgagctagacaggtacctccaaagcggcggaggaatgtgcctctctaacatgcctgacaccagaatgctgtatggcggtcggaggtgcggtaatggctatttggaggacggtgaagaatgcgattgtggcgaagaagaggaatgcaacaacccatgctgtaatgcatccaactgcacactgcgcccaggcgctgaatgtgcccatggcagttgttgtcaccagtgcaagctcctcgcgcctggaaccttatgtcgagagcaggccaggcagtgcgacttgcctgaattctgcacaggaaagagcccccactgtccaacaaacttttatcagatggacggcaccccctgtgaaggtggccaggcttactgctataatgggatgtgtctgacctatcaggagcagtgccaacagttgtggggtcctggcgctcgccctgcccctgatctatgctttgagaaagtgaatgtggctggcgacacattcggcaattgtggcaaggatatgaacggtgaacaccgcaagtgcaacatgagggacgccaaatgcgggaaaatccaatgccaatcatctgaggccaggcccctggaatctaatgccgtgccgatcgataccactatcatcatgaatggtcgtcagattcaatgccgaggaacacacgtgtaccgcggacccgaagaagagggcgacatgctcgaccccggactggtcatgactggaacgaaatgcggctataatcatatctgttttgaaggacagtgtagaaacacctcattcttcgagacggaggggtgtggtaagaagtgcaacggacatggggtgtgcaacaacaaccagaactgtcattgtcttccaggttgggcccctccattctgtaatactcctggtcacggaggctcaatcgactctgggccaatgcccccagaatctgtaggacctgtagtagccggagtgctggtggcaatcctggtacttgcagtattaatgctgatgtattattgctgtcggcagaacaacaaactcggtcagctcaaaccctcggcactgccaagtaaattgcgtcagcaattctcttgcccattcagggtctcacagaattccggaaccggtcacgctaatcctaccttcaagctgcagacaccacaagggaaaagaaaagtgataaacacccccgagattttgaggaagcctagccaacctccacctcgccctcccccagattacctgcgaggcggttctcctccagcaccactaccggcacatctgagtcgggctgctcgcaattcccctggtccaggaagtcagatcgagaggacagaaagcagccgacggcctccgccatcgcgtcccattcccccagcgccaaattgcatcgtttcccaggacttctcccgccctcggccacctcagaaagcgcttccggctaatcctgtgccgggaagacgtagtctacctaggcccggaggagccagtccattacggcctcctggagccggaccccaacaaagtaggccacttgcagccttggcaccaaaggtgtccccaagggaagctctgaaggtgaaggcagggactagagggctgcagggaggacgctgtagagttgagaagaccaagcagtttatgctgctggtggtctggaccgaactcccagagcaaaaaccaagagccaaacattcctgcttcttggtgccagcctag

SEQ ID NO: 279905 - DNA, 2868 bp, Artificial Sequence
  derived and/or modified sequence
atgcccggcggcgccggcgccgccagactgtgcctgctggccttcgccctgcagcccctgagacccagagccgccagagagcccggctggaccagaggcagcgaggagggcagccccaagctgcagcacgagctgatcatcccccagtggaagaccagcgagagccccgtgagagagaagcaccccctgaaggccgagctgagagtgatggccgagggcagagagctgatcctggacctggagaagaacgagcagctgttcgcccccagctacaccgagacccactacaccagcagcggcaacccccagaccaccaccagaaagctggaggaccactgcttctaccacggcaccgtgagagagaccgagctgagcagcgtgaccctgagcacctgcagaggcatcagaggcctgatcaccgtgagcagcaacctgagctacgtgatcgagcccctgcccgacagcaagggccagcacctgatctacagaagcgagcacctgaagcccccccccggcaactgcggcttcgagcacagcaagcccaccaccagagactgggccctgcagttcacccagcagaccaagaagagacccagaagaatgaagagagaggacctgaacagcatgaagtacgtggagctgtacctggtggccgactacctggagttccagaagaacagaagagaccaggacgccaccaagcacaagctgatcgagatcgccaactacgtggacaagttctacagaagcctgaacatcagaatcgccctggtgggcctggaggtgtggacccacggcaacatgtgcgaggtgagcgagaacccctacagcaccctgtggagcttcctgagctggagaagaaagctgctggcccagaagtaccacgacaacgcccagctgatcaccggcatgagcttccacggcaccaccatcggcctggcccccctgatggccatgtgcagcgtgtaccagagcggcggcgtgaacatggaccacagcgagaacgccatcggcgtggccgccaccatggcccacgagatgggccacaacttcggcatgacccacgacagcgccgactgctgcagcgccagcgccgccgacggcggctgcatcatggccgccgccaccggccaccccttccccaaggtgttcaacggctgcaacagaagagagctggacagatacctgcagagcggcggcggcatgtgcctgagcaacatgcccgacaccagaatgctgtacggcggcagaagatgcggcaacggctacctggaggacggcgaggagtgcgactgcggcgaggaggaggagtgcaacaacccctgctgcaacgccagcaactgcaccctgagacccggcgccgagtgcgcccacggcagctgctgccaccagtgcaagctgctggcccccggcaccctgtgcagagagcaggccagacagtgcgacctgcccgagttctgcaccggcaagagcccccactgccccaccaacttctaccagatggacggcaccccctgcgagggcggccaggcctactgctacaacggcatgtgcctgacctaccaggagcagtgccagcagctgtggggccccggcgccagacccgcccccgacctgtgcttcgagaaggtgaacgtggccggcgacaccttcggcaactgcggcaaggacatgaacggcgagcacagaaagtgcaacatgagagacgccaagtgcggcaagatccagtgccagagcagcgaggccagacccctggagagcaacgccgtgcccatcgacaccaccatcatcatgaacggcagacagatccagtgcagaggcacccacgtgtacagaggccccgaggaggagggcgacatgctggaccccggcctggtgatgaccggcaccaagtgcggctacaaccacatctgcttcgagggccagtgcagaaacaccagcttcttcgagaccgagggctgcggcaagaagtgcaacggccacggcgtgtgcaacaacaaccagaactgccactgcctgcccggctgggccccccccttctgcaacacccccggccacggcggcagcatcgacagcggccccatgccccccgagagcgtgggccccgtggtggccggcgtgctggtggccatcctggtgctggccgtgctgatgctgatgtactactgctgcagacagaacaacaagctgggccagctgaagcccagcgccctgcccagcaagctgagacagcagttcagctgccccttcagagtgagccagaacagcggcaccggccacgccaaccccaccttcaagctgcagaccccccagggcaagagaaaggtgatcaacacccccgagatcctgagaaagcccagccagcccccccccagacccccccccgactacctgagaggcggcagcccccccgcccccctgcccgcccacctgagcagagccgccagaaacagccccggccccggcagccagatcgagagaaccgagagcagcagaagacccccccccagcagacccatcccccccgcccccaactgcatcgtgagccaggacttcagcagacccagacccccccagaaggccctgcccgccaaccccgtgcccggcagaagaagcctgcccagacccggcggcgccagccccctgagaccccccggcgccggcccccagcagagcagacccctggccgccctggcccccaaggtgagccccagagaggccctgaaggtgaaggccggcaccagaggcctgcagggcggcagatgcagagtggagaagaccaagcagttcatgctgctggtggtgtggaccgagctgcccgagcagaagcccagagccaagcacagctgcttcctggtgcccgcctag

SEQ ID NO: 279906 - DNA, 2782 bp, Artificial Sequence
  derived and/or modified sequence
gccgggcagtgggcaggtatggctgagggcgtgtgagcgccgagcgctaagggccgccgccaccatgccagggggcgcaggcgccgcccggctctgcttgctggcgtttgccctgcagcccctccggccgcgggcggcgcgggagcctggatggacaagaggaagtgaggaaggcagccccaagctgcagcatgaacttatcatacctcagtggaagacttcagaaagccccgtgagagaaaagcatccactcaaagctgagctcagggtaatggctgaggggcgagaactgatcctggacctggagaagaatgagcaactttttgctccttcctacacagaaacccattatacttcaagtggtaaccctcaaaccaccacacggaaattggaggatcactgcttttaccacggcacggtgagggagacagaactgtccagcgtcacgctcagcacttgccgaggaattagaggactgattacggtgagcagcaacctcagctacgtcatcgagcccctccctgacagcaagggccaacaccttatttacagatctgaacatctcaagccgcccccgggaaactgtgggttcgagcactccaagcccaccaccagggactgggctcttcagtttacacaacagaccaagaagcgacctcgcaggatgaaaagggaagatttaaactccatgaagtatgtggagctttacctcgtggctgattatttagagtttcagaagaatcgacgagaccaggacgccaccaaacacaagctcatagagatcgccaactatgttgataagttttaccgatccttgaacatccggattgctctcgtgggcttggaagtgtggacccacgggaacatgtgtgaagtttcagagaatccatattctaccctctggtcctttctcagttggaggcgcaagctgcttgcccagaagtaccatgacaacgcccaattaatcacgggcatgtccttccacggcaccaccatcggcctggcccccctcatggccatgtgctctgtgtaccagtctggaggagtcaacatggaccactccgagaatgccattggcgtggctgccaccatggcccacgagatgggccacaactttggcatgacccatgattctgcagattgctgctcggccagtgcggctgatggtgggtgcatcatggcagctgccactgggcacccctttcccaaagtgttcaatggatgcaacaggagggagctggacaggtatctgcagtcaggtggtggaatgtgtctctccaacatgccagacaccaggatgttgtatggaggccggaggtgtgggaacgggtatctggaagatggggaagagtgtgactgtggagaagaagaggaatgtaacaacccctgctgcaatgcctctaattgtaccctgaggccgggggcggagtgtgctcacggctcctgctgccaccagtgtaagctgttggctcctgggaccctgtgccgcgagcaggccaggcagtgtgacctcccggagttctgtacgggcaagtctccccactgccctaccaacttctaccagatggatggtaccccctgtgagggcggccaggcctactgctacaacggcatgtgcctcacctaccaggagcagtgccagcagctgtggggacccggagcccgacctgcccctgacctctgcttcgagaaggtgaatgtggcaggagacacctttggaaactgtggaaaggacatgaatggtgaacacaggaagtgcaacatgagagatgcgaagtgtgggaagatccagtgtcagagctctgaggcccggcccctggagtccaacgcggtgcccattgacaccactatcatcatgaatgggaggcagatccagtgccggggcacccacgtctaccgaggtcctgaggaggagggtgacatgctggacccagggctggtgatgactggaaccaagtgtggctacaaccatatttgctttgaggggcagtgcaggaacacctccttctttgaaactgaaggctgtgggaagaagtgcaatggccatggggtctgtaacaacaaccagaactgccactgcctgccgggctgggccccgcccttctgcaacacaccgggccacgggggcagtatcgacagtgggcctatgccccctgagagtgtgggtcctgtggtagctggagtgttggtggccatcttggtgctggcggtcctcatgctgatgtactactgctgcagacagaacaacaaactaggccaactcaagccctcagctctcccttccaagctgaggcaacagttcagttgtcccttcagggtttctcagaacagcgggactggtcatgccaacccaactttcaagctgcagacgccccagggcaagcgaaaggtgatcaacactccggaaatcctgcggaagccctcccagcctcctccccggccccctccagattatctgcgtggtgggtccccacctgcaccactgccagctcacctgagcagggctgctaggaactccccagggcccgggtctcaaatagagaggacggagtcgtccaggaggcctcctccaagccggccaattccccccgcaccaaattgcatcgtttcccagaagtgccttttgcctcctgccatgattctgagggctccccagccaagtggaactgttgtttgcttagtaattagttttaatatggccttctacaggtcaatgaggattagaatagaaccaggaatcaagaccaagttgctggttttactagtttggaagcagttttaa

SEQ ID NO: 279907 - DNA, 3312 bp, Artificial Sequence
  derived and/or modified sequence
tggctgagggcgtgtgagcgccgagcgctaagggccgccgccaccatgccagggggcgcaggcgccgcccggctctgcttgctggcgtttgccctgcagcccctccggccgcgggcggcgcgggagcctggatggacaagaggaagtgaggaaggcagccccaagctgcagcatgaacttatcatacctcagtggaagacttcagaaagccccgtgagagaaaagcatccactcaaagctgagctcagggtaatggctgaggggcgagaactgatcctggacctggagaagaatgagcaactttttgctccttcctacacagaaacccattatacttcaagtggtaaccctcaaaccaccacacggaaattggaggatcactgcttttaccacggcacggtgagggagacagaactgtccagcgtcacgctcagcacttgccgaggaattagaggactgattacggtgagcagcaacctcagctacgtcatcgagcccctccctgacagcaagggccaacaccttatttacagatctgaacatctcaagccgcccccgggaaactgtgggttcgagcactccaagcccaccaccagggactgggctcttcagtttacacaacagaccaagaagcgacctcgcaggatgaaaagggaagatttaaactccatgaagtatgtggagctttacctcgtggctgattatttagagtttcagaagaatcgacgagaccaggacgccaccaaacacaagctcatagagatcgccaactatgttgataagttttaccgatccttgaacatccggattgctctcgtgggcttggaagtgtggacccacgggaacatgtgtgaagtttcagagaatccatattctaccctctggtcctttctcagttggaggcgcaagctgcttgcccagaagtaccatgacaacgcccaattaatcacgggcatgtccttccacggcaccaccatcggcctggcccccctcatggccatgtgctctgtgtaccagtctggaggagtcaacatggaccactccgagaatgccattggcgtggctgccaccatggcccacgagatgggccacaactttggcatgacccatgattctgcagattgctgctcggccagtgcggctgatggtgggtgcatcatggcagctgccactgggcacccctttcccaaagtgttcaatggatgcaacaggagggagctggacaggtatctgcagtcaggtggtggaatgtgtctctccaacatgccagacaccaggatgttgtatggaggccggaggtgtgggaacgggtatctggaagatggggaagagtgtgactgtggagaagaagaggaatgtaacaacccctgctgcaatgcctctaattgtaccctgaggccgggggcggagtgtgctcacggctcctgctgccaccagtgtaagctgttggctcctgggaccctgtgccgcgagcaggccaggcagtgtgacctcccggagttctgtacgggcaagtctccccactgccctaccaacttctaccagatggatggtaccccctgtgagggcggccaggcctactgctacaacggcatgtgcctcacctaccaggagcagtgccagcagctgtggggacccggagcccgacctgcccctgacctctgcttcgagaaggtgaatgtggcaggagacacctttggaaactgtggaaaggacatgaatggtgaacacaggaagtgcaacatgagagatgcgaagtgtgggaagatccagtgtcagagctctgaggcccggcccctggagtccaacgcggtgcccattgacaccactatcatcatgaatgggaggcagatccagtgccggggcacccacgtctaccgaggtcctgaggaggagggtgacatgctggacccagggctggtgatgactggaaccaagtgtggctacaaccatatttgctttgaggggcagtgcaggaacacctccttctttgaaactgaaggctgtgggaagaagtgcaatggccatggggtctgtaacaacaaccagaactgccactgcctgccgggctgggccccgcccttctgcaacacaccgggccacgggggcagtatcgacagtgggcctatgccccctgagagtgtgggtcctgtggtagctggagtgttggtggccatcttggtgctggcggtcctcatgctgatgtactactgctgcagacagaacaacaaactaggccaactcaagccctcagctctcccttccaagctgaggcaacagttcagttgtcccttcagggtttctcagaacagcgggactggtcatgccaacccaactttcaagctgcagacgccccagggcaagcgaaaggtgatcaacactccggaaatcctgcggaagccctcccagcctcctccccggccccctccagattatctgcgtggtgggtccccacctgcaccactgccagctcacctgagcagggctgctaggaactccccagggcccgggtctcaaatagagaggacggagtcgtccaggaggcctcctccaagccggccaattccccccgcaccaaattgcatcgtttcccaggacttctccaggcctcggccgccccagaaggcactcccggcaaacccagtgccaggccgcaggagcctccccaggccaggaggtgcatccccactgcggccccctggtgctggccctcagcagtcccggcctctggcagcacttgccccaaaggtgagtccacgggaagccctcaaggtgaaagctggtaccagagggctccaggggggcaggtgtagagttgagaaaacaaagcaattcatgcttcttgtggtctggactgaacttccagaacaaaagccaagggcaaaacattcatgtttcttggtgcccgcttgactgtggagttttggcttcatgtgaaaggtgattcttagaatcctgagctgtggtggcttcagtcctgcccctgcacctgacctggggagggaccctgagcaagtccctcttgagtctgtttcctcatttgtacagaggctatgatgagcagtagtaccagccccatcaggttgttgtgaagagcaaggaagtgcattagtagaagccacctggcctgcgggaggctgtgtacacttggcccctcctcgtacttcttctgtgtggctgacagtctcagtttgccagtcttggcagtcaggtcagaaagggatgaggtgaagaagctggctgaccatgctgtattcccacgaggcattgagaaaactatggactgtgctgctgccttagcagggaagggaa

SEQ ID NO: 279908 - protein, 271 aa, Artificial Sequence
  derived and/or modified sequence
YTGGIAKLERDMSNVSLGPTPIPELTHIMVGLESCSFLEEDFIPFAVLNMMMGGGGSFSAGGPGKGMFSRLYLNVLNRHHWMYNATSYHHSYEDTGLLCIHASADPRQVREMVEIITKEFILMGGTVDTVELERAKTQLTSMLMMNLESRPVIFEDVGRQVLATRSRKLPHELCTLIREYRRGSEGLPQASARLRGGRLALPQAVVGLWYVHHTQNLGPSPVVLSRGGQGQGRGVADLVSLPGPTMHLLPPWQVTPPSAPLGGAVTTAQSC

SEQ ID NO: 279909 - protein, 922 aa, Artificial Sequence
  derived and/or modified sequence
MSTMRLLTLALLFSCSVARAACDPKIVNIGAVLSTRKHEQMFREAVNQANKRHGSWKIQLNATSVTHKPNAIQMALSVCEDLISSQVYAILVSHPPTPNDHFTPTPVSYTAGFYRIPVLGLTTRMSIYSDKSIHLSFLRTVPPYSHQSSVWFEMMRVYSWNHIILLVSDDHEGRAAQKRLETLLEERESKAEKVLQFDPGTKNVTALLMEAKELEARVIILSASEDDAATVYRAAAMLNMTGSGYVWLVGEREISGNALRYAPDGILGLQLINGKNESAHISDAVGVVAQAVHELLEKENITDPPRGCVGNTNIWKTGPLFKRVLMSSKYADGVTGRVEFNEDGDRKFANYSIMNLQNRKLVQVGIYNGTHVIPNDRKIIWPGGETEKPRGYQMSTRLKIVTIHQEPFVYVKPTLSDGTCKEEFTVNGDPVKKVICTGPNDTSPGSPRHTVPQCCYGFCIDLLIKLARTMNFTYEVHLVADGKFGTQERVNNSNKKEWNGMMGELLSGQADMIVAPLTINNERAQYIEFSKPFKYQGLTILVKKEIPRSTLDSFMQPFQSTLWLLVGLSVHVVAVMLYLLDRFSPFGRFKVNSEEEEEDALTLSSAMWFSWGVLLNSGIGEGAPRSFSARILGMVWAGFAMIIVASYTANLAAFLVLDRPEERITGINDPRLRNPSDKFIYATVKQSSVDIYFRRQVELSTMYRHMEKHNYESAAEAIQAVRDNKLHAFIWDSAVLEFEASQKCDLVTTGELFFRSGFGIGMRKDSPWKQNVSLSILKSHENGFMEDLDKTWVRYQECDSRSNAPATLTFENMAGVFMLVAGGIVAGIFLIFIEIAYKRHKDARRKQMQLAFAAVNVWRKNLQDRKSGRAEPDPKKKATFRAITSTLASSFKRRRSSKDTQYHPTDITGPLNLSDPSVSTVV

SEQ ID NO: 279910 - protein, 909 aa, Artificial Sequence
  derived and/or modified sequence
MSTMRLLTLALLFSCSVARAACDPKIVNIGAVLSTRKHEQMFREAVNQANKRHGSWKIQLNATSVTHKPNAIQMALSVCEDLISSQVYAILVSHPPTPNDHFTPTPVSYTAGFYRIPVLGLTTRMSIYSDKSIHLSFLRTVPPYSHQSSVWFEMMRVYSWNHIILLVSDDHEGRAAQKRLETLLEERESKAEKVLQFDPGTKNVTALLMEAKELEARVIILSASEDDAATVYRAAAMLNMTGSGYVWLVGEREISGNALRYAPDGILGLQLINGKNESAHISDAVGVVAQAVHELLEKENITDPPRGCVGNTNIWKTGPLFKRVLMSSKYADGVTGRVEFNEDGDRKFANYSIMNLQNRKLVQVGIYNGTHVIPNDRKIIWPGGETEKPRGYQMSTRLKIVTIHQEPFVYVKPTLSDGTCKEEFTVNGDPVKKVICTGPNDTSPGSPRHTVPQCCYGFCIDLLIKLARTMNFTYEVHLVADGKFGTQERVNNSNKKEWNGMMGELLSGQADMIVAPLTINNERAQYIEFSKPFKYQGLTILVKKEIPRSTLDSFMQPFQSTLWLLVGLSVHVVAVMLYLLDRFSPFGRFKVNSEEEEEDALTLSSAMWFSWGVLLNSGIGEGAPRSFSARILGMVWAGFAMIIVASYTANLAAFLVLDRPEERITGINDPRLRNPSDKFIYATVKQSSVDIYFRRQVELSTMYRHMEKHNYESAAEAIQAVRDNKLHAFIWDSAVLEFEASQKCDLVTTGELFFRSGFGIGMRKDSPWKQNVSLSILKSHENGFMEDLDKTWVRYQECDSRSNAPATLTFENMAGVFMLVAGGIVAGIFLIFIEIAYKRHKDARRKQMQLAFAAVNVWRKNLQVGQATLRGLVPRARPGHGPPPSPKAVALALALVGRTGARSHGQGQW

SEQ ID NO: 279911 - DNA, 2769 bp, Artificial Sequence
  derived and/or modified sequence
atgtctaccatgcgcctgctgactctggcccttttgttcagttgctctgtcgcaagggccgcctgtgacccaaagatcgtgaatattggagcagttctttccaccaggaagcacgagcagatgttccgggaggcggtgaatcaggcaaacaaacgacatgggagctggaaaatacagctcaatgctacttcagtgacccacaagccgaatgctattcagatggctttatccgtctgtgaggaccttattagctcccaggtctacgcaatcctggtgagccacccccccacccccaatgaccattttacaccaactccggtctcctacacagccgggttttatagaatcccagtcctaggacttacgactagaatgtccatttatagcgataagagtatccacctgtcttttctgaggactgtgcctccatactctcaccaaagttcagtgtggtttgagatgatgagagtgtacagttggaaccatatcattctgttagtatctgacgatcacgagggaagagccgcccagaagcgcttagagaccctgttggaagaacgggaatcaaaagccgaaaaagttctgcagtttgaccccggcaccaaaaacgtgacagccctgctgatggaggcaaaggagctggaggccagagtgatcatcctaagcgcttcagaagatgatgcagcgactgtgtatagggctgccgctatgctgaacatgacaggctccggatacgtgtggttggtgggagaaagagagattagtggcaatgccctaaggtatgccccggatgggatcctggggctgcaactgatcaacggaaagaatgaaagcgcccacatctctgacgccgtgggcgtggtcgcgcaggccgtccatgagctcttggaaaaagagaatatcactgatccaccccgagggtgcgtgggaaataccaatatttggaaaactggacccctgttcaaacgcgttctgatgtctagtaagtatgccgacggcgtgaccggacgcgtcgagtttaacgaggatggggaccgaaaatttgctaattatagtattatgaacctccagaatcggaagctcgtgcaagttggcatctacaacggtacacacgttatacctaatgataggaaaattatttggccaggcggggagactgaaaaaccccggggctatcaaatgagcaccagactgaaaatcgtgacaatccatcaggagccttttgtctacgtaaagcccaccctgtccgacggcacctgcaaagaggaatttaccgtgaacggagaccccgtgaagaaagtcatatgtactggtccgaatgacaccagccccggtagtcccagacacaccgtacctcagtgctgctatggcttttgcatcgatctgttgattaaacttgcaagaacaatgaacttcacttatgaggtacatctcgttgcagacgggaagttcggcacgcaggaacgtgtgaacaactcaaacaagaaagagtggaacggcatgatgggcgagctcctttcaggtcaggcagacatgatagtggctccccttactatcaacaacgaacgcgcacaatatattgaattcagtaagccgtttaaataccaaggacttacaattcttgttaagaaggaaattccaaggagtactctggattcatttatgcagcccttccagtccacactgtggttgttggtggggttgtcagtgcatgtggtcgctgtgatgttgtacttactcgatcggttctcccccttcggccgtttcaaagtaaactctgaggaagaagaagaagacgctctgactctgtcatccgctatgtggttctcgtggggcgtgcttctgaactccggaattggggagggcgcccccaggagcttctccgctcgcatactcggcatggtttgggcggggttcgccatgataattgtggcctcctataccgccaatcttgccgccttcctggtactggacagaccagaggagcggataaccggcatcaatgacccaagactcaggaatccgtcagacaagttcatctatgcgactgtcaaacagtcaagcgtggatatttatttccgccgtcaggtggagcttagcaccatgtacaggcacatggagaagcacaattatgagtcagctgccgaagcaattcaggcagtccgcgacaacaagctccacgccttcatctgggattcagcagtgttagaatttgaggcctcgcagaagtgcgacctggtaacaactggcgaactgttttttcgcagtggcttcggcataggaatgcgaaaagattcgccttggaaacagaatgtgtctcttagcattctaaagtcgcacgagaatggattcatggaagacctggacaaaacgtgggtgcgctatcaggaatgcgattctcggtctaacgctccagcaaccttaacttttgagaacatggcgggcgtgtttatgcttgtggccggcggaatcgtggccggaatttttctgatttttattgagatcgcttataagaggcacaaggacgctcggcgcaaacagatgcagctggccttcgctgctgtcaacgtctggaggaagaatcttcaggatagaaagtccgggagggccgagcccgaccctaaaaaaaaagcaacattccgagcgattacatccaccttagccagttcattcaaacgcagacggtctagcaaggacacccagtatcacccgacagacattacaggccctctgaacttaagtgacccatctgtaagtacagtcgtatag

SEQ ID NO: 279912 - DNA, 2730 bp, Artificial Sequence
  derived and/or modified sequence
atgtctacaatgcggttactgaccctggctctgctcttttcctgttccgtggcgcgcgccgcgtgcgatcctaagatcgtgaacatcggagccgtcctgtcaactagaaaacacgagcaaatgttcagggaagcagtaaaccaagccaacaaaaggcatggatcttggaagatccaactgaacgcgaccagcgtgacccacaagccgaatgcgatccaaatggccttgtctgtgtgcgaggatttgatttcctcgcaagtgtacgctattctggtgtctcatcctccgacgccaaatgatcacttcacccctacccccgtctcttacacagctggcttctacagaatccctgtgttaggtctgactacccggatgtctatctacagcgataagtcaattcatttgagctttctgagaacagtcccaccctattcacaccagagctccgtctggttcgagatgatgcgtgtatactcatggaatcacatcattctgcttgtctctgacgaccacgaaggtagagccgcacagaagagactggagacacttctggaggagcgcgaatcgaaggcagagaaagtccttcagtttgatcctgggaccaagaatgtgacagccttgttaatggaagccaaagaactcgaggcaagagtcattatcctttccgcgtcagaagatgatgccgccaccgtatacagagctgctgcgatgttgaacatgacaggcagtggctatgtctggcttgtgggagaacgtgagatttccggcaatgctctgcggtatgcaccagacggaattctgggcctgcaactgataaatggtaaaaacgagagtgcgcatatttccgatgcagtgggggttgttgcacaagctgtgcacgagttgctcgagaaagaaaatatcactgacccaccaagaggatgtgtgggcaatacgaacatctggaaaacgggacctttatttaagagggtcttaatgtcttccaagtacgcggatggagtgactggccgagtggaatttaacgaagatggtgataggaaattcgccaattatagcataatgaatctgcagaaccgcaagttggtgcaggtaggcatatataacggtactcatgtgattcccaacgatcggaagatcatttggcccgggggcgagaccgagaagcctagagggtatcagatgtccacccgacttaaaatagttaccatccaccaggaaccattcgtatatgtgaagccaactctaagcgacggcacatgcaaggaggaattcaccgtgaatggcgaccccgttaagaaagttatctgcactggacccaacgacactagccccggttccccacggcatacagtcccccaatgttgttacggcttctgcattgacctgctgattaaattggcgcgcacaatgaactttacatatgaggttcacctcgtggccgatggaaaatttggcacacaggagcgggtcaataatagcaataagaaagaatggaacgggatgatgggtgagttgctgtccggacaagctgatatgatcgtggcaccgctgactattaataatgaacgggcgcagtatatcgagttctcaaaaccatttaagtaccaaggactcaccatattagtaaaaaaggagatccctcgaagcaccctcgactcctttatgcagccctttcagagcacactgtggttactggtcggcttgtcagttcatgtggttgccgtgatgctctatctgctggatcgcttctcacctttcgggagattcaaggtgaatagtgaagaagaggaagaggatgctctgacactgagcagtgctatgtggttctcctggggagtcttgttgaacagcggaatcggggagggagcccctagatccttttcagcccggatcttagggatggtttgggccggcttcgcaatgatcatagtggcaagttacacagccaacttagccgccttcctcgtgcttgatcggcccgaggaacgaatcactgggattaatgaccccagacttcggaatccaagcgataaattcatatatgcaacagtgaagcagagttcagtggatatttacttcaggcgacaggtcgaactcagtacaatgtatcgacacatggagaaacataattacgagagcgctgcagaagctatccaggctgtgagggacaacaaacttcatgcattcatttgggattcagctgtgctggagtttgaagcctcacagaagtgtgatctggtcactactggagagctgttctttagatcgggctttggtattggaatgcgcaaagattcaccttggaagcagaatgtgagtctatcgattctcaaatcccatgagaatggtttcatggaggatttggataaaacctgggtccggtatcaagagtgtgacagtaggtccaatgcccccgcaactctgacatttgagaatatggctggcgtcttcatgttggttgccggtggcattgtcgcggggatttttctcattttcatagagattgcttataaacgccacaaggatgccagacggaaacagatgcaacttgcgttcgctgccgtcaatgtttggagaaagaacctgcaggtcggacaggctaccctgcggggactggtgcccagagccagacccgggcacgggccacctccgagtcctaaggccgtcgcactggcactggcactggtggggcgcactggggcccgatcacatggtcagggtcagtggtag

SEQ ID NO: 279913 - DNA, 4779 bp, Artificial Sequence
  derived and/or modified sequence
ggtaaggctctggaaaagggggcgctgggagcgcattgcgagggggctggagagggagagaggagcggaagctgagggtgtgaaacggctggccccgaacacacctcgcggcgctccagtgattcctggtgtccgacctcagccccagtcagtgcgggtccagtttccaggctctcgcggaaggcctggctgagcacatgcggcagccacggtcaccctccctattcctcttagcccgaggaggggggtcccaagttacatggccacgcagatggggcctctccctcatttctgaaccttgtggggaggggaaccttgaagggagcgccccccagagccatggcttagggcctcccccacccctctggagctccagtctgcaagagtcaggagccgaaatatcgctgactgtgggtgacgactcttgcgcgcacacacacatacaagcgggcacgacgcgttcggtcctattaaaaggcacgcaagggtgcgggctgcacgcggtgacacggacccctctaacgtttccaaactgagctccctgcaggtccccgacagcacaggcccctgtcccaggacccctccaggcacgcgctcacacgcacacgcgcgctccccggctcacgcgcgctccgacacacacgctcacgcgaacgcaggcgcacgctctggcgcgggaggcgcccccttcgcctccgtgttgggaagcgggggcggcgggaggggcaggagacgttggccccgctcgcgtttctgcagctgctgcagtcgccgcagcgtccggaccggaaccagcgccgtccgcggagccgccgccgccgccgccgggccctttccaagccgggcgctcggagctgtgcccggccccgcttcagcaccgcggacagcgccggccgcgtggggctgagccccgagcccccgcgcacgcttcagcgccccttccctcggccgacgtcccgggaccgccgctccgggggagacgtggcgtccgcagcccgcggggccgggcgagcgcaggacggcccggaagccccgcgggggatgcgccgagggccccgcgttcgcgccgcgcagagccaggcccgcggcccgagcccatgagcaccatgcgcctgctgacgctcgccctgctgttctcctgctccgtcgcccgtgccgcgtgcgaccccaagatcgtcaacattggcgcggtgctgagcacgcggaagcacgagcagatgttccgcgaggccgtgaaccaggccaacaagcggcacggctcctggaagattcagctcaatgccacctccgtcacgcacaagcccaacgccatccagatggctctgtcggtgtgcgaggacctcatctccagccaggtctacgccatcctagttagccatccacctacccccaacgaccacttcactcccacccctgtctcctacacagccggcttctaccgcatacccgtgctggggctgaccacccgcatgtccatctactcggacaagagcatccacctgagcttcctgcgcaccgtgccgccctactcccaccagtccagcgtgtggtttgagatgatgcgtgtctacagctggaaccacatcatcctgctggtcagcgacgaccacgagggccgggcggctcagaaacgcctggagacgctgctggaggagcgtgagtccaaggcagagaaggtgctgcagtttgacccagggaccaagaacgtgacggccctgctgatggaggcgaaagagctggaggcccgggtcatcatcctttctgccagcgaggacgatgctgccactgtataccgcgcagccgcgatgctgaacatgacgggctccgggtacgtgtggctggtcggcgagcgcgagatctcggggaacgccctgcgctacgccccagacggcatcctcgggctgcagctcatcaacggcaagaacgagtcggcccacatcagcgacgccgtgggcgtggtggcccaggccgtgcacgagctcctcgagaaggagaacatcaccgacccgccgcggggctgcgtgggcaacaccaacatctggaagaccgggccgctcttcaagagagtgctgatgtcttccaagtatgcggatggggtgactggtcgcgtggagttcaatgaggatggggaccggaagttcgccaactacagcatcatgaacctgcagaaccgcaagctggtgcaagtgggcatctacaatggcacccacgtcatccctaatgacaggaagatcatctggccaggcggagagacagagaagcctcgagggtaccagatgtccaccagactgaagattgtgacgatccaccaggagcccttcgtgtacgtcaagcccacgctgagtgatgggacatgcaaggaggagttcacagtcaacggcgacccagtcaagaaggtgatctgcaccgggcccaacgacacgtcgccgggcagcccccgccacacggtgcctcagtgttgctacggcttttgcatcgacctgctcatcaagctggcacggaccatgaacttcacctacgaggtgcacctggtggcagatggcaagttcggcacacaggagcgggtgaacaacagcaacaagaaggagtggaatgggatgatgggcgagctgctcagcgggcaggcagacatgatcgtggcgccgctaaccataaacaacgagcgcgcgcagtacatcgagttttccaagcccttcaagtaccagggcctgactattctggtcaagaaggagattccccggagcacgctggactcgttcatgcagccgttccagagcacactgtggctgctggtggggctgtcggtgcacgtggtggccgtgatgctgtacctgctggaccgcttcagccccttcggccggttcaaggtgaacagcgaggaggaggaggaggacgcactgaccctgtcctcggccatgtggttctcctggggcgtcctgctcaactccggcatcggggaaggcgcccccagaagcttctcagcgcgcatcctgggcatggtgtgggccggctttgccatgatcatcgtggcctcctacaccgccaacctggcggccttcctggtgctggaccggccggaggagcgcatcacgggcatcaacgaccctcggctgaggaacccctcggacaagtttatctacgccacggtgaagcagagctccgtggatatctacttccggcgccaggtggagctgagcaccatgtaccggcatatggagaagcacaactacgagagtgcggcggaggccatccaggccgtgagagacaacaagctgcatgccttcatctgggactcggcggtgctggagttcgaggcctcgcagaagtgcgacctggtgacgactggagagctgtttttccgctcgggcttcggcataggcatgcgcaaagacagcccctggaagcagaacgtctccctgtccatcctcaagtcccacgagaatggcttcatggaagacctggacaagacgtgggttcggtatcaggaatgtgactcgcgcagcaacgcccctgcgacccttacttttgagaacatggccggggtcttcatgctggtagctgggggcatcgtggccgggatcttcctgattttcatcgagattgcctacaagcggcacaaggatgctcgccggaagcagatgcagctggcctttgccgccgttaacgtgtggcggaagaacctgcaggatagaaagagtggtagagcagagcctgaccctaaaaagaaagccacatttagggctatcacctccaccctggcttccagcttcaagaggcgtaggtcctccaaagacacgcagtaccatcccactgatatcacgggcccgctcaacctctcagatccctcggtcagcaccgtggtgtgaggcccccggaggcgcccacctgcccagttagcccggccaaggacactgatgggtcctgctgctcgggaaggcctgagggaagcccacccgccccagagactgcccaccctgggcctcccgtccgtccgcccgcccaccccgctgcctggcgggcagcccctgctggaccaaggtgcggaccggagcggctgaggacggggcagagctgagtcggctgggcagggccgcagggcgctccggcagaggcagggccctggggtctctgagcagtggggagcgggggctaactggccccaggcggaggggcttggagcagagacggcagccccatccttcccgcagcaccagcctgagccacagtggggcccatggccccagctggctgggtcgcccctcctcgggcgcctgcgctcctctgcagcctgagctccaccctcccctcttcttgcggcaccgcccacccacaccccgtctgccccttgaccccacacgccggggctggccctgccctcccccacggccgtccctgacttcccagctggcagcgcctcccgccgcctcgggccgcctcctccagactcgagagggctgagcccctcctctcctcgtccggcctgcagcccagaacgggcctccccgggggtccccggacgctggctcgggactgtcttcaaccctgccctgcaccttgggcacgggagagcgccacccgcccgcccccgccctcgctccgggtgcgtgaccggcccgccaccttgtacagaaccagcactcccagggcccgagcgcgtgccttccccgtgcggcccgtgcgcagccgcgctctgcccctccgtccccagggtgcaggcgcgcaccgcccaacccccacctcccggtgtatgcagtggtgatgcctaaaggaatgtcacgc

SEQ ID NO: 279914 - DNA, 4184 bp, Artificial Sequence
  derived and/or modified sequence
ggcccggaagccccgcgggggatgcgccgagggccccgcgttcgcgccgcgcagagccaggcccgcggcccgagcccatgagcaccatgcgcctgctgacgctcgccctgctgttctcctgctccgtcgcccgtgccgcgtgcgaccccaagatcgtcaacattggcgcggtgctgagcacgcggaagcacgagcagatgttccgcgaggccgtgaaccaggccaacaagcggcacggctcctggaagattcagctcaatgccacctccgtcacgcacaagcccaacgccatccagatggctctgtcggtgtgcgaggacctcatctccagccaggtctacgccatcctagttagccatccacctacccccaacgaccacttcactcccacccctgtctcctacacagccggcttctaccgcatacccgtgctggggctgaccacccgcatgtccatctactcggacaagagcatccacctgagcttcctgcgcaccgtgccgccctactcccaccagtccagcgtgtggtttgagatgatgcgtgtctacagctggaaccacatcatcctgctggtcagcgacgaccacgagggccgggcggctcagaaacgcctggagacgctgctggaggagcgtgagtccaaggcagagaaggtgctgcagtttgacccagggaccaagaacgtgacggccctgctgatggaggcgaaagagctggaggcccgggtcatcatcctttctgccagcgaggacgatgctgccactgtataccgcgcagccgcgatgctgaacatgacgggctccgggtacgtgtggctggtcggcgagcgcgagatctcggggaacgccctgcgctacgccccagacggcatcctcgggctgcagctcatcaacggcaagaacgagtcggcccacatcagcgacgccgtgggcgtggtggcccaggccgtgcacgagctcctcgagaaggagaacatcaccgacccgccgcggggctgcgtgggcaacaccaacatctggaagaccgggccgctcttcaagagagtgctgatgtcttccaagtatgcggatggggtgactggtcgcgtggagttcaatgaggatggggaccggaagttcgccaactacagcatcatgaacctgcagaaccgcaagctggtgcaagtgggcatctacaatggcacccacgtcatccctaatgacaggaagatcatctggccaggcggagagacagagaagcctcgagggtaccagatgtccaccagactgaagattgtgacgatccaccaggagcccttcgtgtacgtcaagcccacgctgagtgatgggacatgcaaggaggagttcacagtcaacggcgacccagtcaagaaggtgatctgcaccgggcccaacgacacgtcgccgggcagcccccgccacacggtgcctcagtgttgctacggcttttgcatcgacctgctcatcaagctggcacggaccatgaacttcacctacgaggtgcacctggtggcagatggcaagttcggcacacaggagcgggtgaacaacagcaacaagaaggagtggaatgggatgatgggcgagctgctcagcgggcaggcagacatgatcgtggcgccgctaaccataaacaacgagcgcgcgcagtacatcgagttttccaagcccttcaagtaccagggcctgactattctggtcaagaaggagattccccggagcacgctggactcgttcatgcagccgttccagagcacactgtggctgctggtggggctgtcggtgcacgtggtggccgtgatgctgtacctgctggaccgcttcagccccttcggccggttcaaggtgaacagcgaggaggaggaggaggacgcactgaccctgtcctcggccatgtggttctcctggggcgtcctgctcaactccggcatcggggaaggcgcccccagaagcttctcagcgcgcatcctgggcatggtgtgggccggctttgccatgatcatcgtggcctcctacaccgccaacctggcggccttcctggtgctggaccggccggaggagcgcatcacgggcatcaacgaccctcggctgaggaacccctcggacaagtttatctacgccacggtgaagcagagctccgtggatatctacttccggcgccaggtggagctgagcaccatgtaccggcatatggagaagcacaactacgagagtgcggcggaggccatccaggccgtgagagacaacaagctgcatgccttcatctgggactcggcggtgctggagttcgaggcctcgcagaagtgcgacctggtgacgactggagagctgtttttccgctcgggcttcggcataggcatgcgcaaagacagcccctggaagcagaacgtctccctgtccatcctcaagtcccacgagaatggcttcatggaagacctggacaagacgtgggttcggtatcaggaatgtgactcgcgcagcaacgcccctgcgacccttacttttgagaacatggccggggtcttcatgctggtagctgggggcatcgtggccgggatcttcctgattttcatcgagattgcctacaagcggcacaaggatgctcgccggaagcagatgcagctggcctttgccgccgttaacgtgtggcggaagaacctgcaggtagggcaggccaccctccgaggcctggtgcccagggcccggcctggccacggccctcctccatccccgaaggccgtggcactggctctggctctggtgggcaggactggagctaggagccatggccaggggcagtggtgagtgctcccagggcacgggggcagcaccggtggggggctgcctgcaggtggctgcccactgcaaagccggggccgagggaggccacgcaccctgctccaagcctccgcctggcccctctgtctccagagtcgcccgccggtacccattccataggaaggcaatcaggcagggtaagacaggggcccgcctgtgtatggcacgtgagtccaagatgcattttgccctccgccgacccaagccccttgacacccttcggagacccccccctttcctgctatgtccttgtgctccgtgactctaatccgaattgggccaggtccggtcctgcctggtgcccaggttgtatccatgagaatttgccaccagcaagggcagccacggcccacctgggacagggtgggcagtgggcctgtacaggcctaagggctcgtggcccgcggtcgagttccggttcactccgtctcttctctttctctgggtgccgtcctggagcctgtgtcctgagatgaagccgacagtgcggccagggctgctgggggatgggggttgctggaggctccacacctctcatccgcccgctcttgctcttggcccccacaggtcccctggggacctggccgctgccagcactggcgggcacaggccacctggccatcagacctgaggccagagtcccgggagctgcctctgtcactccaattccacctcgacacctgcctccagccctcggccccttcctgaatcttggtgtgtgccccttgggggtcagtggcctccacgcagacagctggtgtggcctgaggggcaactcctccagtcctcagaggactcctcctcctcgggacgcctgtaagccagggccacccaggagccagggagccaggcggacctcccaggaagagccagccgagagcccccaagcccagccccagcacgagcaaggtcaggcccgagaccccgggcaggagaagaggccaccctcgaacgtccgctgtcggcccgtctgtccagcacagggaggcaggcaggagcgagggcccaagtggccggccaggctgggcagcggcccatgcaggagcaggcgagggcaggtgtggccaccaccctagccatctaatcacttatacatattcattttaggatagaaagagtggtagagcagagcctgaccctaaaaagaaagccacatttagggctatcacctccaccctggcttccagcttcaagaggcgtaggtcctccaaagacacggtaagggggagagcaccccagtcccgcgtccgactccacctgccctgccctgcgtgtgtctcccgccccatcaccccgccccggaccctgggctcctgtggcccactctgcccctgtctccctgtg

SEQ ID NO: 279915 - DNA, 2769 bp, Artificial Sequence
  derived and/or modified sequence
atgagcaccatgaggctgctgaccctggccctgctcttcagctgcagcgtggcccgggccgcctgtgaccccaagatcgtgaacattggagctgtgctgagcaccaggaagcatgagcagatgttccgggaggccgtgaaccaggccaacaagagacatggctcctggaagatccagctgaatgccacctctgtgacccacaagcccaatgccatccagatggccctgtctgtgtgtgaggacctgatcagcagccaggtgtatgccatcctggtgagccacccccccaccccaaatgaccacttcacccccacccctgtgtcctacacagctggcttctaccgcatccctgtgctgggcctgaccaccaggatgagcatctacagcgacaagagcatccacctgtccttcctgaggacagtgcccccctacagccaccagagctctgtgtggtttgagatgatgagggtgtacagctggaaccacatcatcctgctggtgtctgatgaccacgagggccgggccgcccagaagaggctggagaccctgctggaggagcgggagagcaaggccgagaaggtgctgcagtttgatcctggcaccaagaatgtgacagccctgctgatggaggccaaggagctggaggcccgggtcatcatcctgagcgcctctgaagatgatgctgccaccgtgtacagagctgctgccatgctgaacatgactggaagtggctacgtgtggctggtgggggagcgggagatctctggaaatgccctgcgctatgccccagatggcatcctgggcctgcagctgatcaatggcaagaatgaaagtgcccacatcagtgatgctgtgggcgtggtggcccaggccgtgcatgagctgctggagaaggagaacatcacagaccccccccggggctgtgtgggcaacaccaacatctggaagacaggccccctcttcaagagggtgctgatgagcagcaaatatgcagatggagtgacaggccgggtggagttcaatgaagatggagacaggaagtttgccaactacagcatcatgaacctgcagaacaggaagctggtgcaggtgggcatctacaacggcacccacgtgatccccaatgacaggaagatcatctggccaggaggagaaacagagaagccccggggctaccagatgagcacccggctgaagatcgtgaccatccaccaggagccctttgtgtatgtgaagcccaccctgagtgatggcacctgcaaggaggagttcaccgtgaatggagaccctgtgaagaaggtgatctgcaccggccccaatgacaccagccctggcagccccaggcacacagtgccccagtgctgctacggcttctgcatcgacctgctgatcaagctggcccggaccatgaacttcacctatgaggtgcacctggtggctgatggcaagtttggcacccaggagcgggtgaacaacagcaacaagaaggagtggaatggcatgatgggagagctgctgagcggccaggccgacatgattgtggcccccctgaccatcaacaatgaaagagcccagtacatcgagttcagcaagcccttcaagtaccagggcctgaccatcctggtgaagaaggagatccccaggagcaccctggacagcttcatgcagcccttccagagcaccctgtggctgctggtgggcctgtctgtgcacgtggtggccgtgatgctgtacctgctggaccgcttcagccccttcggccgcttcaaggtgaacagcgaggaggaggaggaggatgccctgaccctgagcagcgccatgtggttctcctggggcgtgctgctgaacagcggcattggagagggcgcccccaggagcttcagcgcccgcatcctgggcatggtgtgggccggctttgccatgatcatcgtggccagctacacagccaacctggccgccttcctggtgctggacaggcctgaggagcgcatcaccggcatcaatgacccccggctgaggaaccccagcgacaagttcatctatgccaccgtgaagcagagctctgtggacatctacttccggcggcaggtggagctgagcaccatgtaccgccacatggagaagcacaactatgaatctgctgctgaggccatccaggccgtgcgggacaacaagctgcacgccttcatctgggacagcgctgtgctggagtttgaggccagccagaagtgtgacctggtgaccactggagagctgttcttccgcagcggcttcggcatcggcatgaggaaggacagcccctggaagcagaatgtgtccctgagcatcctgaagagccatgaaaatggcttcatggaggacctggacaagacctgggtgcgctaccaggagtgtgacagccgcagcaatgccccagccaccctgacctttgagaacatggccggggtcttcatgctggtggccggcggcatcgtggccggcatcttcctgatcttcattgaaattgcctacaagaggcacaaggatgcccggaggaagcagatgcagctggcctttgctgctgtgaatgtgtggaggaagaacctgcaggacaggaagagcggccgggcagagccagaccccaagaagaaggccaccttccgggccatcaccagcaccctggccagcagcttcaagagaagaagaagcagcaaggacacccagtaccaccccacagacatcaccggccccctgaacctgagtgaccccagcgtgtccacagtggtgtag

SEQ ID NO: 279916 - DNA, 2730 bp, Artificial Sequence
  derived and/or modified sequence
atgagcaccatgaggctgctgaccctggccctgctcttcagctgcagcgtggcccgggccgcctgtgaccccaagatcgtgaacattggagctgtgctgagcaccaggaagcatgagcagatgttccgggaggccgtgaaccaggccaacaagagacatggctcctggaagatccagctgaatgccacctctgtgacccacaagcccaatgccatccagatggccctgtctgtgtgtgaggacctgatcagcagccaggtgtatgccatcctggtgagccacccccccaccccaaatgaccacttcacccccacccctgtgtcctacacagctggcttctaccgcatccctgtgctgggcctgaccaccaggatgagcatctacagcgacaagagcatccacctgtccttcctgaggacagtgcccccctacagccaccagagctctgtgtggtttgagatgatgagggtgtacagctggaaccacatcatcctgctggtgtctgatgaccacgagggccgggccgcccagaagaggctggagaccctgctggaggagcgggagagcaaggccgagaaggtgctgcagtttgatcctggcaccaagaatgtgacagccctgctgatggaggccaaggagctggaggcccgggtcatcatcctgagcgcctctgaagatgatgctgccaccgtgtacagagctgctgccatgctgaacatgactggaagtggctacgtgtggctggtgggggagcgggagatctctggaaatgccctgcgctatgccccagatggcatcctgggcctgcagctgatcaatggcaagaatgaaagtgcccacatcagtgatgctgtgggcgtggtggcccaggccgtgcatgagctgctggagaaggagaacatcacagaccccccccggggctgtgtgggcaacaccaacatctggaagacaggccccctcttcaagagggtgctgatgagcagcaaatatgcagatggagtgacaggccgggtggagttcaatgaagatggagacaggaagtttgccaactacagcatcatgaacctgcagaacaggaagctggtgcaggtgggcatctacaacggcacccacgtgatccccaatgacaggaagatcatctggccaggaggagaaacagagaagccccggggctaccagatgagcacccggctgaagatcgtgaccatccaccaggagccctttgtgtatgtgaagcccaccctgagtgatggcacctgcaaggaggagttcaccgtgaatggagaccctgtgaagaaggtgatctgcaccggccccaatgacaccagccctggcagccccaggcacacagtgccccagtgctgctacggcttctgcatcgacctgctgatcaagctggcccggaccatgaacttcacctatgaggtgcacctggtggctgatggcaagtttggcacccaggagcgggtgaacaacagcaacaagaaggagtggaatggcatgatgggagagctgctgagcggccaggccgacatgattgtggcccccctgaccatcaacaatgaaagagcccagtacatcgagttcagcaagcccttcaagtaccagggcctgaccatcctggtgaagaaggagatccccaggagcaccctggacagcttcatgcagcccttccagagcaccctgtggctgctggtgggcctgtctgtgcacgtggtggccgtgatgctgtacctgctggaccgcttcagccccttcggccgcttcaaggtgaacagcgaggaggaggaggaggatgccctgaccctgagcagcgccatgtggttctcctggggcgtgctgctgaacagcggcattggagagggcgcccccaggagcttcagcgcccgcatcctgggcatggtgtgggccggctttgccatgatcatcgtggccagctacacagccaacctggccgccttcctggtgctggacaggcctgaggagcgcatcaccggcatcaatgacccccggctgaggaaccccagcgacaagttcatctatgccaccgtgaagcagagctctgtggacatctacttccggcggcaggtggagctgagcaccatgtaccgccacatggagaagcacaactatgaatctgctgctgaggccatccaggccgtgcgggacaacaagctgcacgccttcatctgggacagcgctgtgctggagtttgaggccagccagaagtgtgacctggtgaccactggagagctgttcttccgcagcggcttcggcatcggcatgaggaaggacagcccctggaagcagaatgtgtccctgagcatcctgaagagccatgaaaatggcttcatggaggacctggacaagacctgggtgcgctaccaggagtgtgacagccgcagcaatgccccagccaccctgacctttgagaacatggccggggtcttcatgctggtggccggcggcatcgtggccggcatcttcctgatcttcattgaaattgcctacaagaggcacaaggatgcccggaggaagcagatgcagctggcctttgctgctgtgaatgtgtggaggaagaacctgcaggtgggccaggccaccctgcggggcctggtgccccgggcccggcccggccacggccccccacccagccccaaggctgtggccctggccctggccctggtgggccgcactggagcccggagccacggccagggccagtggtag

SEQ ID NO: 279917 - DNA, 2769 bp, Artificial Sequence
  derived and/or modified sequence
atgagcaccatgcggctgctgaccctggccctgctgttcagctgctctgtcgcccgagccgcctgcgacccaaaaatcgtgaacatcggggccgtacttagcacgaggaagcatgaacagatgtttagggaggctgtgaaccaggctaacaaacgacacggctcttggaaaattcaactgaatgccaccagtgtcactcacaagcccaacgctatccagatggccctgtcagtctgcgaagatctgataagtagccaggtctacgccattctggtgtcccatcctccgaccccaaacgatcacttcactccaacgcctgtgtcctacaccgccggtttctatcgcatacctgtactggggttgacaactcgcatgtcaatatattccgataaaagcattcatctctctttcctaagaacagtgcctccctatagtcatcagtcatcagtgtggttcgaaatgatgcgtgtgtatagttggaaccacataattttgctcgtgtccgacgatcatgaggggcgggcggcacagaaacgtctggagaccctgcttgaggaacgtgagtccaaggccgagaaggtgctgcagttcgacccgggcacaaagaacgtaacggctctccttatggaagccaaagagctggaggcacgcgtaattattttgtctgccagcgaggatgacgccgcaaccgtatatagggccgccgccatgctgaatatgacgggcagcggatacgtgtggctggtgggcgagagggaaattagtggcaacgccctgcggtacgccccagatggtatcctgggactccagctcattaatggcaagaatgagagtgcgcacatctcagacgcggttggtgtcgttgcccaggccgtgcatgagctcctggaaaaagagaatatcacagacccccctaggggatgcgtgggtaacaccaatatttggaagaccgggcctttatttaagcgggttctcatgtcttccaaatacgcagacggtgtgacggggagggtggaattcaatgaagatggagacaggaagttcgctaactacagtatcatgaacctgcagaacagaaaactcgtgcaggttgggatctataacggaacacacgtcatccccaatgataggaaaataatttggcctggaggggaaaccgaaaaaccgcgcggttaccagatgtctacccggctcaaaattgtgaccattcatcaggaacccttcgtgtacgtcaagccaacgctgtccgacggcacatgcaaagaagagttcactgttaatggggatccagtaaagaaagtcatctgcactggccccaacgatacttctcctggaagtcctcgacatactgtacctcagtgttgctatggattctgtatagacctgcttattaagttggccaggacaatgaacttcacatacgaggtgcacttggtagcagacggcaaattcgggacacaggagcgggtgaacaactccaacaagaaggagtggaatggcatgatgggagagctgctttccggccaagcagatatgatagtggctcctttgactattaataacgaaagagctcaatatattgaatttagcaaacctttcaaataccaggggttgacaatcttggtcaaaaaagagatcccaagatcaactctcgactctttcatgcagccattccagtcaacgttgtggctgttagtgggtctgtccgtccacgtggtcgccgtaatgctatacctgctggaccgtttctcgccatttggccgatttaaagtgaattctgaagaggaagaagaagacgcattgactttgtcgagtgccatgtggttctcatggggggtgctgctgaatagcggaattggagagggggcgcctagaagcttttcagcgcgtattctcgggatggtttgggccggttttgccatgatcatagttgcctcctacaccgcgaacctcgcagcgttccttgtattagaccgacccgaggagaggattactggcatcaacgaccccaggctccgtaacccttctgacaagtttatctacgccactgtcaagcagtcaagtgtggatatttatttccgccggcaagtggaactctctaccatgtacagacacatggagaagcacaactatgaatccgccgccgaggccattcaggccgttcgggacaataaactgcacgctttcatttgggactcagccgtcctggaatttgaagcctcgcagaagtgtgatctggttaccacaggagaactgttctttcgcagtggctttggcatcggaatgaggaaggatagcccatggaaacaaaatgtcagcctgtctatcctcaagtcccacgagaatggcttcatggaagacctggacaagacttgggtaaggtaccaggagtgtgattctagatctaacgcacctgcaactctaacatttgagaatatggccggcgtatttatgctggttgcaggtggcatagtggcagggattttcctcattttcatcgagatagcttataaaagacacaaggatgctcgtagaaagcagatgcaactcgctttcgccgcggtcaacgtgtggcggaaaaatctacaggatcgtaagtccggtagagccgaaccagatccgaaaaagaaggctacctttcgcgctatcacttctaccctggccagcagttttaagcggcgacgcagcagcaaggacacgcagtatcaccctaccgacattacaggccccttgaacctatccgatccatctgtgagtacagtagtctag

SEQ ID NO: 279918 - DNA, 2730 bp, Artificial Sequence
  derived and/or modified sequence
atgagcaccatgcggctgctgaccctggccctgctgttcagctgctctgtggcccgggctgcctgtgaccctaagattgtgaacatcggagccgtgctgagcactcgcaagcacgagcagatgttcagagaagctgttaatcaggccaataagcgccacggttcgtggaaaattcagttgaacgctacctccgttacccataaacctaatgccatccaaatggccttgagcgtgtgtgaggacctcatctcttcccaagtgtacgcaatcctcgtgtcgcatccgcccacaccaaacgatcacttcacacccaccccggtctcctatacggctggtttttatagaattcctgtcctcggactgacgactcggatgtccatatatagcgacaaatcgattcatttgagctttctccgaacagtacctccctatagccaccagagctctgtgtggtttgagatgatgagggtctacagctggaaccacatcatactgctggtgtcagatgatcacgaagggagggcagcccagaagaggctcgaaactcttcttgaagaacgcgagtctaaggccgaaaaggtcctccagttcgatcctgggactaagaacgtgacggctctgttgatggaggctaaggaactggaggccagggtgataattctcagcgcctctgaagacgacgccgctactgtataccgggctgctgccatgctgaacatgacgggaagcggatacgtgtggctcgtgggagaacgtgagatctccggcaacgctctgaggtatgcacctgacgggatattgggacttcagcttattaacggaaaaaatgaaagtgctcacatctctgatgccgtcggagttgtggcccaagccgtgcacgagctcctagagaaagagaacattaccgatccgccacgcggctgtgtgggaaacacaaacatctggaaaacgggcccgctttttaaacgggtgttaatgtcaagtaagtatgcagatggtgtgactggtcgggttgagtttaatgaggatggggaccggaaatttgccaactactccattatgaatctgcagaataggaagctggttcaagttgggatttataacgggacccatgttattccaaatgaccggaaaatcatctggcccggcggcgagacagagaagccacggggttaccagatgtcaacgcggcttaagatcgtgaccattcaccaagagcccttcgtctatgttaagcccaccttatccgacgggacctgcaaggaagagttcaccgtaaacggcgatccagtcaaaaaagtgatttgtactgggccaaacgatacgtccccgggttctcctcgtcacacggtcccgcagtgttgttacggcttctgcatagaccttcttattaagctcgcacggaccatgaatttcacgtatgaggtgcacctcgtggctgacgggaaattcggaactcaggaacgtgttaacaacagcaataaaaaagaatggaatggaatgatgggggaattgctgtctggacaggcagacatgattgtggccccgctcacaattaacaatgagcgagcccagtatatcgaattttctaaaccttttaagtaccagggcctgacaatcctggtcaaaaaggagatccctagaagcacactggattcatttatgcaaccatttcagagtacactgtggttgctggtgggcctaagcgtacacgtggtcgccgtgatgctgtatttgctggataggttcagcccctttggcagattcaaggtcaattccgaggaggaggaggaggatgcactgactctatccagcgcaatgtggttcagctggggcgtcttgctcaatagtgggatcggggagggtgcccctaggagtttctcagcgaggattcttggcatggtttgggccggattcgccatgattatcgtggctagttacactgccaacttggctgcatttctggttctcgatcggccagaggagcgaatcactggcatcaatgacccaaggctgcgaaatccctctgacaagtttatttacgctaccgtgaagcaatcaagtgtagatatctattttcgtagacaggtggaactgagcacgatgtatagacatatggagaagcacaattatgagtctgcagccgaggctatccaggcagtgagagacaataaactgcatgccttcatctgggacagtgccgtccttgagttcgaggcaagtcagaaatgtgatttggtgacaacaggtgagctgttttttcgttctggctttgggattggtatgcggaaggacagcccctggaagcagaatgttagcctgtcgatcctcaagtcacatgaaaatgggtttatggaagatctggataaaacctgggtcagataccaagagtgcgatagccgttctaacgctccagccactttgactttcgagaatatggccggggtgttcatgttggtggctggaggcattgttgccgggatcttcctcatatttatcgagatcgcatacaagcgccacaaagacgccagaaggaaacagatgcagctggccttcgctgcggtgaatgtctggcgcaagaatctccaggtgggacaggccacgctgcgcggactggtcccacgggcaaggccaggccacggaccacccccgagtccaaaggcggtggcccttgcgttggcattggtagggagaaccggggctcggtctcatggccagggccagtggtag

SEQ ID NO: 279919 - DNA, 2769 bp, Artificial Sequence
  derived and/or modified sequence
atgtccacaatgaggctcttgaccctggccttactcttttcctgttctgtggcacgcgctgcctgcgatcccaaaatcgtgaacattggagcagtgctttcaactcgtaaacacgagcaaatgttccgggaggccgttaatcaggccaataaacgacatggctcctggaaaatccaactcaatgctacaagtgtcacccacaagcccaacgcaattcagatggccctgagcgtgtgcgaggatctgattagctctcaagtgtacgctatactggtgagtcatccacctacacccaacgaccacttcacccctaccccagtcagttacacagccggtttctaccggatccctgtactgggcttaaccactcgtatgtccatctattccgacaagtcaattcacctgagtttcttacgcaccgtaccaccgtattctcatcagtctagcgtctggtttgagatgatgagagtctattcttggaaccatattatcctgctggtcagtgatgaccatgagggtagggcggcacagaaaaggctggagaccttactcgaggagagagagtccaaagcggaaaaggtcttacagtttgaccctgggaccaaaaatgttacagccctgctgatggaggccaaagaactggaggcacgggtgatcatcctcagcgctagcgaagatgacgccgcaacagtgtatcgggcagcagccatgcttaatatgacgggctccgggtacgtgtggctcgtgggcgaaagagaaatcagcggcaacgccctgcgctatgcaccagatggcattcttgggctgcaactgatcaacggaaaaaacgagagcgctcatattagtgacgcagtcggggtggttgcccaagcagtccacgagcttctggaaaaggagaatattaccgaccccccacgcggatgcgttggaaatacaaatatttggaagaccggtcctctgttcaagcgagtccttatgagtagcaaatatgcagacggcgtgacaggtcgcgtggaatttaatgaggacggggaccggaaattcgcaaactactcgatcatgaatctgcagaatagaaagttggtccaagtcggtatctataacggtactcacgtgatccctaacgaccgaaagataatctggccaggcggagagacagaaaaaccccgaggatatcaaatgtccacacggcttaagatcgtcaccatacatcaagagcccttcgtttacgtgaagccgacattgtcagatggtacctgcaaggaggaattcacagtgaacggggacccagtaaaaaaggtgatttgtaccggaccaaacgatacttcgccagggtcgcctagacacactgttcctcagtgttgttacgggttttgtatagatctactcatcaaactggccagaacgatgaacttcacttacgaagtgcatttggttgcagatggtaagttcggcacgcaggagagggtgaataatagcaacaagaaagagtggaacgggatgatgggagaactgttgagcggccaggccgacatgatcgtggctcctctcacgatcaataacgaacgggctcagtatatcgaattttctaaacctttcaagtatcaggggctgactatcttagtaaagaaggagattcccagatctacacttgactcattcatgcaaccctttcagagtactctgtggctccttgtggggctgagtgtgcacgtggtggccgtaatgctttatctgctggataggtttagccccttcgggagattcaaagttaatagcgaagaagaagaagaggacgctctgacactgtcatctgcgatgtggtttagctggggggttcttttgaatagtggaattggtgaaggtgctcccagatcattcagcgcgaggattctggggatggtatgggctgggtttgcgatgataattgtagcttcatatactgccaacttggcagcgttcttagtgctggatagacctgaggaaagaatcacaggaataaatgatcctaggctcagaaatccaagcgacaagttcatctacgccaccgtgaagcaatcctccgtcgacatctacttccggaggcaagtagagctgtcaaccatgtatcgccatatggaaaaacataactacgaatctgccgcagaggcaatacaggccgtgcgagacaataaactgcacgctttcatctgggactcagcggtgttggaatttgaagcctcacagaagtgtgacttggtcactacaggggagttgttttttagaagtgggttcggcattggcatgagaaaggactcaccatggaaacagaacgtgtccctgagcattctgaagtcacacgagaacggctttatggaagatctggataagacttgggtacgctaccaagagtgtgattcacgatcaaatgcaccagctaccctgacttttgaaaacatggcaggggtgtttatgcttgtcgcaggtggcatagtcgcgggaatcttcctgatctttatcgagatcgcatacaagagacataaggatgccaggagaaagcaaatgcaactggcgttcgccgctgtgaatgtgtggcgtaagaatttgcaagaccgtaaaagcggaagagcggagcccgacccgaagaagaaagccacattccgggctattacctcaacactggccagcagcttcaaaagaaggcgcagttcaaaggatactcagtaccatcctacagatatcaccggccctctgaaccttagcgacccgtctgtgtccaccgtggtctag

SEQ ID NO: 279920 - DNA, 2730 bp, Artificial Sequence
  derived and/or modified sequence
atgagtaccatgagactcttgaccttggccctcctgtttagttgtagtgtggccagagctgcctgcgatcccaaaatcgtcaacatcggtgccgtgctcagcacacgcaaacacgagcagatgttccgcgaggcggtcaatcaagcaaacaaacggcatggctcatggaagattcagctgaatgcgaccagtgtgacacataaacccaatgcgatacagatggctttgtccgtgtgcgaagacttgatatccagtcaagtgtacgctatcttagtctcccatccgcctaccccaaacgaccatttcactcctacacccgttagttacactgcaggtttttatcggattcccgtcctaggactaacaacgcggatgtctatctatagtgacaagtctattcatctgtccttcctccgaacagtgcccccttacagccaccagtccagcgtctggttcgagatgatgcgtgtatattcatggaaccacatcatcctgcttgttagcgacgaccatgaaggtcgagctgctcagaagcgactcgagacgctcctagaagagcgcgaatccaaggcagaaaaggtgcttcagttcgatcccggaaccaaaaacgtaaccgctttgctcatggaagctaaagagctcgaagctagagtgattatcctcagtgcttccgaggacgatgctgccactgtttatagagcagccgctatgttaaacatgactgggtccggttacgtctggctggttggcgaaagggaaatatccggcaacgccctgcgctacgccccagatggaatcctgggactgcaactgattaacggtaagaatgaatccgctcatatttctgatgcagtcggtgtggtcgcccaggccgtacacgagctgctcgaaaaggagaacataactgacccacctaggggttgtgtcggcaacaccaatatctggaagacaggccctctttttaaacgggttctgatgagctccaagtatgccgacggcgtcacggggagagtggagtttaacgaggatggggatcgcaagtttgccaactattcaatcatgaatctgcagaatagaaagttagttcaggtgggtatctacaacggcactcacgtaattccaaatgaccgcaagattatctggcccggtggggagactgagaaacctagagggtatcaaatgagtaccaggctcaagatcgttactattcaccaggagccgttcgtgtatgtcaaacccaccctttctgacggcacctgcaaagaagaatttaccgttaacggagatccggtgaagaaggtgatatgtactgggccaaacgacactagcccgggaagtccacgtcacacagtgccacagtgttgttacggcttctgcatcgacctccttattaagttggctcgaactatgaacttcacatacgaagtgcatcttgtagccgatgggaagtttggaacacaggaaagagtgaataactcaaacaagaaggaatggaacggtatgatgggcgaactgctttctggacaggccgacatgattgtagcgcctcttaccatcaataacgagcgggctcaatacatcgagtttagcaagcccttcaagtaccaggggctgaccatcctggtaaaaaaagaaattccacggtccacactggacagtttcatgcaacctttccagtctaccctgtggttgctcgtggggctgagcgtgcacgtcgtggctgttatgctgtacttgctggaccgcttttcaccattcggaagatttaaagtgaatagtgaggaggaggaagaagatgccttaaccctgtccagtgcaatgtggttctcatggggagtgctgctgaacagcggaatcggggaaggagctccgcgatccttctctgccagaatcttgggtatggtctgggccggatttgctatgatcatcgtggcgtcgtacactgccaacctcgccgctttcctcgtcctcgaccgccctgaggaaagaatcaccggcataaacgatcctcggttacggaatccaagcgataaattcatttatgctaccgttaaacagagttctgttgacatctacttcagacgacaggtagagctgagcaccatgtatcgacacatggagaaacataactacgagagcgccgcagaagcaatccaggcagtcagggataacaagctgcatgctttcatctgggacagcgctgtcttagagttcgaagcttcccaaaagtgcgatttagtgacgaccggggaattattttttcgatcaggtttcggcattgggatgcgaaaggactccccctggaagcagaacgtcagcctctccattctgaagagccacgagaatggcttcatggaagatctggataagacatgggtgaggtaccaggaatgtgactctaggagtaatgccccagccacactgacattcgaaaatatggctggggtgttcatgctggtggcaggcggaatcgtggcaggaatctttctcatcttcatcgaaatcgcttataagagacataaggacgctagacgaaagcagatgcaactcgccttcgccgcagttaacgtgtggcggaagaatcttcaggttggccaagcgacattacgtggactggtccccagagcaaggcccggtcatggcccaccgccttccccaaaagccgttgccctcgcacttgcacttgttggtcgaactggtgcaagaagtcatggacagggccagtggtag

SEQ ID NO: 279921 - DNA, 2769 bp, Artificial Sequence
  derived and/or modified sequence
atgagcaccatgagactgctgaccctggccctgctgttcagctgcagcgtggccagagccgcctgcgaccccaagatcgtgaacatcggcgccgtgctgagcaccagaaagcacgagcagatgttcagagaggccgtgaaccaggccaacaagagacacggcagctggaagatccagctgaacgccaccagcgtgacccacaagcccaacgccatccagatggccctgagcgtgtgcgaggacctgatcagcagccaggtgtacgccatcctggtgagccacccccccacccccaacgaccacttcacccccacccccgtgagctacaccgccggcttctacagaatccccgtgctgggcctgaccaccagaatgagcatctacagcgacaagagcatccacctgagcttcctgagaaccgtgcccccctacagccaccagagcagcgtgtggttcgagatgatgagagtgtacagctggaaccacatcatcctgctggtgagcgacgaccacgagggcagagccgcccagaagagactggagaccctgctggaggagagagagagcaaggccgagaaggtgctgcagttcgaccccggcaccaagaacgtgaccgccctgctgatggaggccaaggagctggaggccagagtgatcatcctgagcgccagcgaggacgacgccgccaccgtgtacagagccgccgccatgctgaacatgaccggcagcggctacgtgtggctggtgggcgagagagagatcagcggcaacgccctgagatacgcccccgacggcatcctgggcctgcagctgatcaacggcaagaacgagagcgcccacatcagcgacgccgtgggcgtggtggcccaggccgtgcacgagctgctggagaaggagaacatcaccgacccccccagaggctgcgtgggcaacaccaacatctggaagaccggccccctgttcaagagagtgctgatgagcagcaagtacgccgacggcgtgaccggcagagtggagttcaacgaggacggcgacagaaagttcgccaactacagcatcatgaacctgcagaacagaaagctggtgcaggtgggcatctacaacggcacccacgtgatccccaacgacagaaagatcatctggcccggcggcgagaccgagaagcccagaggctaccagatgagcaccagactgaagatcgtgaccatccaccaggagcccttcgtgtacgtgaagcccaccctgagcgacggcacctgcaaggaggagttcaccgtgaacggcgaccccgtgaagaaggtgatctgcaccggccccaacgacaccagccccggcagccccagacacaccgtgccccagtgctgctacggcttctgcatcgacctgctgatcaagctggccagaaccatgaacttcacctacgaggtgcacctggtggccgacggcaagttcggcacccaggagagagtgaacaacagcaacaagaaggagtggaacggcatgatgggcgagctgctgagcggccaggccgacatgatcgtggcccccctgaccatcaacaacgagagagcccagtacatcgagttcagcaagcccttcaagtaccagggcctgaccatcctggtgaagaaggagatccccagaagcaccctggacagcttcatgcagcccttccagagcaccctgtggctgctggtgggcctgagcgtgcacgtggtggccgtgatgctgtacctgctggacagattcagccccttcggcagattcaaggtgaacagcgaggaggaggaggaggacgccctgaccctgagcagcgccatgtggttcagctggggcgtgctgctgaacagcggcatcggcgagggcgcccccagaagcttcagcgccagaatcctgggcatggtgtgggccggcttcgccatgatcatcgtggccagctacaccgccaacctggccgccttcctggtgctggacagacccgaggagagaatcaccggcatcaacgaccccagactgagaaaccccagcgacaagttcatctacgccaccgtgaagcagagcagcgtggacatctacttcagaagacaggtggagctgagcaccatgtacagacacatggagaagcacaactacgagagcgccgccgaggccatccaggccgtgagagacaacaagctgcacgccttcatctgggacagcgccgtgctggagttcgaggccagccagaagtgcgacctggtgaccaccggcgagctgttcttcagaagcggcttcggcatcggcatgagaaaggacagcccctggaagcagaacgtgagcctgagcatcctgaagagccacgagaacggcttcatggaggacctggacaagacctgggtgagataccaggagtgcgacagcagaagcaacgcccccgccaccctgaccttcgagaacatggccggcgtgttcatgctggtggccggcggcatcgtggccggcatcttcctgatcttcatcgagatcgcctacaagagacacaaggacgccagaagaaagcagatgcagctggccttcgccgccgtgaacgtgtggagaaagaacctgcaggacagaaagagcggcagagccgagcccgaccccaagaagaaggccaccttcagagccatcaccagcaccctggccagcagcttcaagagaagaagaagcagcaaggacacccagtaccaccccaccgacatcaccggccccctgaacctgagcgaccccagcgtgagcaccgtggtgtag

SEQ ID NO: 279922 - DNA, 2730 bp, Artificial Sequence
  derived and/or modified sequence
atgagcaccatgagactgctgaccctggccctgctgttcagctgcagcgtggccagagccgcctgcgaccccaagatcgtgaacatcggcgccgtgctgagcaccagaaagcacgagcagatgttcagagaggccgtgaaccaggccaacaagagacacggcagctggaagatccagctgaacgccaccagcgtgacccacaagcccaacgccatccagatggccctgagcgtgtgcgaggacctgatcagcagccaggtgtacgccatcctggtgagccacccccccacccccaacgaccacttcacccccacccccgtgagctacaccgccggcttctacagaatccccgtgctgggcctgaccaccagaatgagcatctacagcgacaagagcatccacctgagcttcctgagaaccgtgcccccctacagccaccagagcagcgtgtggttcgagatgatgagagtgtacagctggaaccacatcatcctgctggtgagcgacgaccacgagggcagagccgcccagaagagactggagaccctgctggaggagagagagagcaaggccgagaaggtgctgcagttcgaccccggcaccaagaacgtgaccgccctgctgatggaggccaaggagctggaggccagagtgatcatcctgagcgccagcgaggacgacgccgccaccgtgtacagagccgccgccatgctgaacatgaccggcagcggctacgtgtggctggtgggcgagagagagatcagcggcaacgccctgagatacgcccccgacggcatcctgggcctgcagctgatcaacggcaagaacgagagcgcccacatcagcgacgccgtgggcgtggtggcccaggccgtgcacgagctgctggagaaggagaacatcaccgacccccccagaggctgcgtgggcaacaccaacatctggaagaccggccccctgttcaagagagtgctgatgagcagcaagtacgccgacggcgtgaccggcagagtggagttcaacgaggacggcgacagaaagttcgccaactacagcatcatgaacctgcagaacagaaagctggtgcaggtgggcatctacaacggcacccacgtgatccccaacgacagaaagatcatctggcccggcggcgagaccgagaagcccagaggctaccagatgagcaccagactgaagatcgtgaccatccaccaggagcccttcgtgtacgtgaagcccaccctgagcgacggcacctgcaaggaggagttcaccgtgaacggcgaccccgtgaagaaggtgatctgcaccggccccaacgacaccagccccggcagccccagacacaccgtgccccagtgctgctacggcttctgcatcgacctgctgatcaagctggccagaaccatgaacttcacctacgaggtgcacctggtggccgacggcaagttcggcacccaggagagagtgaacaacagcaacaagaaggagtggaacggcatgatgggcgagctgctgagcggccaggccgacatgatcgtggcccccctgaccatcaacaacgagagagcccagtacatcgagttcagcaagcccttcaagtaccagggcctgaccatcctggtgaagaaggagatccccagaagcaccctggacagcttcatgcagcccttccagagcaccctgtggctgctggtgggcctgagcgtgcacgtggtggccgtgatgctgtacctgctggacagattcagccccttcggcagattcaaggtgaacagcgaggaggaggaggaggacgccctgaccctgagcagcgccatgtggttcagctggggcgtgctgctgaacagcggcatcggcgagggcgcccccagaagcttcagcgccagaatcctgggcatggtgtgggccggcttcgccatgatcatcgtggccagctacaccgccaacctggccgccttcctggtgctggacagacccgaggagagaatcaccggcatcaacgaccccagactgagaaaccccagcgacaagttcatctacgccaccgtgaagcagagcagcgtggacatctacttcagaagacaggtggagctgagcaccatgtacagacacatggagaagcacaactacgagagcgccgccgaggccatccaggccgtgagagacaacaagctgcacgccttcatctgggacagcgccgtgctggagttcgaggccagccagaagtgcgacctggtgaccaccggcgagctgttcttcagaagcggcttcggcatcggcatgagaaaggacagcccctggaagcagaacgtgagcctgagcatcctgaagagccacgagaacggcttcatggaggacctggacaagacctgggtgagataccaggagtgcgacagcagaagcaacgcccccgccaccctgaccttcgagaacatggccggcgtgttcatgctggtggccggcggcatcgtggccggcatcttcctgatcttcatcgagatcgcctacaagagacacaaggacgccagaagaaagcagatgcagctggccttcgccgccgtgaacgtgtggagaaagaacctgcaggtgggccaggccaccctgagaggcctggtgcccagagccagacccggccacggccccccccccagccccaaggccgtggccctggccctggccctggtgggcagaaccggcgccagaagccacggccagggccagtggtag

SEQ ID NO: 279923 - protein, 922 aa, Artificial Sequence
  derived and/or modified sequence
MSTMRLLTLALLFSCSVARAACDPKIVNIGAVLSTRKHEQMFREAVNQANKRHGSWKIQLNATSVTHKPNAIQMALSVCEDLISSQVYAILVSHPPTPNDHFTPTPVSYTAGFYRIPVLGLTTRMSIYSDKSIHLSFLRTVPPYSHQSSVWFEMMRVYSWNHIILLVSDDHEGRAAQKRLETLLEERESKSKKRNYENLDQLSYDNKRGPKAEKVLQFDPGTKNVTALLMEAKELEARVIILSASEDDAATVYRAAAMLNMTGSGYVWLVGEREISGNALRYAPDGILGLQLINGKNESAHISDAVGVVAQAVHELLEKENITDPPRGCVGNTNIWKTGPLFKRVLMSSKYADGVTGRVEFNEDGDRKFANYSIMNLQNRKLVQVGIYNGTHVIPNDRKIIWPGGETEKPRGYQMSTRLKIVTIHQEPFVYVKPTLSDGTCKEEFTVNGDPVKKVICTGPNDTSPGSPRHTVPQCCYGFCIDLLIKLARTMNFTYEVHLVADGKFGTQERVNNSNKKEWNGMMGELLSGQADMIVAPLTINNERAQYIEFSKPFKYQGLTILVKKEIPRSTLDSFMQPFQSTLWLLVGLSVHVVAVMLYLLDRFSPFGRFKVNSEEEEEDALTLSSAMWFSWGVLLNSGIGEGAPRSFSARILGMVWAGFAMIIVASYTANLAAFLVLDRPEERITGINDPRLRNPSDKFIYATVKQSSVDIYFRRQVELSTMYRHMEKHNYESAAEAIQAVRDNKLHAFIWDSAVLEFEASQKCDLVTTGELFFRSGFGIGMRKDSPWKQNVSLSILKSHENGFMEDLDKTWVRYQECDSRSNAPATLTFENMAGVFMLVAGGIVAGIFLIFIEIAYKRHKDARRKQMQLAFAAVNVWRKNLQSTGGGRGALQNQKDTVLPRRAIEREEGQLQLCSRHRES

SEQ ID NO: 279924 - DNA, 2769 bp, Artificial Sequence
  derived and/or modified sequence
atgagcactatgcgcttgttaaccctagccctcttgtttagttgcagtgtcgcccgcgccgcttgcgaccctaagatcgttaacatcggagccgttttgtcaacaagaaaacacgagcagatgttccgcgaggcagtgaatcaggcaaacaaacggcatgggtcctggaaaatacagttgaacgccacatccgtgacgcacaaaccgaacgctatccaaatggcattgtcggtgtgtgaagatctcatttcttcccaggtgtacgcaatcctggtgtcacaccctcccactcccaatgaccactttacgccaactcctgtgtcatatactgccggcttttacaggatccccgtgctcggcctgacaacacgcatgtctatatattccgacaagagcatccacctgagtttccttcgcacagtgccaccctattctcaccagtctagcgtttggttcgagatgatgcgggtctatagttggaatcacatcatactattagtctctgacgaccacgaagggcgcgccgcacagaagcgtttagaaacattactagaggagagggagagtaaaagcaaaaagcgcaattatgaaaatctggatcagctgtcctacgataacaagcgcggccccaaggccgagaaggtgctccaattcgatcccgggaccaagaacgttaccgcccttttgatggaggctaaagagctggaggcccgcgtgattatactttccgcaagtgaagacgatgccgcaacagtgtacagggctgccgccatgctaaatatgactggctcaggctacgtgtggcttgtaggagagcgggagatttcgggaaacgccctgaggtacgccccagacggcatcttgggcctgcaactgataaatggtaagaatgagtcagcccacatatccgacgccgtgggcgttgtagctcaggcagtacacgagctgctggagaaggagaacatcacagacccccccagaggttgcgtgggtaacacaaacatttggaaaacagggcctttatttaagagagtgcttatgagctcaaagtacgcagacggcgtgactggcagggtggaatttaatgaagacggagataggaaattcgcgaattactccatcatgaacctgcaaaatagaaagctggtgcaggtcggaatttacaacggcacccatgtgatccccaatgatcgtaagatcatttggcctggtggggaaacagagaagccccgtgggtaccaaatgagcactagattaaaaattgtgacaattcaccaggagcccttcgtgtacgtgaaaccaactctgagcgacggaacttgcaaagaggagttcacagttaacggagaccctgtgaagaaggtgatctgcacagggcccaacgataccagtccaggtagcccgcggcatacggtcccccagtgctgctacggattctgtatagacctcctgattaagttagcacgcacgatgaactttacgtacgaagttcacttagtagccgatggaaaattcgggacccaggagcgcgtgaacaacagtaataaaaaggagtggaatggtatgatgggtgagcttctgtctgggcaggccgatatgattgtggcgccgctgacaatcaacaatgagagagcacaatatattgagttttctaagcccttcaagtatcagggattaactattctggtgaaaaaggaaatacctaggtcgacgctggattcattcatgcaaccattccaatcaacgctgtggttactcgtcggtctcagcgttcacgtagttgcagtgatgctttatctgttggatcgcttttcccctttcggcagatttaaggtaaactccgaagaggaggaagaggacgccttgactttaagtagcgctatgtggttctcttggggcgtgctgctcaactccggaatcggggaaggcgctcctcgatcattttccgctcggatcctcggaatggtgtgggccggttttgcgatgatcatagtggcatcatacacagctaatctggctgccttcctggtgctggatcggcctgaagagagaatcaccgggatcaatgaccccagactcagaaaccccagcgacaagtttatctatgcaaccgtcaagcaatcttcagtggatatctatttccggcggcaggtagagttatccacaatgtatagacacatggagaaacacaattacgagagcgcagccgaagctattcaagctgtacgggacaataaactgcacgcatttatctgggacagcgctgtcctagagtttgaggcatcacagaagtgtgacctggtcactacaggggagttgttctttcgatctggtttcggcataggcatgcgtaaggactcaccttggaaacaaaacgtttctttatcaattttgaagagtcatgagaatggctttatggaggatttggacaagacttgggtccggtaccaggagtgcgactctaggagcaatgccccagccactctgacgttcgagaacatggctggcgtcttcatgctggtcgccggcggcattgtggccggtatctttctgattttcattgagatcgcatataagcgccataaggatgcccggagaaagcagatgcagctggcctttgccgctgtgaacgtttggcgcaagaatctgcagtcaacaggaggcggcagaggcgctctgcagaatcagaaagacacggtcctcccccggagagctatcgagcgagaggaagggcagctgcagctgtgtagccgccatcgcgaatcttag

SEQ ID NO: 279925 - DNA, 4003 bp, Artificial Sequence
  derived and/or modified sequence
gagcccatgagcaccatgcgcctgctgacgctcgccctgctgttctcctgctccgtcgcccgtgccgcgtgcgaccccaagatcgtcaacattggcgcggtgctgagcacgcggaagcacgagcagatgttccgcgaggccgtgaaccaggccaacaagcggcacggctcctggaagattcagctcaatgccacctccgtcacgcacaagcccaacgccatccagatggctctgtcggtgtgcgaggacctcatctccagccaggtctacgccatcctagttagccatccacctacccccaacgaccacttcactcccacccctgtctcctacacagccggcttctaccgcatacccgtgctggggctgaccacccgcatgtccatctactcggacaagagcatccacctgagcttcctgcgcaccgtgccgccctactcccaccagtccagcgtgtggtttgagatgatgcgtgtctacagctggaaccacatcatcctgctggtcagcgacgaccacgagggccgggcggctcagaaacgcctggagacgctgctggaggagcgtgagtccaagagtaaaaaaaggaactatgaaaacctcgaccaactgtcctatgacaacaagcgcggacccaaggcagagaaggtgctgcagtttgacccagggaccaagaacgtgacggccctgctgatggaggcgaaagagctggaggcccgggtcatcatcctttctgccagcgaggacgatgctgccactgtataccgcgcagccgcgatgctgaacatgacgggctccgggtacgtgtggctggtcggcgagcgcgagatctcggggaacgccctgcgctacgccccagacggcatcctcgggctgcagctcatcaacggcaagaacgagtcggcccacatcagcgacgccgtgggcgtggtggcccaggccgtgcacgagctcctcgagaaggagaacatcaccgacccgccgcggggctgcgtgggcaacaccaacatctggaagaccgggccgctcttcaagagagtgctgatgtcttccaagtatgcggatggggtgactggtcgcgtggagttcaatgaggatggggaccggaagttcgccaactacagcatcatgaacctgcagaaccgcaagctggtgcaagtgggcatctacaatggcacccacgtcatccctaatgacaggaagatcatctggccaggcggagagacagagaagcctcgagggtaccagatgtccaccagactgaagattgtgacgatccaccaggagcccttcgtgtacgtcaagcccacgctgagtgatgggacatgcaaggaggagttcacagtcaacggcgacccagtcaagaaggtgatctgcaccgggcccaacgacacgtcgccgggcagcccccgccacacggtgcctcagtgttgctacggcttttgcatcgacctgctcatcaagctggcacggaccatgaacttcacctacgaggtgcacctggtggcagatggcaagttcggcacacaggagcgggtgaacaacagcaacaagaaggagtggaatgggatgatgggcgagctgctcagcgggcaggcagacatgatcgtggcgccgctaaccataaacaacgagcgcgcgcagtacatcgagttttccaagcccttcaagtaccagggcctgactattctggtcaagaaggagattccccggagcacgctggactcgttcatgcagccgttccagagcacactgtggctgctggtggggctgtcggtgcacgtggtggccgtgatgctgtacctgctggaccgcttcagccccttcggccggttcaaggtgaacagcgaggaggaggaggaggacgcactgaccctgtcctcggccatgtggttctcctggggcgtcctgctcaactccggcatcggggaaggcgcccccagaagcttctcagcgcgcatcctgggcatggtgtgggccggctttgccatgatcatcgtggcctcctacaccgccaacctggcggccttcctggtgctggaccggccggaggagcgcatcacgggcatcaacgaccctcggctgaggaacccctcggacaagtttatctacgccacggtgaagcagagctccgtggatatctacttccggcgccaggtggagctgagcaccatgtaccggcatatggagaagcacaactacgagagtgcggcggaggccatccaggccgtgagagacaacaagctgcatgccttcatctgggactcggcggtgctggagttcgaggcctcgcagaagtgcgacctggtgacgactggagagctgtttttccgctcgggcttcggcataggcatgcgcaaagacagcccctggaagcagaacgtctccctgtccatcctcaagtcccacgagaatggcttcatggaagacctggacaagacgtgggttcggtatcaggaatgtgactcgcgcagcaacgcccctgcgacccttacttttgagaacatggccggggtcttcatgctggtagctgggggcatcgtggccgggatcttcctgattttcatcgagattgcctacaagcggcacaaggatgctcgccggaagcagatgcagctggcctttgccgccgttaacgtgtggcggaagaacctgcagagcaccgggggtggacgcggcgctttgcaaaaccaaaaagacacagtgctgccgcgacgcgctattgagagggaggagggccagctgcagctgtgttcccgtcatagggagagctgagactccccgcccgccctcctctgccccctcccccgcagacagacagacagacggacgggacagcggcccggcccacgcagagccccggagcaccacggggtcgggggaggagcacccccagcctcccccaggctgcgcctgcccgcccgccggttggccggctggccggtccaccccgtcccggccccgcgcgtgcccccagcgtggggctaacgggcgccttgtctgtgtatttctattttgcagcagtaccatcccactgatatcacgggcccgctcaacctctcagatccctcggtcagcaccgtggtgtgaggcccccggaggcgcccacctgcccagttagcccggccaaggacactgatgggtcctgctgctcgggaaggcctgagggaagcccacccgccccagagactgcccaccctgggcctcccgtccgtccgcccgcccaccccgctgcctggcgggcagcccctgctggaccaaggtgcggaccggagcggctgaggacggggcagagctgagtcggctgggcagggccgcagggcgctccggcagaggcagggccctggggtctctgagcagtggggagcgggggctaactggccccaggcggaggggcttggagcagagacggcagccccatccttcccgcagcaccagcctgagccacagtggggcccatggccccagctggctgggtcgcccctcctcgggcgcctgcgctcctctgcagcctgagctccaccctcccctcttcttgcggcaccgcccacccacaccccgtctgccccttgaccccacacgccggggctggccctgccctcccccacggccgtccctgacttcccagctggcagcgcctcccgccgcctcgggccgcctcctccagactcgagagggctgagcccctcctctcctcgtccggcctgcagcccagaacgggcctccccgggggtccccggacgctggctcgggactgtcttcaaccctgccctgcaccttgggcacgggagagcgccacccgcccgcccccgccctcgctccgggtgcgtgaccggcccgccaccttgtacagaaccagcactcccagggcccgagcgcgtgccttccccgtgcggcccgtgcgcagccgcgctctgcccctccgtccccagggtgcaggcgcgcaccgcccaacccccacctcccggtgtatgcagtggtgatgcctaaaggaatgtcacgc

SEQ ID NO: 279926 - DNA, 2769 bp, Artificial Sequence
  derived and/or modified sequence
atgagcaccatgaggctgctgaccctggccctgctcttcagctgcagcgtggcccgggccgcctgtgaccccaagatcgtgaacattggagctgtgctgagcaccaggaagcatgagcagatgttccgggaggccgtgaaccaggccaacaagagacatggctcctggaagatccagctgaatgccacctctgtgacccacaagcccaatgccatccagatggccctgtctgtgtgtgaggacctgatcagcagccaggtgtatgccatcctggtgagccacccccccaccccaaatgaccacttcacccccacccctgtgtcctacacagctggcttctaccgcatccctgtgctgggcctgaccaccaggatgagcatctacagcgacaagagcatccacctgtccttcctgaggacagtgcccccctacagccaccagagctctgtgtggtttgagatgatgagggtgtacagctggaaccacatcatcctgctggtgtctgatgaccacgagggccgggccgcccagaagaggctggagaccctgctggaggagcgggagagcaagagcaagaagaggaactatgagaacctggaccagctgtcctatgacaacaagaggggccccaaggccgagaaggtgctgcagtttgaccccggcaccaagaatgtgacagccctgctgatggaggccaaggagctggaggcccgggtcatcatcctgagcgcctctgaagatgatgctgccaccgtgtacagagctgctgccatgctgaacatgacaggcagcggctacgtgtggctggtgggggagcgggagatctctggaaatgccctgcgctatgccccagatggcatcctgggcctgcagctgatcaacgggaagaatgaaagtgcccacatcagtgatgctgtgggcgtggtggcccaggccgtgcatgagctgctggagaaggagaacatcacagatcctccccggggctgtgtgggcaacaccaacatctggaagacaggccccctcttcaagagggtgctgatgagcagcaaatatgcagatggagtgacaggccgggtggagttcaatgaagatggagacaggaagtttgccaactacagcatcatgaacctgcagaacaggaagctggtgcaggtgggcatctacaacggcacccacgtgatccccaatgacaggaagatcatctggccaggaggagaaacagagaagccccggggctaccagatgagcacccggctgaagatcgtgaccatccaccaggagccctttgtgtatgtgaagcccaccctgagtgatggcacctgcaaggaggagttcaccgtgaatggagaccctgtgaagaaggtgatctgcaccggccccaatgacaccagccctggcagccccaggcacacagtgccccagtgctgctacggcttctgcatcgacctgctgatcaagctggcccggaccatgaacttcacctatgaggtgcacctggtggctgatggcaagtttggcacccaggagcgggtgaacaacagcaacaagaaggagtggaatggcatgatgggagagctgctgagcggccaggccgacatgattgtggcccccctgaccatcaacaatgaaagagcccagtacatcgagttcagcaagcccttcaagtaccagggcctgaccatcctggtgaagaaggagatccccaggagcaccctggacagcttcatgcagcccttccagagcaccctgtggctgctggtgggcctgtctgtgcacgtggtggccgtgatgctgtacctgctggaccgcttcagccccttcggccgcttcaaggtgaacagcgaggaggaggaggaggatgccctgaccctgagcagcgccatgtggttctcctggggcgtgctgctgaacagcggcatcggggagggcgcccccaggagcttcagcgcccgcatcctgggcatggtgtgggccggctttgccatgatcatcgtggccagctacacagccaacctggccgccttcctggtgctggacaggcctgaggagcgcatcaccggcatcaatgacccccggctgaggaaccccagcgacaagttcatctatgccaccgtgaagcagagctctgtggacatctacttccggcggcaggtggagctgagcaccatgtaccgccacatggagaagcacaactatgagagcgctgctgaggccatccaggccgtgcgggacaacaagctgcacgccttcatctgggacagcgctgtgctggagtttgaggccagccagaagtgtgacctggtgaccaccggggagctgttcttccgcagcggctttggaattggcatgaggaaggacagcccctggaagcagaatgtgtccctgagcatcctgaagagccatgaaaatggcttcatggaggacctggacaagacctgggtgcgctaccaggagtgtgacagccgcagcaatgccccagccaccctgacctttgagaacatggccggggtcttcatgctggtggccggcggcatcgtggccggcatcttcctgatcttcatcgagatcgcctacaagaggcacaaggatgcccggaggaagcagatgcagctggcctttgctgctgtgaatgtgtggaggaagaacctgcagagcactggaggcggccgcggggccctgcagaaccagaaggacacagtgctgccccggcgggccatcgagcgggaggagggccagctgcagctgtgcagccgccaccgggagagctag

SEQ ID NO: 279927 - DNA, 2769 bp, Artificial Sequence
  derived and/or modified sequence
atgagcaccatgcggctgctgaccctggccctgctgttcagctgctcagtggcacgcgccgcgtgtgaccccaaaatcgtgaatattggagcggtgttgtccacccgaaaacacgagcagatgttcagagaagctgtgaaccaggccaataagcgacatggctcctggaaaatccagctgaatgcaactagcgtcactcacaagcccaacgccatacaaatggcactctcagtgtgcgaagatctcatatccagtcaggtttacgcaatccttgtgtcacatccaccaacaccaaacgatcacttcacacccaccccggtcagctacactgcagggttttaccgcatccctgtgctcggacttactactcgaatgagtatttattccgataaatctatccatctgtcatttctcagaaccgtgcccccatacagtcaccaaagttcggtgtggttcgagatgatgcgggtatatagttggaatcacatcatcctactggtcagtgatgaccacgaaggccgggcggctcaaaaacgactcgagacattgttggaggaacgcgaaagtaaatccaagaagcggaactacgagaacttagaccaattgtcatacgacaataaacgagggccaaaggccgagaaggtcctgcagttcgatcctggaacaaagaatgtgactgcgctgcttatggaagccaaagagctcgaggcaagagtgataatcctgagcgcttccgaagacgatgctgcaaccgtgtatcgggctgcagctatgttgaatatgactggctcagggtatgtgtggttagtcggagagagggagatctcaggtaatgcccttcggtacgcccccgatgggattcttggacttcaattaattaacggaaaaaacgagtccgcccacatctccgacgctgttggcgtggtcgcacaagccgtgcatgaactcctcgaaaaggaaaacattactgaccctccgaggggctgtgtcggcaacactaatatatggaaaaccgggccgctgttcaaaagagttttgatgtcctctaaatatgccgacggtgtgactgggcgggttgaatttaatgaggatggagatcgaaagttcgccaattactctatcatgaatctgcaaaataggaaacttgtgcaggttggcatctataatgggacgcacgtcattcccaacgatagaaaaatcatatggcccgggggtgaaactgagaagcctagaggctatcagatgtcgacccgactgaagatcgtcaccattcaccaggagcccttcgtgtatgtgaagccaaccctctctgatggtacatgtaaagaagagttcacggtgaatggagaccctgtcaaaaaggtaatttgcactggtcccaatgatacaagccctggtagtccccggcacaccgtgccccagtgctgttatggattctgcattgatctattaataaagctggctaggaccatgaattttacttatgaagtacatctagtggccgatggcaaatttggaacccaggagagagttaataattctaacaagaaagagtggaatggaatgatgggagaactgctttctggtcaggccgatatgatcgtggcacccctcaccatcaataatgaaagggcccagtacatcgagttctccaagccctttaagtatcaggggttgaccattctcgtgaaaaaggagataccccgcagcaccctagatagttttatgcagcccttccagtccaccctctggctgctggtcggactgtctgtgcacgtcgtcgccgtaatgctctatcttctcgaccgattctctccatttggccgatttaaggtgaatagtgaggaggaggaggaggacgctctcacactcagctccgcaatgtggttcagttggggcgtgctgttgaactccgggattggcgaaggcgcgcctcgctctttctcagcacgcattctcggaatggtttgggccggcttcgctatgatcatcgtggcgagttacacggccaacctagcagcttttcttgtcctcgacaggccagaggagcggatcaccggtatcaatgatccccgactgcgtaatccttcagacaagttcatctacgccacggttaaacagtcaagtgttgacatctacttccgccggcaagtggagctgtccactatgtatagacacatggaaaagcacaactatgagtcagctgccgaggctatacaggccgtgcgagacaacaagctgcatgccttcatatgggattctgccgtactcgaatttgaggcttcacagaagtgcgacctcgtgaccaccggcgaactcttcttccgtagcggcttcggtataggcatgaggaaggacagtccctggaaacaaaacgtaagtctctccattcttaaatcgcatgagaatggatttatggaagacctagacaagacctgggtgaggtaccaagagtgtgactcccgctccaatgcaccagccaccctgacatttgaaaacatggccggtgtattcatgctcgtggcaggtggaattgtggcaggaatctttctaatatttattgaaatcgcctataaacgccacaaggatgcgagacggaagcaaatgcagttggcattcgcagcggtgaacgtgtggcgcaaaaacctccagtccaccgggggcggccggggggcccttcagaaccagaaggatacagtgctgcctcggcgagccattgaacgcgaagagggccagttacaactgtgcagtcgccatcgggagagctag

SEQ ID NO: 279928 - DNA, 2769 bp, Artificial Sequence
  derived and/or modified sequence
atgagtaccatgagattattaactctcgctctgctcttcagctgtagtgtagccagagcggcttgcgacccgaaaatagtgaacataggggctgtcctgtctacaaggaaacacgaacaaatgttcagagaagccgtaaaccaagcgaataagcgccacgggtcctggaaaatacagctgaatgccacgagcgtgacccataaaccgaacgccatccagatggcgttgagcgtctgtgaagatctgatttcctcccaggtgtacgcaattttagttagccatcccccaacccctaatgaccattttactccaacaccggtatcatacaccgccggtttctatcggatccctgtgctggggttaaccacacgcatgtccatctacagcgataaatcgattcatttaagttttttacgaaccgttccaccatactctcatcagtcctctgtgtggttcgaaatgatgagagtatatagctggaaccatatcattctcctggtatctgatgaccacgagggacgtgctgcacagaagaggctcgagaccctattagaggaaagagaaagcaagagcaagaaaaggaattacgagaacctagatcagctgagctacgataataagagagggcctaaggcagagaaggtgctgcagttcgaccccggaactaagaacgtaaccgcccttctgatggaagcaaaggagctggaagcgagagtgatcatactaagcgcatccgaggatgacgctgctaccgtgtaccgagctgctgctatgctgaacatgaccgggagcggttatgtgtggcttgtaggagagcgggaaattagtggtaatgctcttcgttatgcgcctgatggcattctggggctccagctgatcaatggcaaaaatgagtctgcccacataagtgatgctgtgggcgtagtggcgcaggctgttcatgaactcttagagaaagaaaacattacagatccgcctaggggttgcgtcggtaacaccaatatttggaagacagggccactgttcaaaagagtgctgatgtctagtaagtacgccgacggagtgaccggcagggtcgaattcaacgaagatggagataggaaattcgccaactattcaattatgaacctccagaaccggaaattggtgcaggtaggtatctacaatggaacacacgttattcccaacgatcgtaaaataatctggccaggcggagaaaccgaaaagccacggggataccaaatgtcaactcggctaaagattgtgacaattcatcaagagcctttcgtgtacgtgaagcctacactgtcggatggcacttgtaaggaggagtttactgtcaatggagatccagtgaaaaaggtgatctgcaccggccctaacgatacttcccccggaagcccaagacatactgtgccccagtgctgctatggcttctgtattgatctgctgatcaaactggctaggacgatgaatttcacttacgaggtgcatctggtggccgacggcaagtttggcactcaggagcgagtgaacaattccaataaaaaggagtggaatggaatgatgggagagctcctctctggacaagctgacatgatcgtggcccctctgactatcaacaacgagagagcacaatacatcgagttttccaagcccttcaagtaccagggccttaccatcctggtgaaaaaagaaattccacggagcactctcgactcatttatgcagccgttccaatccaccctttggctcctggttgggcttagcgtacatgtggtggcggtgatgctctacctcctggaccggttctcaccttttggccgattcaaggtgaactctgaagaggaagaagaggacgccctgaccctaagttccgcaatgtggttcagctggggagtgttgctgaactctgggataggcgagggagcacctaggtcatttagtgcccgaatcctcgggatggtgtgggcgggtttcgctatgatcattgtagcgagttataccgcgaatctcgcagcctttcttgtactcgatcggccagaagaacgcataacagggattaacgacccacgcctacgaaatcccagtgacaagtttatatacgcaactgtaaaacaaagcagtgttgatatttacttcagacgccaagtggaattatctaccatgtacagacatatggaaaaacataattatgagtccgctgccgaggcgattcaggccgtgcgggacaataagttgcatgctttcatctgggactcagcggtactggaattcgaggcctcccagaaatgtgatctggtgaccactggcgagctgttcttcagatccgggtttggtatcggtatgcgaaaggactcaccatggaagcagaatgtgagtctgagcatcctcaaaagccatgaaaatgggttcatggaggatctcgacaagacctgggtgcgatatcaggagtgcgacagtaggtccaacgcccctgcgactcttacatttgaaaacatggcaggtgtgtttatgctggtcgctggcggaatcgtagccggaatttttctgatcttcatagagattgcttacaagaggcacaaggatgctcgcaggaaacagatgcaactggcttttgctgcagtaaatgtctggagaaagaatctacagtcgactggtggtggtcgcggagctcttcagaaccagaaggacaccgtcctgccacggagggcaatcgagagagaggaggggcaactgcaactgtgctcaagacatcgtgaatcttag

SEQ ID NO: 279929 - DNA, 2769 bp, Artificial Sequence
  derived and/or modified sequence
atgagcaccatgagactgctgaccctggccctgctgttcagctgcagcgtggccagagccgcctgcgaccccaagatcgtgaacatcggcgccgtgctgagcaccagaaagcacgagcagatgttcagagaggccgtgaaccaggccaacaagagacacggcagctggaagatccagctgaacgccaccagcgtgacccacaagcccaacgccatccagatggccctgagcgtgtgcgaggacctgatcagcagccaggtgtacgccatcctggtgagccacccccccacccccaacgaccacttcacccccacccccgtgagctacaccgccggcttctacagaatccccgtgctgggcctgaccaccagaatgagcatctacagcgacaagagcatccacctgagcttcctgagaaccgtgcccccctacagccaccagagcagcgtgtggttcgagatgatgagagtgtacagctggaaccacatcatcctgctggtgagcgacgaccacgagggcagagccgcccagaagagactggagaccctgctggaggagagagagagcaagagcaagaagagaaactacgagaacctggaccagctgagctacgacaacaagagaggccccaaggccgagaaggtgctgcagttcgaccccggcaccaagaacgtgaccgccctgctgatggaggccaaggagctggaggccagagtgatcatcctgagcgccagcgaggacgacgccgccaccgtgtacagagccgccgccatgctgaacatgaccggcagcggctacgtgtggctggtgggcgagagagagatcagcggcaacgccctgagatacgcccccgacggcatcctgggcctgcagctgatcaacggcaagaacgagagcgcccacatcagcgacgccgtgggcgtggtggcccaggccgtgcacgagctgctggagaaggagaacatcaccgacccccccagaggctgcgtgggcaacaccaacatctggaagaccggccccctgttcaagagagtgctgatgagcagcaagtacgccgacggcgtgaccggcagagtggagttcaacgaggacggcgacagaaagttcgccaactacagcatcatgaacctgcagaacagaaagctggtgcaggtgggcatctacaacggcacccacgtgatccccaacgacagaaagatcatctggcccggcggcgagaccgagaagcccagaggctaccagatgagcaccagactgaagatcgtgaccatccaccaggagcccttcgtgtacgtgaagcccaccctgagcgacggcacctgcaaggaggagttcaccgtgaacggcgaccccgtgaagaaggtgatctgcaccggccccaacgacaccagccccggcagccccagacacaccgtgccccagtgctgctacggcttctgcatcgacctgctgatcaagctggccagaaccatgaacttcacctacgaggtgcacctggtggccgacggcaagttcggcacccaggagagagtgaacaacagcaacaagaaggagtggaacggcatgatgggcgagctgctgagcggccaggccgacatgatcgtggcccccctgaccatcaacaacgagagagcccagtacatcgagttcagcaagcccttcaagtaccagggcctgaccatcctggtgaagaaggagatccccagaagcaccctggacagcttcatgcagcccttccagagcaccctgtggctgctggtgggcctgagcgtgcacgtggtggccgtgatgctgtacctgctggacagattcagccccttcggcagattcaaggtgaacagcgaggaggaggaggaggacgccctgaccctgagcagcgccatgtggttcagctggggcgtgctgctgaacagcggcatcggcgagggcgcccccagaagcttcagcgccagaatcctgggcatggtgtgggccggcttcgccatgatcatcgtggccagctacaccgccaacctggccgccttcctggtgctggacagacccgaggagagaatcaccggcatcaacgaccccagactgagaaaccccagcgacaagttcatctacgccaccgtgaagcagagcagcgtggacatctacttcagaagacaggtggagctgagcaccatgtacagacacatggagaagcacaactacgagagcgccgccgaggccatccaggccgtgagagacaacaagctgcacgccttcatctgggacagcgccgtgctggagttcgaggccagccagaagtgcgacctggtgaccaccggcgagctgttcttcagaagcggcttcggcatcggcatgagaaaggacagcccctggaagcagaacgtgagcctgagcatcctgaagagccacgagaacggcttcatggaggacctggacaagacctgggtgagataccaggagtgcgacagcagaagcaacgcccccgccaccctgaccttcgagaacatggccggcgtgttcatgctggtggccggcggcatcgtggccggcatcttcctgatcttcatcgagatcgcctacaagagacacaaggacgccagaagaaagcagatgcagctggccttcgccgccgtgaacgtgtggagaaagaacctgcagagcaccggcggcggcagaggcgccctgcagaaccagaaggacaccgtgctgcccagaagagccatcgagagagaggagggccagctgcagctgtgcagcagacacagagagagctag

SEQ ID NO: 279930 - protein, 553 aa, Artificial Sequence
  derived and/or modified sequence
MAAASVTPPGSLELLQPGFSKTLLGTKLEAKYLCSACRNVLRRPFQAQCGHRYCSFCLASILSSGPQNCAACVHEGIYEEGISILESSSAFPDNAARREVESLPAVCPSDGCTWKGTLKEYEVKMPACGMVTEAPAVGSRPRSPSSYDLVLHVPLTGAEACLMSVEEETELLLRSCHEGRCPLMLTECPACKGLVRLGEKERHLEHECPERSLSCRHCRAPCCGADVKAHHEVCPKFPLTCDGCGKKKIPREKFQDHVKTCGKCRVPCRFHAIGCLETVEGEKQQEHEVQWLREHLAMLLSSVLEAKPLLGDQSHAGSELLQRCESLEKKTATFENIVCVLNREVERVAMTAEACSRQHRLDQDKIEALSSKVQQLERSIGLKDLAMADLEQKVLEMEASTYDGVFIWKISDFARKRQEAVAGRIPAIFSPAFYTSRYGYKMCLRIYLNGDGTGRGTHLSLFFVVMKGPNDALLRWPFNQKVTLMLLDQNNREHVIDAFRPDVTSSSFQRPVNDMNIASGCPLFCPVSKMEAKNSYVRDDAIFIKAIVDLTGL

SEQ ID NO: 279931 - protein, 121 aa, Artificial Sequence
  derived and/or modified sequence
MAAASVTPPGSLELLQPGFSKTLLGTKLEAKYLCSACRNVLRRPFQAQCGHRYCSFCLASILSSGPQNCAACVHEGIYEEGISILESSSAFPDNAARREVESLPAVCPSDGCTWKGTLKEY

SEQ ID NO: 279932 - protein, 172 aa, Artificial Sequence
  derived and/or modified sequence
MAAASVTPPGSLELLQPGFSKTLLGTKLEAKYLCSACRNVLRRPFQAQCGHRYCSFCLASILSSGPQNCAACVHEGIYEEGISILESSSAFPDNAARREVESLPAVCPSDGCTWKGTLKEYESCHEGRCPLMLTECPACKGLVRLGEKERHLEHECPERSLSCRHCRAPCCG

SEQ ID NO: 279933 - protein, 193 aa, Artificial Sequence
  derived and/or modified sequence
MAAASVTPPGSLELLQPGFSKTLLGTKLEAKYLCSACRNVLRRPFQAQCGHRYCSFCLASILSSGPQNCAACVHEGIYEEGISILESSSAFPDNAARREVESLPAVCPSDGCTWKGTLKEYESCHEGRCPLMLTECPACKGLVRLGEKERHLEHECPERSLSCRHCRAPCCGADVKAHHEVCPKFPLTCDGCG

SEQ ID NO: 279934 - DNA, 1503 bp, Artificial Sequence
  derived and/or modified sequence
gtggccggcagagccctgagcagcggcagagccgccaccgtgggcgccctgttcgccggcgtgaccgccctgatggccgccgccagcgtgaccccccccggcagcctggagctgctgcagcccggcttcagcaagaccctgctgggcaccaagctggaggccaagtacctgtgcagcgcctgcagaaacgtgctgagaagacccttccaggcccagtgcggccacagatactgcagcttctgcctggccagcatcctgagcagcggcccccagaactgcgccgcctgcgtgcacgagggcatctacgaggagggcatcagcatcctggagagcagcagcgccttccccgacaacgccgccagaagagaggtggagagcctgcccgccgtgtgccccagcgacggctgcacctggaagggcaccctgaaggagtacgagagctgccacgagggcagatgccccctgatgctgaccgagtgccccgcctgcaagggcctggtgagactgggcgagaaggagagacacctggagcacgagtgccccgagagaagcctgagctgcagacactgcagagccccctgctgcggcgccgacgtgaagttccaggaccacgtgaagacctgcggcaagtgcagagtgccctgcagattccacgccatcggctgcctggagaccgtggagggcgagaagcagcaggagcacgaggtgcagtggctgagagagcacctggccatgctgctgagcagcgtgctggaggccaagcccctgctgggcgaccagagccacgccggcagcgagctgctgcagagatgcgagagcctggagaagaagaccgccaccttcgagaacatcgtgtgcgtgctgaacagagaggtggagagagtggccatgaccgccgaggcctgcagcagacagcacagactggaccaggacaagatcgaggccctgagcagcaaggtgcagcagctggagagaagcatcggcctgaaggacctggccatggccgacctggagcagaaggtgctggagatggaggccagcacctacgacggcgtgttcatctggaagatcagcgacttcgccagaaagagacaggaggccgtggccggcagaatccccgccatcttcagccccgccttctacaccagcagatacggctacaagatgtgcctgagaatctacctgaacggcgacggcaccggcagaggcacccacctgagcctgttcttcgtggtgatgaagggccccaacgacgccctgctgagatggcccttcaaccagaaggtgaccctgatgctgctggaccagaacaacagagagcacgtgatcgacgccttcagacccgacgtgaccagcagcagcttccagagacccgtgaacgacatgaacatcgccagcggctgccccctgttctgccccgtgagcaagatggaggccaagaacagctacgtgagagacgacgccatcttcatcaaggccatcgtggacctgaccggcctgtag

SEQ ID NO: 279935 - DNA, 1503 bp, Artificial Sequence
  derived and/or modified sequence
gtggccggaagagccctcagttccggccgagccgcaactgtaggagccctttttgccggtgttaccgccctaatggctgccgcatccgtgacaccacctgggtcactggagctcttgcagccgggatttagcaagacgcttctcggcactaaactggaagctaagtatctgtgttcagcctgccgtaatgtattgagacgaccattccaggctcagtgcggccacaggtactgttccttctgtctagctagtattctctcaagcgggccccagaactgtgccgcatgcgtgcatgaaggtatttatgaagagggcatttcaattctggagagttcatctgctttccccgacaatgctgcgcgccgggaggtggaatccttgcctgctgtgtgtccatctgatggatgtacatggaaagggaccctcaaagaatatgagtcatgccatgaggggcgctgcccactgatgctcacggagtgccctgcatgcaagggtcttgtgcgactcggcgagaaggaacgccacctcgaacatgagtgtcctgaacgctcactgagctgtcgccactgcagagccccatgttgtggcgccgatgtgaaatttcaagaccacgtgaagacatgtggaaagtgcagggtaccctgcagattccacgcaataggatgcctggagactgttgagggggaaaagcagcaggagcatgaagtccaatggttacgggaacatttggcaatgttgctgagctctgtgcttgaagctaagccacttctgggtgatcaatctcacgctggctccgaactgctacagcgctgcgagtccctggagaagaagaccgccacattcgaaaacatcgtgtgcgtactgaacagggaggtagaacgcgtggcgatgaccgccgaggcttgcagcagacagcatagactcgatcaggacaagattgaagcgctttccagtaaggtgcagcagcttgagcgtagcattggactcaaggacctcgctatggctgacctcgaacaaaaagtcttggaaatggaggcttccacttacgatggagttttcatatggaagatcagcgacttcgcgcgcaagagacaagaagcagtagccggcagaatcccagctatctttagccctgcattttatactagccgatatggatataagatgtgcttgagaatctaccttaacggggacggaactggtagggggactcatttgagcttgttcttcgtggtgatgaaggggccaaatgatgcactgttacggtggccttttaaccagaaagttactctgatgctcctggatcagaacaatcgggagcacgttatcgatgcctttagaccagatgtgacttctagcagtttccagcgcccagtcaatgatatgaacattgccagtgggtgccctctattctgccctgtgtccaaaatggaggccaagaactcatacgtgcgagatgatgccatctttatcaaggccatcgtagatctaacaggtttatag

SEQ ID NO: 279936 - DNA, 1503 bp, Artificial Sequence
  derived and/or modified sequence
gtggccggccgggccctgagcagcggccgggccgccaccgtgggcgccctgtttgctggggtgacagccctgatggctgctgcctctgtgaccccacctggcagcctggagctgctgcagcccggcttcagcaagaccctgctgggcaccaagctggaggccaagtacctgtgcagcgcctgcagaaatgtgctgcggcggcccttccaggcccagtgtggccaccgctactgcagcttctgcctggccagcatcctgagcagcggcccccagaactgtgccgcctgtgtgcatgagggcatctatgaggagggcatcagcatcctggagagcagcagcgccttcccagacaatgctgcccggcgggaggtggagagcctgcctgctgtgtgccccagtgatggctgcacctggaagggcaccctgaaggagtatgagagctgccacgagggccgctgccccctgatgctgacagaatgtcctgcctgcaagggcctggtgcggctgggggagaaggagcggcacctggagcatgaatgtcctgagaggagcctgagctgccgccactgccgggccccctgctgcggggctgatgtgaagttccaggaccacgtgaagacctgtgggaagtgccgggtgccctgccgcttccacgccatcggctgcctggagaccgtggagggggagaagcagcaggagcacgaggtgcagtggctgcgggagcacctggccatgctgctgagctctgtgctggaggccaagcccctgctgggggaccagagccatgctggcagcgagctgctgcagagatgtgagagcctggagaagaagacagccacctttgagaacatcgtgtgtgtgctgaaccgggaggtggagcgggtggccatgacagctgaggcctgcagccggcagcaccggctggaccaggacaagattgaggccctgagcagcaaggtgcagcagctggagaggagcatcggcctgaaggacctggccatggctgacctggagcagaaggtgctggagatggaggccagcacctatgatggagtcttcatctggaagatcagtgactttgccaggaagaggcaggaggccgtggccggccgcatcccagccatcttcagccctgccttctacaccagccgctatggctacaagatgtgcctgcgcatctacctgaatggagatggcaccggccggggcacccacctgagcctcttctttgtggtgatgaagggccccaatgatgccctgctgcgctggcccttcaaccagaaggtgaccctgatgctgctggaccagaacaaccgggagcacgtgattgatgccttccggccagatgtgaccagcagcagcttccagaggcctgtgaatgacatgaacatcgccagcggctgccccctcttctgccctgtgtccaagatggaggccaagaacagctatgtgagagatgatgccatcttcatcaaggccatcgtggacctgaccggcctgtag

SEQ ID NO: 279937 - DNA, 1503 bp, Artificial Sequence
  derived and/or modified sequence
gtggccggccgggccctgagcagcggccgggccgccaccgtgggcgcacttttcgcaggggtcacggccctcatggcagccgcatcagtgacaccccctggcagcctagagctgcttcagccaggcttttcaaagacacttctcggcactaagttagaggccaaatacctgtgttccgcctgtcggaacgtgctccgaagaccgttccaggcacagtgtgggcaccgttattgttctttctgcctggcgagcatcctaagtagtggcccccaaaattgcgccgcttgtgttcacgaaggcatatacgaagagggcatcagcatccttgagtcttcttccgccttcccagataacgctgcacggcgggaggtagagagcctgcctgcagtgtgtccttcagatggatgcacatggaagggaacactgaaagagtacgaaagttgccatgaggggcgctgcccactgatgctgaccgagtgtcctgcatgcaagggcctcgttagactcggggaaaaggagaggcatctagagcatgagtgcccggagagatcgctgagttgccggcactgccgggccccttgctgcggtgccgacgtcaaattccaagaccacgtgaagacatgtggcaaatgccgtgttccctgccgttttcatgctattggatgcttagagactgtggagggagagaagcaacaagagcatgaagtgcaatggctcagggaacacctggccatgctgctaagtagtgtcctggaggcaaagccgttactgggtgaccaatcacatgccggctccgaactgctgcagagatgcgagagcctggaaaaaaagaccgccacttttgaaaacatcgtatgtgttctgaaccgggaagtagagcgcgttgctatgacagccgaggcatgctctagacagcaccgcctggaccaagacaaaatagaagcgctctctagcaaagtccaacaactcgagagaagcattgggctgaaggatttggccatggccgaccttgaacaaaaggttttggaaatggaggccagcacttatgacggggtatttatatggaagatctccgatttcgccaggaagagacaggaggcagtggcaggcagaatcccggccattttctcccccgccttctacacctctaggtacggttacaagatgtgtcttcggatctatctgaatggcgacgggaccggccgtggcactcacctgagtctctttttcgtcgtaatgaagggacccaatgacgctttacttcggtggccctttaatcagaaggtcacgctgatgctgttggatcagaacaatcgggaacatgttatcgacgcttttcgaccggacgttacctcaagcagctttcagcgacctgtgaacgacatgaatatcgcttccgggtgtcccctgttctgccctgtgagtaaaatggaagccaagaatagttatgttagagacgacgcaatctttattaaggccatcgtggatctgactggattgtag

SEQ ID NO: 279938 - DNA, 1503 bp, Artificial Sequence
  derived and/or modified sequence
gtggctggcagggccttaagttccggtcgtgcagccactgtgggggctctctttgccggagtgaccgccttgatggcagccgcttccgtgactccaccaggttctctagagctgctccagcccggtttctctaagacactgctgggaacaaaactcgaggctaagtatctttgcagtgcctgccggaacgtgttgaggagaccgttccaggctcagtgcgggcatcgctattgtagtttctgcctggctagcatactgtcgtccggaccacaaaattgtgctgcatgtgtgcatgaaggcatttatgaagaaggaatatctattctggaaagttccagtgctttccctgataacgcagcccgtagagaagttgaatctcttcctgccgtctgtcccagcgacgggtgcacatggaaggggacactgaaagagtatgaatcttgccatgaggggaggtgtcctctgatgctgaccgagtgtcctgcctgtaaaggcctggtgcgactgggagagaaagagagacacctggagcatgagtgtcctgagcggtccctatcttgccggcactgtcgcgctccgtgttgcggtgcagacgtcaagtttcaagaccacgttaaaacttgcggcaagtgtagagttccatgtagattccacgccattggctgtctcgaaacagtagagggcgagaaacaacaggaacacgaggtgcagtggctcagagaacaccttgctatgcttttgagtagcgttctcgaggcaaagcccttattgggagaccagagccatgccggaagtgagttacttcagcggtgtgagtcgttggagaagaagaccgcaaccttcgaaaacattgtctgcgtgctgaacagagaggtggagagagtcgcaatgactgctgaggcttgcagtcgacaacatagacttgatcaggacaaaattgaagccctgagctcaaaagtccaacagctggaacgcagtatcggtttaaaagacctagccatggcggatcttgagcaaaaggtcctcgagatggaagctagcacatacgacggtgtgtttatttggaagatttccgacttcgcgcgtaaacgccaggaagcggtggcgggacgcatccccgcaatcttcagcccagcattctacactagccggtatggctataaaatgtgcttgcgtatctatctcaacggagatggcaccgggcgtggaactcacttgagtctttttttcgtcgttatgaagggtcccaacgatgctttgcttcgctggccatttaaccaaaaggtaaccttgatgctgctcgaccagaataaccgggagcacgtgattgacgcatttagacctgacgtaacttctagtagctttcagaggcccgttaacgacatgaacatagcttcaggatgcccactgttttgtcctgtgagtaagatggaggcgaaaaacagttacgtgcgcgatgatgccatattcattaaagccatcgtcgacctgaccgggctgtag

SEQ ID NO: 279939 - DNA, 2264 bp, Artificial Sequence
  derived and/or modified sequence
ttccgggcgcgctgcgaccgttggggctttgttcgcgggggtcacagctctcatggctgcagctagcgtgaccccccctggctccctggagttgctacagcccggcttctccaagaccctcctggggaccaagctggaagccaagtacctgtgctccgcctgcagaaacgtcctccgcaggcccttccaggcgcagtgtggccaccggtactgctccttctgcctggccagcatcctcagctctgggcctcagaactgtgctgcctgtgttcacgagggcatatatgaagaaggcatttctattttagaaagcagttcggccttcccagataatgctgcccgcagggaggtggagagcctgccggccgtctgtcccagtgatggatgcacctggaaggggaccctgaaagaatacgagagctgccacgaaggccgctgcccgctcatgctgaccgaatgtcccgcgtgcaaaggcctggtccgccttggtgaaaaggagcgccacctggagcacgagtgcccggagagaagcctgagctgccggcattgccgggcaccctgctgcggagcagacgtgaaggcgcaccacgaggtctgccccaagttccccttaacttgtgacggctgcggcaagaagaagatcccccgggagaagtttcaggaccacgtcaagacttgtggcaagtgtcgagtcccttgcagattccacgccatcggctgcctcgagacggtagagggtgagaaacagcaggagcacgaggtgcagtggctgcgggagcacctggccatgctactgagctcggtgctggaggcaaagcccctcttgggagaccagagccacgcggggtcagagctcctgcagaggtgcgagagcctggagaagaagacggccacttttgagaacattgtctgcgtcctgaaccgggaggtggagagggtggccatgactgccgaggcctgcagccggcagcaccggctggaccaagacaagattgaagccctgagtagcaaggtgcagcagctggagaggagcattggcctcaaggacctggcgatggctgacttggagcagaaggtcttggagatggaggcatccacctacgatggggtcttcatctggaagatctcagacttcgccaggaagcgccaggaagctgtggctggccgcatacccgccatcttctccccagccttctacaccagcaggtacggctacaagatgtgtctgcgtatctacctgaacggcgacggcaccgggcgaggaacacacctgtccctcttctttgtggtgatgaagggcccgaatgacgccctgctgcggtggcccttcaaccagaaggtgaccttaatgctgctcgaccagaataaccgggagcacgtgattgacgccttcaggcccgacgtgacttcatcctcttttcagaggccagtcaacgacatgaacatcgcaagcggctgccccctcttctgccccgtctccaagatggaggcaaagaattcctacgtgcgggacgatgccatcttcatcaaggccattgtggacctgacagggctctaactgccccctactggtgtctgggggttgggggcagccaggcacagccggctcacggaggggccaccacgctgggccagggtctcactgtacaagtgggcaggggccgcgcttgggcgcttgggagggtgtcggcctgcagccaagttcactgtcacgggggaaggagccaccagccagtcctcagatttcagagactgcggaggggcttggcagacggtcttagccaagggctgtggtggcattggccgagggtcttcgggtgcttcccagcacaagctgcccttgctgtcctgtgcagtgaagggagaggccctgggtgggggacactcagagtgggagcacatcccagcagtgcccatgtagcaggagcacagtggatggccttgtgtccctcgggcatgacaggcagaaacgagggctgctccaggagaagggcctcctgctggccagagcaaggaaggctgagcagcttggttctcccctctggcccctggagagaagggagcattcctagacccctgggtgcttgtctgcacagagctctggtctgtgccaccttggccaggctggctgtgggagagggtctggtcccacgccgcctctgctcagaccactgtgtgggaggtgcacagcacagcctgcgggtaaagtgtgagagcttgccatccagctcacgaagacagagttattaaaccattcaaatctc

SEQ ID NO: 279940 - DNA, 2413 bp, Artificial Sequence
  derived and/or modified sequence
cgcgctgcgaccgttggggctttgttcgcgggggtcacagctctcatggctgcagctagcgtgaccccccctggctccctggagttgctacagcccggcttctccaagaccctcctggggaccaagctggaagccaagtacctgtgctccgcctgcagaaacgtcctccgcaggcccttccaggcgcagtgtggccaccggtactgctccttctgcctggccagcatcctcagctctgggcctcagaactgtgctgcctgtgttcacgagggcatatatgaagaaggcatttctattttagaaagcagttcggccttcccagataatgctgcccgcagggaggtggagagcctgccggccgtctgtcccagtgatggatgcacctggaaggggaccctgaaagaatacgaggtaaagatgcctgcgtgtggcatggtgacagaagctccagcagtcgggagtcgtccacgctccccaagcagttatgaccttgtcctgcacgttcctctcactggggctgaagcctgtctgatgtctgtggaggaagagacggagctgctccttagaagctgccacgaaggccgctgcccgctcatgctgaccgaatgtcccgcgtgcaaaggcctggtccgccttggtgaaaaggagcgccacctggagcacgagtgcccggagagaagcctgagctgccggcattgccgggcaccctgctgcggagcagacgtgaaggcgcaccacgaggtctgccccaagttccccttaacttgtgacggctgcggcaagaagaagatcccccgggagaagtttcaggaccacgtcaagacttgtggcaagtgtcgagtcccttgcagattccacgccatcggctgcctcgagacggtagagggtgagaaacagcaggagcacgaggtgcagtggctgcgggagcacctggccatgctactgagctcggtgctggaggcaaagcccctcttgggagaccagagccacgcggggtcagagctcctgcagaggtgcgagagcctggagaagaagacggccacttttgagaacattgtctgcgtcctgaaccgggaggtggagagggtggccatgactgccgaggcctgcagccggcagcaccggctggaccaagacaagattgaagccctgagtagcaaggtgcagcagctggagaggagcattggcctcaaggacctggcgatggctgacttggagcagaaggtcttggagatggaggcatccacctacgatggggtcttcatctggaagatctcagacttcgccaggaagcgccaggaagctgtggctggccgcatacccgccatcttctccccagccttctacaccagcaggtacggctacaagatgtgtctgcgtatctacctgaacggcgacggcaccgggcgaggaacacacctgtccctcttctttgtggtgatgaagggcccgaatgacgccctgctgcggtggcccttcaaccagaaggtgaccttaatgctgctcgaccagaataaccgggagcacgtgattgacgccttcaggcccgacgtgacttcatcctcttttcagaggccagtcaacgacatgaacatcgcaagcggctgccccctcttctgccccgtctccaagatggaggcaaagaattcctacgtgcgggacgatgccatcttcatcaaggccattgtggacctgacagggctctaactgccccctactggtgtctgggggttgggggcagccaggcacagccggctcacggaggggccaccacgctgggccagggtctcactgtacaagtgggcaggggccgcgcttgggcgcttgggagggtgtcggcctgcagccaagttcactgtcacgggggaaggagccaccagccagtcctcagatttcagagactgcggaggggcttggcagacggtcttagccaagggctgtggtggcattggccgagggtcttcgggtgcttcccagcacaagctgcccttgctgtcctgtgcagtgaagggagaggccctgggtgggggacactcagagtgggagcacatcccagcagtgcccatgtagcaggagcacagtggatggccttgtgtccctcgggcatgacaggcagaaacgagggctgctccaggagaagggcctcctgctggccagagcaaggaaggctgagcagcttggttctcccctctggcccctggagagaagggagcattcctagacccctgggtgcttgtctgcacagagctctggtctgtgccaccttggccaggctggctgtgggagagggtctggtcccacgccgcctctgctcagaccactgtgtgggaggtgcacagcacagcctgcgggtaaagtgtgagagcttgccatccagctcacgaagacagagttattaaaccattcaaatctc

SEQ ID NO: 279941 - DNA, 680 bp, Artificial Sequence
  derived and/or modified sequence
tggcactcccaaagtgctgggattacaggctggtctcgaactcctggcctgaagtgatcctccaacctcagcctcccaagtagctgggattacaggttgaatcgctcctagctgacccctcacgtctcttatgatacgtacagaaagcaagagcagcccatgccgtccggccgcgcaccaggtctcagtctgtgtgtctggttcaggtgaccatggtgttcagttcagttcctcctgcctcgtgtgtaggccactgagagctccctagtctaagccggaggaggttctgggctttgttcgcgggggtcacagctctcatggctgcagctagcgtgaccccccctggctccctggagttgctacagcccggcttctccaagaccctcctggggaccaagctggaagccaagtacctgtgctccgcctgcagaaacgtcctccgcaggcccttccaggcgcagtgtggccaccggtactgctccttctgcctggccagcatcctcagctctgggcctcagaactgtgctgcctgtgttcacgagggcatatatgaagaaggcatttctattttagaaagcagttcggccttcccagataatgctgcccgcagggaggtggagagcctgccggccgtctgtcccagtgatggatgcacctggaaggggaccctgaaagaatac

SEQ ID NO: 279942 - DNA, 709 bp, Artificial Sequence
  derived and/or modified sequence
agatgactgcagagtgagagtgaaaccagcttccctcggaggctgcagcacagggctgacatgcaaacgtctgaaaaagaggcaagctctcggtgtgagcaagtggactgcggctatttgaggaaggagcccacgtgggaatcccctgagctgcgccatggccagaggctttgttcgcgggggtcacagctctcatggctgcagctagcgtgaccccccctggctccctggagttgctacagcccggcttctccaagaccctcctggggaccaagctggaagccaagtacctgtgctccgcctgcagaaacgtcctccgcaggcccttccaggcgcagtgtggccaccggtactgctccttctgcctggccagcatcctcagctctgggcctcagaactgtgctgcctgtgttcacgagggcatatatgaagaaggcatttctattttagaaagcagttcggccttcccagataatgctgcccgcagggaggtggagagcctgccggccgtctgtcccagtgatggatgcacctggaaggggaccctgaaagaatacgagagctgccacgaaggccgctgcccgctcatgctgaccgaatgtcccgcgtgcaaaggcctggtccgccttggtgaaaaggagcgccacctggagcacgagtgcccggagagaagcctgagctgccggcattgccgggcaccctgctgcgg

SEQ ID NO: 279943 - DNA, 823 bp, Artificial Sequence
  derived and/or modified sequence
accggtgtcgcccggcttgggctcccggctcacctctcgggtgtgcggcaggggtctccgccccggggccacgggaggggaagcaagggcctcgctgtctcgccgcacctggggaagggacccaattagcgcggaccccacagcgcagcacctcaccagctccccgcaccaacgccccggcgcgctctttgaggaaaaagcagagggcgacttagggctttgttcgcgggggtcacagctctcatggctgcagctagcgtgaccccccctggctccctggagttgctacagcccggcttctccaagaccctcctggggaccaagctggaagccaagtacctgtgctccgcctgcagaaacgtcctccgcaggcccttccaggcgcagtgtggccaccggtactgctccttctgcctggccagcatcctcagctctgggcctcagaactgtgctgcctgtgttcacgagggcatatatgaagaaggcatttctattttagaaagcagttcggccttcccagataatgctgcccgcagggaggtggagagcctgccggccgtctgtcccagtgatggatgcacctggaaggggaccctgaaagaatacgagagctgccacgaaggccgctgcccgctcatgctgaccgaatgtcccgcgtgcaaaggcctggtccgccttggtgaaaaggagcgccacctggagcacgagtgcccggagagaagcctgagctgccggcattgccgggcaccctgctgcggagcagacgtgaaggcgcaccacgaggtctgccccaagttccccttaacttgtgacggctgcggca

SEQ ID NO: 279944 - DNA, 2209 bp, Artificial Sequence
  derived and/or modified sequence
gtagctgggcgggcccttagttccgggcgcgctgcgaccgttggggctttgttcgcgggggtcacagctctcatggctgcagctagcgtgaccccccctggctccctggagttgctacagcccggcttctccaagaccctcctggggaccaagctggaagccaagtacctgtgctccgcctgcagaaacgtcctccgcaggcccttccaggcgcagtgtggccaccggtactgctccttctgcctggccagcatcctcagctctgggcctcagaactgtgctgcctgtgttcacgagggcatatatgaagaaggcatttctattttagaaagcagttcggccttcccagataatgctgcccgcagggaggtggagagcctgccggccgtctgtcccagtgatggatgcacctggaaggggaccctgaaagaatacgagagctgccacgaaggccgctgcccgctcatgctgaccgaatgtcccgcgtgcaaaggcctggtccgccttggtgaaaaggagcgccacctggagcacgagtgcccggagagaagcctgagctgccggcattgccgggcaccctgctgcggagcagacgtgaagtttcaggaccacgtcaagacttgtggcaagtgtcgagtcccttgcagattccacgccatcggctgcctcgagacggtagagggtgagaaacagcaggagcacgaggtgcagtggctgcgggagcacctggccatgctactgagctcggtgctggaggcaaagcccctcttgggagaccagagccacgcggggtcagagctcctgcagaggtgcgagagcctggagaagaagacggccacttttgagaacattgtctgcgtcctgaaccgggaggtggagagggtggccatgactgccgaggcctgcagccggcagcaccggctggaccaagacaagattgaagccctgagtagcaaggtgcagcagctggagaggagcattggcctcaaggacctggcgatggctgacttggagcagaaggtcttggagatggaggcatccacctacgatggggtcttcatctggaagatctcagacttcgccaggaagcgccaggaagctgtggctggccgcatacccgccatcttctccccagccttctacaccagcaggtacggctacaagatgtgtctgcgtatctacctgaacggcgacggcaccgggcgaggaacacacctgtccctcttctttgtggtgatgaagggcccgaatgacgccctgctgcggtggcccttcaaccagaaggtgaccttaatgctgctcgaccagaataaccgggagcacgtgattgacgccttcaggcccgacgtgacttcatcctcttttcagaggccagtcaacgacatgaacatcgcaagcggctgccccctcttctgccccgtctccaagatggaggcaaagaattcctacgtgcgggacgatgccatcttcatcaaggccattgtggacctgacagggctctaactgccccctactggtgtctgggggttgggggcagccaggcacagccggctcacggaggggccaccacgctgggccagggtctcactgtacaagtgggcaggggccgcgcttgggcgcttgggagggtgtcggcctgcagccaagttcactgtcacgggggaaggagccaccagccagtcctcagatttcagagactgcggaggggcttggcagacggtcttagccaagggctgtggtggcattggccgagggtcttcgggtgcttcccagcacaagctgcccttgctgtcctgtgcagtgaagggagaggccctgggtgggggacactcagagtgggagcacatcccagcagtgcccatgtagcaggagcacagtggatggccttgtgtccctcgggcatgacaggcagaaacgagggctgctccaggagaagggcctcctgctggccagagcaaggaaggctgagcagcttggttctcccctctggcccctggagagaagggagcattcctagacccctgggtgcttgtctgcacagagctctggtctgtgccaccttggccaggctggctgtgggagagggtctggtcccacgccgcctctgctcagaccactgtgtgggaggtgcacagcacagcctgcgggtaaagtgtgagagcttgccatccagctcacgaagacagagttattaaaccattcaaatctc

SEQ ID NO: 279945 - DNA, 3462 bp, Artificial Sequence
  derived and/or modified sequence
atggcggcggatgagggttcggcagagaagcaggccggagaagcacatatggccgctgatggagagactaacggcagttgtgaaaacagtgatgcctcctcccatgctaatgcggcgaaacatacccaggactctgctcgcgtcaacccacaagatggaaccaatactctcacccgaattgccgagaatggcgtgtcagaacgtgatagtgaggcagcgaaacagaaccatgtgactgccgatgatttcgtgcagacctccgtcattggaagtaatgggtacattttaaacaagccggccctacaggctcaacccctgagaacgactagtacactagcctcttccttacccggacatgccgccaaaactttgccagggggcgccgggaagggtaggacccctagtgctttcccgcaaacaccagctgctccgccagctacactaggagaagggagtgctgacaccgaagacaggaagctgccagccccaggcgcggacgtgaaagtccacagagctcgcaagaccatgcctaagtctgtggtgggcctacatgctgcatcaaaagaccctagagaagtaagagaagcaagggatcacaaagagccaaaggaggaaattaacaagaacatcagcgacttcggtcggcagcagcttctgccgccgtttccaagtctccaccagtccctgccacagaaccagtgctatatggctaccactaaatctcagacagcttgtctgcccttcgttctagccgccgctgtgagccggaagaagaaacggcggatgggtacatacagtctggtcccaaaaaaaaagaccaaagtcctaaagcagcgcacggttatcgagatgttcaagagcatcacccatagcactgtgggtagcaagggtgagaaggacctgggtgcgagctcactccacgtgaacggagaaagtctggagatggactccgatgaggacgacagtgaagagctagaggaagacgatggccacggggcggagcaggcagcagcctttccaacggaggattctcggaccagcaaagagtccatgagcgaagctgatcgggctcagaaaatggacggcgaatcggaagaagaacaggagtcagtggacactggtgaagaagaggagggcggcgacgagtctgacttatctagcgagtcaagcataaagaaaaaatttttaaaacgtaaagggaagacagactccccttggataaaacccgcaaggaaacgtagacgcagaagtcgtaaaaaaccaagcggtgccctgggttctgaatcttacaagagttcagcgggctccgctgagcagacagccccaggggattccacgggatatatggaggtgtcactggacagcctggacttgagagtgaaaggcattctctcatcccaagccgagggactcgcgaacgggcctgacgtactggagaccgacggcctccaggaggtcccattatgtagttgccgaatggaaacaccgaagtccagagaaatcacaactctagctaacaatcagtgtatggctaccgaatctgtcgaccatgaactggggcgctgtacaaattccgtggtgaaatacgagctgatgcgccctagtaacaaggccccactgctagtgctttgcgaggaccatcggggcaggatggtaaagcaccaatgctgtccaggctgtggttacttttgtaccgccggtaattttatggagtgccagcctgagtccagcatcagccaccgattccataaagattgcgcatctagggtcaataatgcctcctattgccctcactgcggggaggaatctagtaaagctaaagaggtgacgattgccaaagccgacactactagcaccgtcacacctgttccggggcaagaaaagggcagtgccttggagggaagggcagacactaccacaggatccgctgcaggcccaccattgtcggaggacgataaactgcagggggcagcctcacacgtaccggaaggctttgatcccactgggccagctggcttggggcgcccaacccccgggctgagtcaaggccctggaaaggaaactcttgagtcagccctcatcgctctggacagtgagaaaccaaagaagcttcgatttcaccccaaacagctgtattttagtgctcgccagggtgaactacagaaagtcttacttatgctagtggatggcatagaccctaattttaagatggagcaccagaataagcgatcgcctcttcatgcagcggcggaagcaggacatgtggatatctgtcacatgctggtgcaggctggcgcaaacatagatacctgttccgaggaccaaaggacgccactgatggaggccgctgaaaataaccatttagaggccgtcaagtaccttataaaggctggggcgctagtggaccctaaagatgctgaggggagtacatgtctccatttagctgcgaagaagggccactatgaggtcgtccagtatctcctaagtaatgggcagatggacgtcaattgtcaggatgatggaggctggacacctatgatatgggctaccgaatataagcacgtggacctggtgaagctactcctctccaagggatccgacatcaatattcgggacaatgaagaaaacatctgcctgcactgggcagccttttctggctgcgtggatatcgctgagatcttactggcagctaagtgtgatctgcacgccgttaatatccatggggattctcctttacatattgccgcccgcgagaaccgttacgactgcgtcgtcctgttcctgtctcgagattcagatgtaactctgaagaacaaagagggggagacccctctgcaatgcgccagcctgaattcccaggtctggagtgcactacaaatgtcaaaggctctccaagactccgcccccgatcgaccatctcccgtcgagcgcatcgtttcacgagacattgcccgcggctatgagcgcatcccaatcccatgtgtgaatgccgtcgactccgagccatgtcccagcaattacaagtacgtgtcccagaattgcgtcacgtcacccatgaatattgatcggaacatcactcatctccagtactgcgtctgtatcgacgactgttcttcttctaactgcatgtgcggccagctgagcatgcgttgttggtacgacaaagatggccgactcctccccgaatttaatatggccgagccaccactgatcttcgaatgcaatcacgcatgttcctgctggcggaattgccgcaacagggtcgtccagaatgggttgcgggcgcgtttacagctgtatcggacaagggacatgggctggggagtacgaagcttgcaggatattccaccaggcacctttgtctgcgagtacgtgggcgagttgattagtgattccgaggcagacgtgagagaggaggattcatatctgttcgatctggataataaggttattagcgcatag

SEQ ID NO: 279946 - DNA, 3462 bp, Artificial Sequence
  derived and/or modified sequence
atggctgctgatgagggcagcgctgagaagcaggccggggaggcccacatggctgctgatggagagaccaacggcagctgtgagaacagtgatgccagcagccacgccaatgctgccaagcacacccaggacagcgcccgggtgaacccccaggacggcaccaacaccctgaccagaattgctgaaaatggagtgtctgagcgggacagcgaggccgccaagcagaaccacgtgacagcagatgactttgtgcagacctctgtgattggcagcaatggctacatcctgaacaagccagccctgcaggcccagcccctgcggaccaccagcaccctggccagcagcctgcccggccacgccgccaagaccctgcctggaggagctgggaagggccgcaccccatctgccttcccccagaccccagctgcccccccagccaccctgggggagggcagcgctgacacagaggacaggaagctgcctgcccctggagcagatgtgaaggtgcaccgggccaggaagaccatgcccaagtctgtggtgggcctgcatgctgccagcaaggacccccgggaggtgcgggaggcccgggaccacaaggagcccaaggaggagatcaacaagaacatcagtgactttggccggcagcagctgctgccccccttccccagcctgcaccagagcctgccccagaaccagtgctacatggccaccaccaagagccagacagcctgcctgccctttgtgctggccgctgctgtgtccaggaagaagaagaggaggatgggcacctacagcctggtgcccaagaagaagaccaaggtgctgaagcagaggacagtcatcgagatgttcaagagcatcacccacagcacagtgggcagcaagggggagaaggacctgggcgccagcagcctgcacgtgaatggagagagcctggagatggacagtgatgaagatgacagcgaggagctggaggaggatgatggccatggagctgagcaggccgccgccttccccacagaggacagcaggaccagcaaggagagcatgtctgaggccgaccgggcccagaagatggatggagagagcgaggaggagcaggagagcgtggacacaggagaggaggaggagggcggagatgaaagtgacctgagcagcgagagcagcatcaagaagaagttcctgaagaggaagggcaagacagacagcccctggatcaagccagccaggaagagaagaagaagaagcaggaagaagcccagcggggccctgggcagcgagagctacaagagcagcgctggcagcgctgagcagacagcccctggggacagcacaggctacatggaggtgtccctggacagcctggacctgcgggtgaagggcatcctgagcagccaggccgagggcctggccaatggaccagatgtgctggagacagatggcctgcaggaggtgcccctgtgcagctgcaggatggagacccccaagagccgggagatcaccaccctggccaacaaccagtgcatggccacagagagcgtggaccacgagctgggccgctgcaccaacagcgtggtgaagtatgagctgatgaggcccagcaacaaggcccccctgctggtgctgtgtgaggaccaccggggccgcatggtgaagcaccagtgctgccccggctgcggctacttctgcacagctggcaacttcatggagtgccagcctgagagcagcatcagccaccgcttccacaaggactgtgccagccgggtgaacaatgccagctactgcccccactgtggggaggagagcagcaaggccaaggaggtgaccatcgccaaggctgacaccaccagcacagtgacccctgtgcccggccaggagaagggcagcgccctggagggccgggctgacaccaccaccggcagcgctgctggcccccccctgtctgaagatgacaagctgcagggcgccgccagccacgtgcctgagggctttgaccccaccggccctgctggcctgggccggcccaccccaggcctgagccagggccctgggaaggagaccctggagagcgccctgattgccctggacagcgagaagcccaagaagctgcgcttccaccccaagcagctgtacttcagcgcccggcagggcgagctgcagaaggtgctgctgatgctggtggatggcatcgaccccaacttcaagatggagcaccagaacaagaggagccccctgcacgccgctgctgaggccggccacgtggacatctgccacatgctggtgcaggccggggccaacatcgacacctgcagcgaggaccagaggacccccctgatggaggccgctgagaacaaccacctggaggccgtgaagtacctgatcaaggccggggccctggtggaccccaaggatgctgagggcagcacctgcctgcacctggccgccaagaagggccactatgaggtggtgcagtacctgctgagcaatggccagatggatgtgaactgccaggatgatggcggctggacccccatgatctgggccacagagtacaagcacgtggacctggtgaagctgctgctgagcaagggcagtgacatcaacatccgggacaatgaggagaacatctgcctgcactgggccgccttcagcggctgtgtggacattgctgagatcctgctggccgccaagtgtgacctgcatgctgtgaacatccatggagacagccccctgcacatcgccgcccgggagaacagatatgactgtgtggtgctcttcctgagccgggacagtgatgtgaccctgaagaacaaggagggggagacccccctgcagtgtgccagcctgaacagccaggtgtggagcgccctgcagatgagcaaggccctgcaggacagcgccccagaccggcccagccctgtggagcgcatcgtgtcccgggacatcgcccggggctatgagcgcatccccatcccctgtgtgaatgctgtggacagcgagccctgccccagcaactacaagtatgtgtcccagaactgtgtgaccagccccatgaacatcgacaggaacatcacccacctgcagtactgtgtgtgcattgatgactgcagcagcagcaactgcatgtgtggccagctgtccatgcgctgctggtatgacaaggatggccgcctgctgcctgagttcaacatggccgagcccccactcatctttgagtgcaaccacgcctgcagctgctggaggaactgcaggaacagagtggtgcagaatggcctgcgggcccggctgcagctgtaccgcacccgggacatgggctggggcgtgcgcagcctgcaggacatccccccaggcacctttgtgtgtgaatatgtgggggagctgatcagtgacagcgaggctgatgtgcgggaggaggacagctacctgtttgacctggacaacaaggtgatcagcgcctag

SEQ ID NO: 279947 - DNA, 3462 bp, Artificial Sequence
  derived and/or modified sequence
atggccgccgacgagggcagcgccgagaagcaggccggcgaggcccatatggctgcagatggagagaccaacggctcatgcgaaaactcagacgcctcttctcacgccaacgctgcaaagcacacccaggactcggcccgggtcaatcctcaggatggtacgaacacccttacgcggattgctgagaacggggttagcgaacgcgatagcgaggcagcaaaacagaatcatgtgactgccgacgatttcgttcagacatctgttatcggcagtaatggctatattctcaacaagcctgccttgcaggcgcagcctttacgtaccacatccaccctcgcctcctcgctccccggtcacgccgccaaaaccctcccgggcggagccggcaaaggaagaactccctctgctttccctcagactccagctgcccctccagctacactaggtgaggggagcgccgatacggaggacagaaagttacccgcccccggtgcggatgtgaaagtccacagggcccgcaaaaccatgcctaaaagcgtggttggactgcacgccgcctcaaaggaccctcgcgaggtgcgcgaggccagagaccataaagagccgaaggaagagataaacaaaaacataagcgattttggacgccagcagttgttgcctccattcccttccctgcaccagagccttccacagaatcagtgctatatggccactaccaaaagccaaaccgcttgcttgccctttgtccttgccgccgccgtgagccgcaaaaagaagagacgcatgggtacctattctctggtgcccaagaaaaagaccaaagtgttaaagcagcgcactgtgatagagatgttcaaatcaatcacccacagcactgttggatcgaaaggggaaaaggacctgggtgcctcctccttgcacgtgaacggggagtctctggagatggactccgacgaggatgacagcgaagagctagaagaggacgatggacacggggccgaacaggctgctgcctttcctaccgaagattcccgcacaagtaaggaaagtatgtccgaggccgatagggcacaaaagatggacggcgaatctgaagaggaacaggaaagcgtagatactggggaggaggaagagggaggcgacgagagcgatctgagctctgagtcctcaatcaagaaaaaatttttgaagagaaaggggaaaaccgactctccgtggatcaaaccagcgaggaagcggcgtaggcgcagccggaaaaaaccgtcgggagccctgggatccgagagctacaaaagcagtgcagggtctgctgagcaaaccgctcccggcgacagcacggggtatatggaagtttctctggactcactggatctccgagtgaagggtattctgagtagccaggcggaaggactcgccaacggccctgatgtgctggagactgatggtcttcaggaggttccgctttgtagttgtcgaatggagacacctaaaagcagagaaatcacaacgctcgctaataatcagtgtatggctacggaatcagtcgaccatgagttgggccgttgtactaactctgtcgtgaaatacgagctgatgcggccatccaataaagctcctctgctagtgctatgtgaagatcataggggccgaatggtgaagcaccagtgctgtcccggctgcggatatttctgtacagccgggaattttatggaatgtcagcctgagagctccatctcacacagatttcataaagactgtgcctctagggtaaacaacgccagctactgccctcactgtggcgaagaaagctcaaaagctaaggaggtcaccatcgctaaagccgacacaacttccaccgtgactcctgtcccaggccaggagaagggatccgctctcgaaggccgagctgatacgactactggctcagcagccggacctccactatccgaggacgacaagctgcaaggcgccgcttcccacgttccagaggggttcgaccctacggggcctgcgggactggggcggcctactcccgggctaagtcagggccctggtaaagagaccctagagagcgcgctgatcgcactggattccgagaagcctaagaaactgagattccaccccaagcagctctacttctccgccaggcagggtgaattgcagaaagtgctgctcatgttagtcgacggaatcgaccctaattttaagatggagcaccagaacaaacggtctcccttgcatgcagccgctgaggctggccacgttgatatatgccacatgctcgtccaggcgggtgctaacatcgacacctgtagcgaggaccagagaacccctctgatggaggcagcagagaataatcaccttgaggcggtgaaatatctgatcaaagctggagcgctggttgatcccaaggacgctgagggctcaacgtgtctccatttggcggccaaaaaaggacattatgaagtggtgcagtatcttctttccaacggccaaatggatgttaattgtcaagacgacggcggttggacccccatgatttgggctacagagtacaagcatgtagatctcgtgaagcttttgctctcaaaggggtccgacatcaatattcgtgataatgaagagaatatctgcctgcattgggccgctttttccgggtgtgtcgacattgctgagatattactcgccgccaagtgcgacttgcacgccgtgaacattcatggtgattctcctttgcacatcgccgcacgggaaaaccgctacgattgtgtggtgcttttcctctcccgggacagcgacgtgacgctgaaaaataaggagggtgagacccctcttcagtgtgcctctctgaactctcaggtttggtccgcgctacagatgtccaaggccctccaagattccgctccggatagaccaagcccggttgaacggattgtttcacgggatatcgcacgaggctacgagagaattcccatcccttgcgttaacgccgttgactccgagccgtgcccttccaactacaagtacgtcagccagaattgtgtcacatcccccatgaacattgaccggaacatcacgcatctccagtactgcgtgtgtatagacgactgcagttcaagcaactgtatgtgtgggcagctgtccatgcggtgttggtacgacaaagatggccgactactcccggaattcaatatggccgaaccccccctgatctttgagtgtaaccacgcttgttcatgttggagaaattgtcggaatagagtcgtgcagaatgggttgcgggctcgcctccagctctacaggacaagggatatgggttggggtgtcaggtccctacaggacatcccaccaggaaccttcgtgtgcgagtacgtgggagagttgatcagcgactcagaggccgacgtcagagaggaagacagctacctctttgacctggacaacaaagtgattagcgcatag

SEQ ID NO: 279948 - DNA, 3462 bp, Artificial Sequence
  derived and/or modified sequence
atggctgctgacgaggggagcgcagaaaagcaggcaggcgaagcgcatatggcagcagatggcgagacaaatggcagttgcgaaaactccgatgcctcatcccacgccaacgcggcaaaacacacacaagacagcgctcgcgtgaatcctcaggacggaactaacaccctaacaagaatcgcagaaaacggcgttagtgagagagactctgaggcagcaaaacagaatcacgttaccgcggacgacttcgtgcagacttcggtgataggatccaacgggtacatcctgaacaaacccgctctgcaggctcaacccctgagaaccactagcaccctcgcgtcaagtttacccggacacgccgcaaaaactcttcccggtggtgccggaaagggccgtactccctccgcattcccgcagacccctgccgctccccctgccactctgggcgaaggatctgccgacacagaggatcggaagctgcctgcccctggcgcagatgtgaaggttcatcgagccagaaaaaccatgcctaaatccgtcgtggggctacacgctgcgagcaaggatcctcgagaagtgcgagaggccagagatcacaaggaacctaaggaagagatcaacaagaacatttcagattttggaaggcaacagctgctcccaccatttccatctctccatcagtcactgccccaaaaccagtgctatatggcaactacaaaatcccaaacggcatgcctcccatttgtattagcggctgctgtgagccgcaaaaagaaacggaggatgggcacctattccttggtccctaaaaaaaaaacaaaggtcctgaagcaaaggactgtgatcgagatgttcaaatcgatcacgcacagtaccgtaggctccaaaggcgagaaggacctaggggcatcctctttacatgtcaatggggagagcttggaaatggattctgacgaagacgatagcgaggagctcgaggaagacgatggccacggggctgaacaggcagcggcattccctaccgaagattctcggactagtaaagaaagtatgtccgaggccgatcgagcccagaagatggacggagaaagtgaggaggaacaagaatcggtcgatacgggcgaggaagaggaagggggtgatgagtcagacttgagctcggagtcatcaataaagaagaaatttctcaagcgcaaggggaagaccgactccccctggatcaagcccgctcggaaacggcgaaggaggtccagaaaaaaaccgagtggtgcgttgggaagtgagagttataagagcagcgctggctctgcggagcagacagcccctggggattctacggggtacatggaggttagtcttgacagcttggacctgagggtgaagggcattctctctagtcaagcagagggccttgcgaacggcccagacgttctggaaaccgacggtctccaggaggtgcctctctgtagttgtaggatggagactcccaagtctcgagagattaccacactggctaacaaccagtgtatggccacagaaagcgtagatcacgagctggggagatgcaccaatagcgttgttaaatacgagctgatgcgaccatccaacaaggcacctctgctcgtcttgtgtgaggatcaccgcggtagaatggtgaagcatcagtgctgtcctggctgcgggtacttctgcactgcaggaaactttatggaatgtcagccagaatcatccatcagtcaccgttttcacaaggactgcgcctcccgtgtcaataacgcttcatactgcccacactgtggcgaggagagttcgaaagcaaaagaagttacgatcgccaaggcagatactacctccacagtgactcccgtccccggtcaggaaaaaggtagcgctctggaaggccgtgccgatactaccactggctctgcagcaggcccaccactctctgaggatgataaattacagggggctgctagccatgtcccagagggatttgaccctactggccctgcgggactcggccgaccgaccccagggctgagccagggcccaggaaaggaaacgctcgagtccgctctaatcgctttggattccgagaagcctaagaaacttcgttttcaccctaaacagctgtatttcagtgctaggcaaggcgagctacaaaaagtgcttctgatgctggttgatggcatcgaccctaacttcaagatggagcatcaaaacaagaggtctccattgcacgccgctgccgaagctgggcatgtcgacatttgtcacatgctcgtacaggccggagccaacatcgatacctgttcagaggatcaacgtaccccacttatggaggccgctgaaaacaatcacttggaggccgttaagtatctgatcaaggctggcgctctggtggatcctaaggatgccgaaggctccacatgtctacatctggcagccaagaagggccactacgaagtagtacagtatctgcttagtaacgggcagatggatgtgaattgccaagatgatggcggatggactccgatgatctgggccacggagtacaagcacgtcgaccttgtgaagctcttactgtctaaaggttctgacatcaacattagagataatgaggagaatatatgcctgcactgggcagccttttcgggatgtgtcgacattgcagagatcctgctagccgcaaagtgcgatcttcacgccgtgaatatccatggagattcacccctacacatagccgcacgggagaatagatatgactgcgtggtgctcttcttatcgagggacagtgatgttacactgaaaaacaaggagggggagactcctctgcagtgtgcctcccttaactcccaggtgtggtccgccttgcagatgagcaaagcgcttcaggattcagctccagaccggccttcaccagtggagcgtattgtcagtcgcgacattgctcggggatacgaaaggattcccatcccatgtgtgaatgccgtggacagcgaaccttgtccatcaaactataagtacgtctcccaaaattgcgttacctcccccatgaatattgatcggaacattactcatcttcaatactgcgtctgcattgacgactgcagtagcagcaattgcatgtgtggacagctttcgatgcgctgttggtatgacaaggatggcaggctgttgccagaatttaatatggctgagcccccactcatctttgagtgcaatcacgcatgcagttgctggaggaactgtaggaatcgtgtggtgcagaatggcctgcgcgctagactgcagctgtatcgaacccgtgacatgggatggggtgttagatctctacaagatatccccccaggcacatttgtctgtgagtacgtgggcgaactaatttcagattctgaggcggacgtccgcgaggaggatagttacctttttgatctggacaataaagtgatttccgcttag

SEQ ID NO: 279949 - DNA, 3462 bp, Artificial Sequence
  derived and/or modified sequence
atggccgccgacgagggcagcgccgagaagcaggccggcgaggcccacatggccgccgacggcgagaccaacggcagctgcgagaacagcgacgccagcagccacgccaacgccgccaagcacacccaggacagcgccagagtgaacccccaggacggcaccaacaccctgaccagaatcgccgagaacggcgtgagcgagagagacagcgaggccgccaagcagaaccacgtgaccgccgacgacttcgtgcagaccagcgtgatcggcagcaacggctacatcctgaacaagcccgccctgcaggcccagcccctgagaaccaccagcaccctggccagcagcctgcccggccacgccgccaagaccctgcccggcggcgccggcaagggcagaacccccagcgccttcccccagacccccgccgccccccccgccaccctgggcgagggcagcgccgacaccgaggacagaaagctgcccgcccccggcgccgacgtgaaggtgcacagagccagaaagaccatgcccaagagcgtggtgggcctgcacgccgccagcaaggaccccagagaggtgagagaggccagagaccacaaggagcccaaggaggagatcaacaagaacatcagcgacttcggcagacagcagctgctgccccccttccccagcctgcaccagagcctgccccagaaccagtgctacatggccaccaccaagagccagaccgcctgcctgcccttcgtgctggccgccgccgtgagcagaaagaagaagagaagaatgggcacctacagcctggtgcccaagaagaagaccaaggtgctgaagcagagaaccgtgatcgagatgttcaagagcatcacccacagcaccgtgggcagcaagggcgagaaggacctgggcgccagcagcctgcacgtgaacggcgagagcctggagatggacagcgacgaggacgacagcgaggagctggaggaggacgacggccacggcgccgagcaggccgccgccttccccaccgaggacagcagaaccagcaaggagagcatgagcgaggccgacagagcccagaagatggacggcgagagcgaggaggagcaggagagcgtggacaccggcgaggaggaggagggcggcgacgagagcgacctgagcagcgagagcagcatcaagaagaagttcctgaagagaaagggcaagaccgacagcccctggatcaagcccgccagaaagagaagaagaagaagcagaaagaagcccagcggcgccctgggcagcgagagctacaagagcagcgccggcagcgccgagcagaccgcccccggcgacagcaccggctacatggaggtgagcctggacagcctggacctgagagtgaagggcatcctgagcagccaggccgagggcctggccaacggccccgacgtgctggagaccgacggcctgcaggaggtgcccctgtgcagctgcagaatggagacccccaagagcagagagatcaccaccctggccaacaaccagtgcatggccaccgagagcgtggaccacgagctgggcagatgcaccaacagcgtggtgaagtacgagctgatgagacccagcaacaaggcccccctgctggtgctgtgcgaggaccacagaggcagaatggtgaagcaccagtgctgccccggctgcggctacttctgcaccgccggcaacttcatggagtgccagcccgagagcagcatcagccacagattccacaaggactgcgccagcagagtgaacaacgccagctactgcccccactgcggcgaggagagcagcaaggccaaggaggtgaccatcgccaaggccgacaccaccagcaccgtgacccccgtgcccggccaggagaagggcagcgccctggagggcagagccgacaccaccaccggcagcgccgccggcccccccctgagcgaggacgacaagctgcagggcgccgccagccacgtgcccgagggcttcgaccccaccggccccgccggcctgggcagacccacccccggcctgagccagggccccggcaaggagaccctggagagcgccctgatcgccctggacagcgagaagcccaagaagctgagattccaccccaagcagctgtacttcagcgccagacagggcgagctgcagaaggtgctgctgatgctggtggacggcatcgaccccaacttcaagatggagcaccagaacaagagaagccccctgcacgccgccgccgaggccggccacgtggacatctgccacatgctggtgcaggccggcgccaacatcgacacctgcagcgaggaccagagaacccccctgatggaggccgccgagaacaaccacctggaggccgtgaagtacctgatcaaggccggcgccctggtggaccccaaggacgccgagggcagcacctgcctgcacctggccgccaagaagggccactacgaggtggtgcagtacctgctgagcaacggccagatggacgtgaactgccaggacgacggcggctggacccccatgatctgggccaccgagtacaagcacgtggacctggtgaagctgctgctgagcaagggcagcgacatcaacatcagagacaacgaggagaacatctgcctgcactgggccgccttcagcggctgcgtggacatcgccgagatcctgctggccgccaagtgcgacctgcacgccgtgaacatccacggcgacagccccctgcacatcgccgccagagagaacagatacgactgcgtggtgctgttcctgagcagagacagcgacgtgaccctgaagaacaaggagggcgagacccccctgcagtgcgccagcctgaacagccaggtgtggagcgccctgcagatgagcaaggccctgcaggacagcgcccccgacagacccagccccgtggagagaatcgtgagcagagacatcgccagaggctacgagagaatccccatcccctgcgtgaacgccgtggacagcgagccctgccccagcaactacaagtacgtgagccagaactgcgtgaccagccccatgaacatcgacagaaacatcacccacctgcagtactgcgtgtgcatcgacgactgcagcagcagcaactgcatgtgcggccagctgagcatgagatgctggtacgacaaggacggcagactgctgcccgagttcaacatggccgagccccccctgatcttcgagtgcaaccacgcctgcagctgctggagaaactgcagaaacagagtggtgcagaacggcctgagagccagactgcagctgtacagaaccagagacatgggctggggcgtgagaagcctgcaggacatcccccccggcaccttcgtgtgcgagtacgtgggcgagctgatcagcgacagcgaggccgacgtgagagaggaggacagctacctgttcgacctggacaacaaggtgatcagcgcctag

SEQ ID NO: 279950 - protein, 876 aa, Artificial Sequence
  derived and/or modified sequence
MTMDALLARLKLLNPDDLREEIVKAGLKCGPITSTTRFIFEKKLAQALLEQGGRLSSFYHHEAGVTALSQDPQRILKPAEGNPTDQAGFSEDRDFGYSVGLNPPEEEAVTSKTCSVPPSDTDTYRAGATASKEPPLYYGVCPVYEDVPARNERIYVYENKKEALQAVKMIKGSRFKAFSTREDAEKFARGICDYFPSPSKTSLPLSPVKTAPLFSNDRLKDGLCLSESETVNKERANSYKNPRTQDLTAKLRKAVEKGEEDTFSDLIWSNPRYLIGSGDNPTIVQEGCRYNVMHVAAKENQASICQLTLDVLENPDFMRLMYPDDDEAMLQKRIRYVVDLYLNTPDKMGYDTPLHFACKFGNADVVNVLSSHHLIVKNSRNKYDKTPEDVICERSKNKSVELKERIREYLKGHYYVPLLRAEETSSPVIGELWSPDQTAEASHVSRYGGSPRDPVLTLRAFAGPLSPAKAEDFRKLWKTPPREKAGFLHHVKKSDPERGFERVGRELAHELGYPWVEYWEFLGCFVDLSSQEGLQRLEEYLTQQEIGKKAQQETGEREASCRDKATTSGSNSISVRAFLDEDDMSLEEIKNRQNAARNNSPPTVGAFGHTRCSAFPLEQEADLIEAAEPGGPHSSRNGLCHPLNHSRTLAGKRPKAPRGEEAHLPPVSDLTVEFDKLNLQNIGRSVSKTPDESTKTKDQILTSRINAVERDLLEPSPADQLGNGHRRTESEMSARIAKMSLSPSSPRHEDQLEVTREPARRLFLFGEEPSKLDQDVLAALECADVDPHQFPAVHRWKSAVLCYSPSDRQSWPSPAVKGRFKSQLPDLSGPHSYSPGRNSVAGSNPAKPGLGSPGRYSPVHGSQLRRMARLAELAAL

SEQ ID NO: 279951 - DNA, 2631 bp, Artificial Sequence
  derived and/or modified sequence
atgaccatggacgccctgctggccagactgaagctgctgaaccccgacgacctgagagaggagatcgtgaaggccggcctgaagtgcggccccatcaccagcaccaccagattcatcttcgagaagaagctggcccaggccctgctggagcagggcggcagactgagcagcttctaccaccacgaggccggcgtgaccgccctgagccaggacccccagagaatcctgaagcccgccgagggcaaccccaccgaccaggccggcttcagcgaggacagagacttcggctacagcgtgggcctgaacccccccgaggaggaggccgtgaccagcaagacctgcagcgtgccccccagcgacaccgacacctacagagccggcgccaccgccagcaaggagccccccctgtactacggcgtgtgccccgtgtacgaggacgtgcccgccagaaacgagagaatctacgtgtacgagaacaagaaggaggccctgcaggccgtgaagatgatcaagggcagcagattcaaggccttcagcaccagagaggacgccgagaagttcgccagaggcatctgcgactacttccccagccccagcaagaccagcctgcccctgagccccgtgaagaccgcccccctgttcagcaacgacagactgaaggacggcctgtgcctgagcgagagcgagaccgtgaacaaggagagagccaacagctacaagaaccccagaacccaggacctgaccgccaagctgagaaaggccgtggagaagggcgaggaggacaccttcagcgacctgatctggagcaaccccagatacctgatcggcagcggcgacaaccccaccatcgtgcaggagggctgcagatacaacgtgatgcacgtggccgccaaggagaaccaggccagcatctgccagctgaccctggacgtgctggagaaccccgacttcatgagactgatgtaccccgacgacgacgaggccatgctgcagaagagaatcagatacgtggtggacctgtacctgaacacccccgacaagatgggctacgacacccccctgcacttcgcctgcaagttcggcaacgccgacgtggtgaacgtgctgagcagccaccacctgatcgtgaagaacagcagaaacaagtacgacaagacccccgaggacgtgatctgcgagagaagcaagaacaagagcgtggagctgaaggagagaatcagagagtacctgaagggccactactacgtgcccctgctgagagccgaggagaccagcagccccgtgatcggcgagctgtggagccccgaccagaccgccgaggccagccacgtgagcagatacggcggcagccccagagaccccgtgctgaccctgagagccttcgccggccccctgagccccgccaaggccgaggacttcagaaagctgtggaagaccccccccagagagaaggccggcttcctgcaccacgtgaagaagagcgaccccgagagaggcttcgagagagtgggcagagagctggcccacgagctgggctacccctgggtggagtactgggagttcctgggctgcttcgtggacctgagcagccaggagggcctgcagagactggaggagtacctgacccagcaggagatcggcaagaaggcccagcaggagaccggcgagagagaggccagctgcagagacaaggccaccaccagcggcagcaacagcatcagcgtgagagccttcctggacgaggacgacatgagcctggaggagatcaagaacagacagaacgccgccagaaacaacagcccccccaccgtgggcgccttcggccacaccagatgcagcgccttccccctggagcaggaggccgacctgatcgaggccgccgagcccggcggcccccacagcagcagaaacggcctgtgccaccccctgaaccacagcagaaccctggccggcaagagacccaaggcccccagaggcgaggaggcccacctgccccccgtgagcgacctgaccgtggagttcgacaagctgaacctgcagaacatcggcagaagcgtgagcaagacccccgacgagagcaccaagaccaaggaccagatcctgaccagcagaatcaacgccgtggagagagacctgctggagcccagccccgccgaccagctgggcaacggccacagaagaaccgagagcgagatgagcgccagaatcgccaagatgagcctgagccccagcagccccagacacgaggaccagctggaggtgaccagagagcccgccagaagactgttcctgttcggcgaggagcccagcaagctggaccaggacgtgctggccgccctggagtgcgccgacgtggacccccaccagttccccgccgtgcacagatggaagagcgccgtgctgtgctacagccccagcgacagacagagctggcccagccccgccgtgaagggcagattcaagagccagctgcccgacctgagcggcccccacagctacagccccggcagaaacagcgtggccggcagcaaccccgccaagcccggcctgggcagccccggcagatacagccccgtgcacggcagccagctgagaagaatggccagactggccgagctggccgccctgtag

SEQ ID NO: 279952 - DNA, 2631 bp, Artificial Sequence
  derived and/or modified sequence
atgacaatggacgcccttttggcgcggctgaaattactgaatcccgacgacctaagagaggagattgtgaaagctggcctaaaatgtgggcccatcacgtccaccactcgattcatcttcgagaaaaagctggcccaggcactgttggagcaagggggacggctgtccagcttttaccatcatgaggcaggcgtaaccgccctgtcccaagatcctcaacgcatactcaagccggctgaaggtaaccccacagaccaggctggattttcagaagatcgggattttggctactccgtcggcctcaatccccctgaagaggaagcggtaacttctaaaacctgttctgtgccaccgtcagacacggacacttatagggctggcgccacagcctctaaggaacctccactgtattatggcgtgtgccccgtatacgaggatgttcctgctcgaaatgagcgcatatacgtatacgaaaataagaaggaggcactgcaggccgtcaaaatgatcaagggaagcaggttcaaggccttcagcaccagagaagatgcggagaagtttgcgcgggggatatgtgactatttcccctcgcctagcaaaacctcgctgccccttagcccggtgaaaacagcccctcttttcagcaacgaccggctgaaggacgggctttgcctgtcagagagcgagacagtcaacaaggagcgggcgaacagctataaaaacccacggacacaagatctgacagcaaagcttaggaaagctgttgagaagggagaggaagatacattctccgacctgatctggtcgaaccccagatacctgattgggtctggagataaccccacgatcgtgcaggaggggtgtcgatataatgtcatgcatgtggccgccaaggagaaccaagcatccatctgtcagctcactctggatgtcctcgaaaacccagatttcatgagactgatgtaccccgatgacgatgaggcaatgttacaaaaaaggatccggtacgtggtcgatctgtatctgaatacccccgataagatgggttacgatacccccctgcattttgcatgtaaatttgggaatgcagacgtggtgaacgtcttaagctcacaccatctgattgtgaagaacagtagaaacaagtacgacaagacgcctgaggatgtcatttgcgagaggtccaagaataaatctgtggaactaaaggaaaggattagagagtacttgaaaggacattattatgttcccttactgagggccgaagagaccagctcgcctgtaataggagaactgtggtctcctgatcagaccgccgaagctagccacgtgagtaggtacggcgggtctccccgcgatcccgtactcacgcttagggcctttgctgggcccctgagtccagcaaaggctgaggacttccgcaagctgtggaagacccctcctcgagagaaagctgggttcctgcatcacgtcaagaagtcagatccagagcgaggcttcgagcgggtgggacgggaacttgcccatgagctgggttatccatgggtggaatactgggaatttcttggatgcttcgttgacctgagctctcaggagggactccaacgtcttgaggagtatctcacacagcaggagattggcaaaaaggcacaacaagagacaggcgaaagggaggcgtcctgcagagacaaggcaacgacttctggcagcaacagcatctcagtcagagcatttctcgacgaggacgatatgtctcttgaggagataaagaataggcagaatgcagcccgcaataatagtcctcccaccgtgggagcttttggccatacccgttgcagcgcgttccctctggagcaggaggctgacttgatcgaggccgcggagccaggagggccgcatagctcacgaaatggtctctgccatcccttgaatcatagccgcacacttgcagggaagagacccaaggctccacgcggagaggaagcccacctcccccctgtgtcagatttgactgtagagttcgacaagcttaacctccagaatattggccgcagtgtttccaagacccccgacgagtccacaaaaaccaaggaccaaatactcacttcccggatcaacgcagtcgaacgggatttgctcgagccatccccagccgaccagttgggaaacggtcaccggcggacagaaagcgaaatgagtgctcggatcgctaagatgtccctaagcccctcgtccccgcggcacgaagatcagctggaagtcactagggaaccggcgagaagactgttcctcttcggggaagagccttccaagctggaccaggacgttttggctgcgttagagtgcgcagacgtggatcctcaccaattccccgctgttcatagatggaaatcggctgtcttgtgttactccccctccgacaggcagtcttggccgtcacctgccgtcaaggggcgcttcaagtcccagcttcccgacctgagtggcccgcacagctacagccccggacggaattccgttgctggcagcaatcctgccaaacctggactagggtcacctgggcgctactcgccggtgcatggaagccagctgcgtcgcatggccagactggccgaattagcagcactctag

SEQ ID NO: 279953 - DNA, 2631 bp, Artificial Sequence
  derived and/or modified sequence
atgaccatggatgccctgctggcccggctgaagctgctgaacccagatgacctgcgggaggagatcgtgaaggccggcctgaagtgtggccccatcaccagcaccacccgcttcatctttgagaagaagctggcccaggccctgctggagcagggcggccgcctgagcagcttctaccaccatgaagctggggtgacagccctgagccaggacccccagaggatcctgaagccagctgagggcaaccccacagaccaggccggcttctctgaagatcgggactttggctacagcgtgggcctgaaccccccagaggaggaggccgtgaccagcaagacctgcagcgtgcccccaagtgacacagacacctaccgggccggggccacagccagcaaggagccccccctgtactacggcgtgtgccctgtgtatgaagatgtgcctgccagaaatgaaagaatttatgtgtatgagaacaagaaggaggccctgcaggccgtgaagatgatcaagggcagccgcttcaaggccttcagcacccgggaggatgctgagaagtttgcccggggcatctgtgactacttccccagccccagcaagaccagcctgcccctgagccctgtgaagacagcccccctcttcagcaatgaccggctgaaggatggcctgtgcctgtctgagagcgagaccgtgaacaaggagcgggccaacagctacaagaaccccaggacccaggacctgacagccaagctgaggaaggctgtggagaagggggaggaggacaccttcagtgacctgatctggagcaacccccgctacctgattggcagcggggacaaccccaccatcgtgcaggagggctgccgctacaacgtgatgcacgtggccgccaaggagaaccaggccagcatctgccagctgaccctggatgtgctggagaacccagacttcatgaggctgatgtacccagatgatgatgaggccatgctgcagaagaggatccgctacgtggtggacctgtacctgaacaccccagacaagatgggctatgacacccccctgcactttgcctgcaagtttggaaatgctgatgtggtgaatgtgctgagcagccaccacctgattgtgaagaacagcaggaacaagtatgacaagaccccagaagatgtgatctgtgagaggagcaagaacaagtctgtggagctgaaggagcgcatccgggagtacctgaagggccactactacgtgcccctgctgcgggcagaggagaccagcagccctgtgattggagagctgtggagcccagaccagacagctgaggccagccacgtgagccgctatggaggcagcccccgggaccctgtgctgaccctgcgggcctttgctggccccctgagccctgccaaggccgaggacttcaggaagctgtggaagaccccaccccgggagaaggccggcttcctgcaccacgtgaagaagagtgaccctgagcggggctttgagcgggtgggccgggagctggcccacgagctgggctacccctgggtggagtactgggagttcctgggctgctttgtggacctgagcagccaggagggcctgcagaggctggaggagtacctgacccagcaggagatcggcaagaaggcccagcaggagaccggggagcgggaggccagctgccgggacaaggccaccaccagcggcagcaacagcatctctgtgcgggccttcctggatgaagatgacatgagcctggaggagatcaagaaccggcagaatgctgccaggaacaacagccccccaacagtgggcgccttcggccacacccgctgcagcgccttccccctggagcaggaggccgacctgattgaggccgctgagcccggcggcccccacagcagcagaaatggcctgtgccaccccctgaaccacagcaggaccctggccggcaagaggcccaaggcccccagaggagaggaggcccacctgccccctgtgtctgacctgactgtggagtttgacaagctgaacctgcagaacatcggccgctctgtgtccaagaccccagatgagagcaccaagaccaaggaccagatcctgaccagccgcatcaatgctgtggagcgggacctgctggagcccagccctgctgaccagctgggcaatggccacagaagaacagagagcgagatgtctgcccgcatcgccaagatgagcctgagccccagcagccccaggcatgaggaccagctggaggtgacccgggagcccgcccggcggctcttcctgtttggagaggagcccagcaagctggaccaggatgtgctggccgccctggagtgtgctgatgtggacccccaccagtttcctgctgtgcaccgctggaagtctgctgtgctgtgctacagccccagcgaccggcagagctggcccagccctgctgtgaagggccgcttcaagagccagctgcctgacctgagcggcccccacagctacagccctggaagaaattctgtggccggcagcaacccagccaagccaggcctgggcagccctggccgctacagccctgtgcacggcagccagctgcggaggatggcccggctggccgagctggccgccctgtag

SEQ ID NO: 279954 - DNA, 2631 bp, Artificial Sequence
  derived and/or modified sequence
atgaccatggacgccctgctggcccggctgaagctgctgaaccccgacgatctgcgagaagaaatcgtcaaagctgggctgaagtgtggtcccataacaagcaccaccagattcatctttgaaaagaagctagcccaggctttgctggagcagggcggcaggctatcctcattctaccaccacgaggccggcgttacagcactgagccaagatccccaacgcatcctaaagccagccgagggcaatcccacagaccaggcaggattctccgaggacagggacttcgggtattccgtgggcttgaatccccctgaggaggaagccgtcacttctaagacctgttccgttccaccctctgacactgatacataccgagcaggggccaccgcctctaaggaaccacccctgtattacggtgtgtgccccgtctacgaagatgtgcccgcccgcaacgagcgtatctacgtgtacgaaaataagaaagaggccttgcaggccgtcaagatgatcaaagggtccaggttcaaggcttttagtaccagggaagacgccgagaaatttgccaggggcatttgtgattacttcccgtcaccctctaaaacgtctctgcctctttctcctgttaaaaccgcacccttgtttagcaatgacaggcttaaagacggtctgtgcctgagcgagtcagagacagtcaacaaggagagagccaactcatacaagaatccacgtacccaagatctgaccgcaaaactccggaaggccgtggagaaaggagaagaagacaccttctcagatctgatctggagtaaccctagatatctcattggttctggcgataatcccacaatcgtgcaagaagggtgcaggtacaatgtcatgcatgtagccgccaaggaaaatcaggcttccatttgtcagctcaccctagatgtgttagagaatcccgactttatgaggctgatgtatcctgacgacgacgaggcaatgcttcaaaaacggattcgctacgtcgttgacctctacttgaatacgcctgacaagatgggatatgacactcctttgcatttcgcctgcaaattcgggaacgccgacgtcgtgaacgttctgagcagccatcacctgatcgtgaagaacagccggaacaaatatgacaaaactcctgaggacgtgatttgcgagagaagcaaaaataaaagcgtggagctgaaggaacggattcgtgagtaccttaagggtcactactacgtgcccctactccgcgctgaagaaacttcttcaccagtgattggagagctatggagtccagatcagacggctgaggcctctcatgtatcacgctatggcggatcacccagagatcctgtgctgacgttacgcgctttcgctgggcccctgagcccggccaaagccgaggatttcagaaaattatggaaaacacctcccagagaaaaggccggcttcctccaccatgtgaagaaaagtgacccagaaagaggattcgaacgggttggccgtgagttggcacacgaactgggctatccctgggtggagtactgggaattcctgggctgcttcgtggatctttccagtcaggagggtctgcagaggttagaagaatatttgacacagcaggagatcggtaaaaaggcgcagcaggagacaggtgagagagaggcatcctgcagggataaagccactacatctggctcaaatagtattagtgtgcgagcctttttagacgaagacgacatgtcactagaggagattaaaaataggcagaacgctgccagaaacaatagccctcctacggttggcgcctttgggcatacccgttgttctgcattcccactcgagcaggaggcagacctgattgaagcagctgaaccagggggtcctcacagcagtagaaacggcctctgtcatcccctaaatcacagtcgcaccctggcaggcaaacgaccaaaagccccgcggggggaggaagcccatctgccccccgtttcagatctgacagtagagtttgataaactaaatctgcaaaacattggacggagtgttagcaagaccccagatgagtccacaaaaactaaagatcagattctcacatcacgtattaacgccgttgagagggacctcctcgagccttctccagctgaccagcttggaaacggtcaccggcgaacagagtctgaaatgtctgctcgcattgccaagatgagcttgtctccttcctcgccaagacacgaagatcagctcgaggttacccgggagccggcccgccgcctcttcctattcggcgaggaaccatcaaagctggatcaggacgttctagctgcgctcgaatgcgctgacgtggatccacatcaattccccgcagttcaccgctggaaatcagctgtgttatgctactcaccgagcgacagacagagttggccgtcccccgccgtcaaaggccgttttaagtctcagctccctgatttgagtggcccccattcgtactcccccggccggaacagcgttgctggaagtaatcctgcaaaaccggggttgggatccccgggccgatatagtcctgtccatgggagccagctgagaagaatggcccgcctggctgaactggccgccctgtag

SEQ ID NO: 279955 - DNA, 2631 bp, Artificial Sequence
  derived and/or modified sequence
atgaccatggatgccctgctggccaggctgaagctgctgaatcctgacgatctaagggaggagatcgtgaaggctggactcaaatgtggccctatcacatctacaacacgatttatttttgaaaagaaacttgctcaggcgttgcttgagcagggtggcagactgagcagcttttaccaccacgaggccggtgtaacggctttatctcaagatccccaacgcattcttaaacctgccgaaggcaatccaacagatcaggcaggcttcagcgaggatcgagatttcggttactcggtcgggctcaatccacccgaggaggaggcggtcaccagtaagacctgcagcgttccgccatcggatacagatacctaccgcgctggcgcaaccgcatccaaggaacccccactttattacggggtgtgcccagtttatgaagatgtgcctgccaggaatgaacgtatttatgtgtatgagaataagaaagaagccttgcaggcagttaagatgattaaaggcagccggttcaaagcattttccacaagagaagacgcggaaaagtttgctaggggcatttgtgattacttcccttccccctccaaaactagcttgccactgtccccagttaagaccgctccgctcttcagtaacgatcgcttgaaggacggcctgtgtttaagcgagtccgagactgtgaataaggaaagagctaacagttacaagaaccccaggacccaggacctgactgccaagcttcgcaaggccgtggaaaaaggcgaggaggacacattctcggacttgatttggtccaacccccgatacctgatagggtctggagataacccaacgatagttcaggaggggtgccgttacaatgttatgcatgtggcagccaaggagaaccaggcctccatttgtcagctgaccctggacgtgttggagaacccagattttatgagactgatgtatcccgacgacgatgaggctatgctgcagaaacgaatacggtatgtggtcgatttgtaccttaataccccagataagatgggctatgatactcctctacatttcgcctgtaagtttggtaatgccgacgtggtgaacgtgctgtccagccatcatcttatagtaaagaactcaaggaataagtatgataaaactcctgaggatgtcatttgcgaacgctccaagaataaatccgtggaattgaaggaacgcattagagagtacctgaaggggcactattacgtgcctctcctgagggccgaggagacctcttctcctgtgataggagagctctggagccctgatcagacagctgaggcgtctcatgtgagcagatacggcggttctccacgcgatccagtgctcacactccgtgccttcgcaggccctttaagtcctgccaaggccgaggactttagaaagctgtggaagactccaccaagagaaaaagccggtttcctgcatcacgtaaagaaatcggaccctgagagaggctttgaaagggtgggcagagagttggcacacgagcttggctatccatgggttgagtattgggagttcttggggtgctttgtggacttgagctcacaggagggcctgcaacggctggaagaatatctgactcagcaagagataggcaaaaaggcccagcaggagaccggcgaaagagaggcgtcctgtagggacaaggctactacaagcgggtcaaattctattagcgtgcgcgctttcctggacgaggatgacatgtcactcgaagagattaagaacagacagaatgccgctaggaacaattctccgcctactgttggtgcatttggccacaccagatgttcggcgttccctctggaacaggaggccgacctgatcgaagctgccgaaccaggaggaccccactcctcaagaaatgggctctgtcacccactcaaccacagtcgcactctggcaggtaagcgcccaaaggcgccacggggtgaagaggcccaccttccaccagtgtcggacctgacagtcgaattcgacaaactgaatctgcagaacataggcagatctgtgtccaaaactcccgatgagagtacaaagacaaaggatcagattcttacctcacgcattaacgccgtggagcgcgacttgctggagccatcgcccgctgaccagctgggcaacggccacagaagaaccgaatcggagatgagcgctagaatagctaaaatgagcctttcgccctcttcaccgagacacgaagatcagttggaagtaacccgcgagcccgctcggaggctcttcttgtttggggaagagccttcgaagttggatcaagacgtgctggcagctctcgaatgcgcagacgtggatcctcatcagttcccagccgtccaccggtggaaaagtgcagtgctatgctactcaccaagtgataggcaatcttggccctccccagccgtcaagggtcgcttcaaatctcagctgccggacctctcagggcctcacagctactcgcctggacgtaactcagttgccggatctaatcccgctaaacctggcttaggcagcccgggacgatacagccctgtgcatggtagccaattgaggagaatggccagactcgcagagttggctgctctgtag

SEQ ID NO: 279956 - protein, 808 aa, Artificial Sequence
  derived and/or modified sequence
MIPFLPMFSLLLLLIVNPINANNHYDKILAHSRIRGRDQGPNVCALQQILGTKKKYFSTCKNWYKKSICGQKTTVLYECCPGYMRMEGMKGCPAVLPIDHVYGTLGIVGATTTQRYSDASKLREEIEGKGSFTYFAPSNEAWDNLDSDIRRGLESNVNVELLNALHSHMINKRMLTKDLKNGMIIPSMYNNLGLFINHYPNGVVTVNCARIIHGNQIATNGVVHVIDRVLTQIGTSIQDFIEAEDDLSSFRAAAITSDILEALGRDGHFTLFAPTNEAFEKLPRGVLERIMGDKVASEALMKYHILNTLQCSESIMGGAVFETLEGNTIEIGCDGDSITVNGIKMVNKKDIVTNNGVIHLIDQVLIPDSAKQVIELAGKQQTTFTDLVAQLGLASALRPDGEYTLLAPVNNAFSDDTLSMDQRLLKLILQNHILKVKVGLNELYNGQILETIGGKQLRVFVYRTAVCIENSCMEKGSKQGRNGAIHIFREIIKPAEKSLHEKLKQDKRFSTFLSLLEAADLKELLTQPGDWTLFVPTNDAFKGMTSEEKEILIRDKNALQNIILYHLTPGVFIGKGFEPGVTNILKTTQGSKIFLKEVNDTLLVNELKSKESDIMTTNGVIHVVDKLLYPADTPVGNDQLLEILNKLIKYIQIKFVRGSTFKEIPVTVYTTKIITKVVEPKIKVIEGSLQPIIKTEGPTLTKVKIEGEPEFRLIKEGETITEVIHGEPIIKKYTKIIDGVPVEITEKETREERIITGPEIKYTRISTGGGETEETLKKLLQEDTPVRKLQANKKVQGSRRRLREGRSQ

SEQ ID NO: 279957 - DNA, 2427 bp, Artificial Sequence
  derived and/or modified sequence
atgattccctttctccccatgttttcccttctgttgctcttaatcgttaatcctatcaatgccaacaaccactacgacaaaattttagcacactccaggatccgcgggcgtgaccagggccccaatgtgtgcgctctccagcagatcttgggcacgaaaaaaaaatacttctccacctgcaaaaattggtataaaaagtcgatatgcgggcagaaaacgacagtcctctatgagtgttgccctggctacatgcggatggagggaatgaagggatgtcctgcagtcttgcccatcgaccatgtgtatggcactctcggtattgttggtgccactacaactcagcgctactcagacgccagcaagctccgggaggagatcgagggcaaaggctctttcacatattttgccccttctaacgaggcgtgggataacctggattctgatattagacggggtctggaaagcaacgtgaatgtcgaactgctgaacgcgctgcatagtcatatgattaacaaaagaatgctgaccaaagacttaaagaatggcatgatcataccttcaatgtacaataatcttgggctgttcatcaatcattaccctaatggagtggttaccgttaactgtgccagaatcattcacggtaaccaaatagccactaatggagtcgttcatgtcatagatcgggtgttgacacaaatcgggacctctatccaagattttattgaggcagaggatgacttgtcgtctttcagagcggccgcgatcaccagcgacatcctggaggccctgggaagggacggacacttcaccctctttgccccaacaaatgaagcctttgaaaagctcccgcgaggcgtgctcgagaggattatgggggacaaggtggcctcggaggctctgatgaagtatcatatactgaatacactgcagtgcagcgagtctataatgggaggtgccgtgtttgagactctcgagggcaataccatagaaatcggctgtgatggcgactccattaccgttaacggaataaaaatggttaacaagaaagacatcgtaaccaacaatggtgtgattcatctcatagaccaggtgctcatacccgactcggcaaaacaagtgattgaactcgcaggaaaacagcagacgaccttcacagacctggtcgctcaattgggcttggcttctgcactgcgccccgatggagagtacacactgttagcacccgtgaacaacgctttctctgacgacacactctccatggaccagagattgctgaaactcatcttacagaaccacattcttaaggtgaaggtgggactgaatgaactgtacaatggccagatacttgagaccatcggcggtaagcagctgcgggtgtttgtttatcgtactgccgtgtgtatcgagaatagctgtatggagaagggttctaaacagggccgaaatggagcgatccacatcttccgggaaattatcaagcccgccgaaaagtctctacatgaaaaactaaagcaggataagagatttagcactttcttaagcctactggaagccgctgatctgaaagaactcctgacacaaccaggggattggacattgttcgtcccaacaaacgacgccttcaaagggatgacctcagaggagaaggagattcttatcagagataagaacgctcttcaaaacatcatcttataccacctcactcccggagttttcattggtaagggatttgagcccggcgtgactaacatactgaaaactacacagggcagcaagattttcctgaaagaagtcaacgacactctactcgtgaatgagctgaagtcaaaagagtccgacatcatgaccacaaatggagttattcacgtggtcgataagttgctctaccctgccgacacacccgtcggtaatgatcaactcttggaaatcttgaacaagctgataaagtacatccagatcaaattcgttcgggggtccacttttaaggagatacctgtgaccgtttataccacgaagatcataacaaaggtcgtggagcccaagattaaagtgatcgaggggagtctccagcccatcatcaaaacagaaggccctaccctgaccaaggttaaaatcgaaggcgaacctgagttcagactcatcaaggagggggaaacaatcactgaagttatccacggcgagccgattatcaaaaaatatactaagatcatagacggcgtgcctgtagagattaccgagaaggagaccagagaggagcggattataaccggacccgagattaagtacactcggatcagcaccggcggcggcgagacagaggagaccttaaaaaaactcctccaagaggacacgcctgtgcggaaactgcaggccaacaaaaaagtgcagggatcacgaagacgtctgcgggagggcaggagccagtag

SEQ ID NO: 279958 - DNA, 2427 bp, Artificial Sequence
  derived and/or modified sequence
atgatccccttcctgcccatgttcagcctgctgctgctgctgattgtgaaccccatcaatgccaacaaccactatgacaagatcctggcccacagccgcatccggggccgggaccagggccccaacgtgtgtgccctgcagcagatcctgggcaccaagaagaagtacttcagcacctgcaagaactggtacaagaagagcatctgtggccagaagaccaccgtgctgtatgagtgctgccccggctacatgaggatggagggcatgaagggctgcccagctgtgctgcccatcgaccacgtgtatggcaccctgggcatcgtgggcgccaccaccacccagcgctacagtgatgccagcaagctgcgggaggagattgagggcaagggcagcttcacctactttgcccccagcaatgaggcctgggacaacctggacagcgacatccggcggggcctggagagcaatgtgaatgtggagctgctgaatgccctgcacagccacatgatcaacaagaggatgctgaccaaggacctgaagaatggcatgatcatccccagcatgtacaacaacctgggcctcttcatcaaccactacccaaatggagtggtgacagtgaactgtgcccgcatcatccacggcaaccagatcgccaccaacggggtggtgcacgtgattgacagagtgctgacccagatcggcaccagcatccaggacttcattgaagcagaagatgacctgagcagcttccgggctgctgccatcaccagtgacatcctggaggccctgggcagagatggccacttcaccctgtttgcccccaccaatgaggcctttgagaagctgccccggggcgtgctggagcgcatcatgggagacaaggtggccagcgaggccctgatgaagtaccacatcctgaacaccctgcagtgcagcgagagcatcatgggcggcgctgtgtttgagaccctggagggcaacaccattgaaattggctgtgatggagacagcatcaccgtgaatggcatcaagatggtgaacaagaaggacatcgtgaccaacaatggagtcatccacctgattgaccaggtgctgatcccagattctgccaagcaggtgattgagctggccggcaagcagcagaccaccttcacagacctggtggcccagctgggcctggccagcgccctgcggccagatggagagtacaccctgctggcccctgtgaacaatgccttcagtgatgacaccctgtccatggaccagaggctgctgaagctgatcctgcagaaccacatcctgaaggtgaaggtgggcctgaatgagctgtacaacggccagatcctggagaccatcggcggcaagcagctgcgggtgtttgtgtacagaacagctgtgtgcatcgagaacagctgcatggagaagggcagcaagcagggcagaaatggagccatccacatcttccgggagatcatcaagccagctgagaagagcctgcacgagaagctgaagcaggacaagcgcttcagcaccttcctgagcctgctggaggccgctgacctgaaggagctgctgacccagcccggggactggaccctgtttgtgcccaccaatgatgccttcaagggcatgaccagcgaggagaaggagatcctgatccgggacaagaatgccctgcagaacatcatcctgtaccacctgaccccaggagtcttcatcggcaaaggatttgagcccggggtgaccaacatcctgaagaccacccagggcagcaagatcttcctgaaggaggtgaatgacaccctgctggtgaatgagctgaagagcaaggagagtgacatcatgaccaccaacggggtcatccacgtggtggacaagctgctgtacccagctgacacccctgtgggcaatgaccagctgctggagatcctgaacaagctgatcaagtacatccagatcaagtttgtgcggggcagcaccttcaaggagatccctgtgacagtgtacaccaccaagatcatcaccaaggtggtggagcccaagatcaaggtgattgagggcagcctgcagcccatcatcaagacagagggccccaccctgaccaaggtgaagattgaaggagagcctgagttccgcctcatcaaggagggggagaccatcacagaggtgattcatggagagcccatcatcaagaagtacaccaagatcattgatggagtgcctgtggagatcacagagaaggagacccgggaggagcgcatcatcaccggccctgagatcaagtacacccgcatcagcactggaggaggagaaacagaggagaccctgaagaagctgctgcaggaggacacccctgtgaggaagctgcaggccaacaagaaggtgcagggcagcagaagaaggctgcgggagggccgcagccagtag

SEQ ID NO: 279959 - DNA, 2427 bp, Artificial Sequence
  derived and/or modified sequence
atgatccccttcctgcccatgttcagcctgctgctgctgctgatcgtgaatccaattaatgccaacaaccactatgacaagattcttgcccattcccgaatacgcggcagggatcaggggcctaatgtgtgtgctcttcagcagatcctcggaactaaaaaaaaatacttcagtacttgcaagaattggtataaaaagagtatatgcggtcagaaaacgacagttctatatgagtgctgtcctggctatatgcgcatggaaggtatgaaaggctgccccgccgtgctgcccattgatcatgtatatggaacactgggaatcgttggagctacaactactcagcgttattctgatgctagtaagctcagggaagagattgaaggcaagggcagctttacctactttgcgcccagtaacgaagcctgggacaacctcgatagcgacatcaggaggggtttagaatccaatgtgaatgttgaattactgaacgcactgcactctcacatgatcaacaagcgcatgctgacaaaggatctgaagaatggcatgatcatccctagcatgtataataacttagggttgtttattaatcattatcccaatggcgtggtaacagtcaattgtgctcgtattatccacgggaatcagatagccacaaatggagtcgtacatgtgatagacagagtcctgacccaaatcggcacaagcattcaggattttatagaggcagaggatgacctttcttcttttagagccgccgctattactagcgacattctcgaagctcttggtcgagacggccacttcacattgttcgcccctacgaacgaggctttcgaaaagctcccccgaggagtgctggagaggattatgggagacaaggtcgcctccgaagccctgatgaaataccatattctgaataccctccaatgctccgagtcaatcatggggggtgcggtcttcgaaaccctggaagggaacaccattgaaattggatgcgatggggacagcatcacggtgaatggcatcaaaatggtcaacaagaaagacattgtcacgaataacggagtgatccatcttattgaccaggtgcttatccccgacagcgccaagcaggtgattgaattagccggcaagcagcagactacttttaccgatctcgtagcacagctcgggcttgcctctgcactgaggccagacggagagtatacactcctcgcgcctgtcaacaatgcattctcagatgacacactaagtatggatcagagactgcttaaactgatccttcagaatcacattctgaaggtgaaagttggcctgaatgagctttataatggacagattctggagaccataggaggaaagcagctgcgtgtcttcgtgtatcgtacggctgtttgtattgaaaacagttgtatggaaaagggtagtaaacaggggcgtaacggcgctatccatatttttcgggagataattaagccagcggaaaaatctctgcatgagaaactcaaacaggacaaaagattcagcacctttttatccctgctggaagcagctgatcttaaggagcttctcactcaacctggagactggactctgtttgtgcccacgaacgacgccttcaaaggcatgacatccgaggagaaggaaattctaattagagacaaaaatgcgcttcagaatatcatcctttaccatctgacacccggcgtgttcattggcaagggtttcgaaccaggtgtgacgaacatactcaagacgacccaaggctcaaagattttcctgaaggaggttaacgataccctgcttgtgaacgagctcaagtccaaggagtctgacatcatgaccacaaatggagttatccacgttgttgataagctcttgtacccagccgacacacctgtgggcaacgaccagctcctagaaatactgaacaaactcattaagtatattcaaataaagtttgtgaggggctctacctttaaggagattcctgtgacagtgtatacgacaaagatcatcaccaaggtggttgaaccaaagattaaagtgatcgaaggcagcctgcagcctatcatcaagacagaaggtccaacactcaccaaggtcaagatcgagggcgagcccgagtttcgtttgatcaaggagggcgagactataacagaggtcatacatggcgaacccataatcaaaaagtataccaagatcattgacggggtccccgtggaaatcaccgagaaggagacccgcgaggaacgcattatcaccggcccagaaattaaatatacacgcatctctactggtgggggggagacagaagagaccttaaaaaagctcctccaagaggatactcccgtgcgcaagctgcaggctaataaaaaggttcaggggtcacggaggcgtctgagagaaggaagatcacagtag

SEQ ID NO: 279960 - DNA, 3210 bp, Artificial Sequence
  derived and/or modified sequence
ctcttcggggactaactgcaacggagagactcaagatgattccctttttacccatgttttctctactattgctgcttattgttaaccctataaacgccaacaatcattatgacaagatcttggctcatagtcgtatcaggggtcgggaccaaggcccaaatgtctgtgcccttcaacagattttgggcaccaaaaagaaatacttcagcacttgtaagaactggtataaaaagtccatctgtggacagaaaacgactgtgttatatgaatgttgccctggttatatgagaatggaaggaatgaaaggctgcccagcagttttgcccattgaccatgtttatggcactctgggcatcgtgggagccaccacaacgcagcgctattctgacgcctcaaaactgagggaggagatcgagggaaagggatccttcacttactttgcaccgagtaatgaggcttgggacaacttggattctgatatccgtagaggtttggagagcaacgtgaatgttgaattactgaatgctttacatagtcacatgattaataagagaatgttgaccaaggacttaaaaaatggcatgattattccttcaatgtataacaatttggggcttttcattaaccattatcctaatggggttgtcactgttaattgtgctcgaatcatccatgggaaccagattgcaacaaatggtgttgtccatgtcattgaccgtgtgcttacacaaattggtacctcaattcaagacttcattgaagcagaagatgacctttcatcttttagagcagctgccatcacatcggacatattggaggcccttggaagagacggtcacttcacactctttgctcccaccaatgaggcttttgagaaacttccacgaggtgtcctagaaaggatcatgggagacaaagtggcttccgaagctcttatgaagtaccacatcttaaatactctccagtgttctgagtctattatgggaggagcagtctttgagacgctggaaggaaatacaattgagataggatgtgacggtgacagtataacagtaaatggaatcaaaatggtgaacaaaaaggatattgtgacaaataatggtgtgatccatttgattgatcaggtcctaattcctgattctgccaaacaagttattgagctggctggaaaacagcaaaccaccttcacggatcttgtggcccaattaggcttggcatctgctctgaggccagatggagaatacactttgctggcacctgtgaataatgcattttctgatgatactctcagcatggatcagcgcctccttaaattaattctgcagaatcacatattgaaagtaaaagttggccttaatgagctttacaacgggcaaatactggaaaccatcggaggcaaacagctcagagtcttcgtatatcgtacagctgtctgcattgaaaattcatgcatggagaaagggagtaagcaagggagaaacggtgcgattcacatattccgcgagatcatcaagccagcagagaaatccctccatgaaaagttaaaacaagataagcgctttagcaccttcctcagcctacttgaagctgcagacttgaaagagctcctgacacaacctggagactggacattatttgtgccaaccaatgatgcttttaagggaatgactagtgaagaaaaagaaattctgatacgggacaaaaatgctcttcaaaacatcattctttatcacctgacaccaggagttttcattggaaaaggatttgaacctggtgttactaacattttaaagaccacacaaggaagcaaaatctttctgaaagaagtaaatgatacacttctggtgaatgaattgaaatcaaaagaatctgacatcatgacaacaaatggtgtaattcatgttgtagataaactcctctatccagcagacacacctgttggaaatgatcaactgctggaaatacttaataaattaatcaaatacatccaaattaagtttgttcgtggtagcaccttcaaagaaatccccgtgactgtctatacaactaaaattataaccaaagttgtggaaccaaaaattaaagtgattgaaggcagtcttcagcctattatcaaaactgaaggacccacactaacaaaagtcaaaattgaaggtgaacctgaattcagactgattaaagaaggtgaaacaataactgaagtgatccatggagagccaattattaaaaaatacaccaaaatcattgatggagtgcctgtggaaataactgaaaaagagacacgagaagaacgaatcattacaggtcctgaaataaaatacactaggatttctactggaggtggagaaacagaagaaactctgaagaaattgttacaagaagacacacccgtgaggaagttgcaagccaacaaaaaagttcaaggatctagaagacgattaagggaaggtcgttctcagtgaaaatccaaaaaccagaaaaaaatgtttatacaaccctaagtcaataacctgaccttagaaaattgtgagagccaagttgacttcaggaactgaaacatcagcacaaagaagcaatcatcaaataattctgaacacaaatttaatatttttttttctgaatgagaaacatgagggaaattgtggagttagcctcctgtggtaaaggaattgaagaaaatataacaccttacaccctttttcatcttgacattaaaagttctggctaactttggaatccattagagaaaaatccttgtcaccagattcattacaattcaaatcgaagagttgtgaactgttatcccattgaaaagaccgagccttgtatgtatgttatggatacataaaatgcacgcaagccattatctctccatgggaagctaagttataaaaataggtgcttggtgtacaaaactttttatatcaaaaggctttgcacatttctatatgagtgggtttactggtaaattatgttattttttacaactaattttgtactctcagaatgtttgtcatatgcttcttgcaatgcatattttttaatctcaaacgtttcaataaaaccatttttcagatataaagagaattacttcaaattgagtaattcagaaaaactcaagatttaagttaaaaagtggtttggacttgggaacaggactttatacctcttttactgtaacaagtactcattaaaggaaattgaatgaaa

SEQ ID NO: 279961 - DNA, 2427 bp, Artificial Sequence
  derived and/or modified sequence
atgattccctttctgccaatgtttagcctcctcctgctgcttatcgtgaacccaattaacgccaacaaccactatgacaaaatccttgctcactccagaattagggggagggatcaagggccaaacgtgtgtgccttacagcagattttaggtacaaagaagaagtacttttctacatgcaaaaattggtataaaaagtccatctgcggccagaaaactaccgtgctttacgagtgttgccctgggtacatgaggatggaaggcatgaaggggtgtcccgctgtcctacctatcgaccacgtgtacggcaccctcggaatcgtgggtgcaactaccacccagcggtattcggacgctagcaaactaagagaagaaatcgagggaaagggaagtttcacttatttcgcaccatccaacgaggcatgggacaatttggatagcgatatccgacgcggtttagaaagcaacgtaaatgtggaattactgaacgcccttcatagccatatgatcaacaagcgtatgctgaccaaggatctcaaaaatggcatgatcattcccagcatgtataataacctagggctgttcatcaaccactatccgaatggggtggtgaccgtgaactgtgccaggataatccacgggaaccagatcgcaactaatggagtggttcacgttatcgatagagtcttaacccagatcggcacaagcatccaagattttatagaggccgaagacgatttgtcctccttcagggccgctgctatcacatccgatatcctcgaggctttaggccgtgacggccattttaccctgttcgcccctaccaacgaggcctttgaaaaactccctaggggcgttctggagcggatcatgggcgataaggtggctagcgaagcactcatgaaatatcacatcttaaatacccttcagtgttccgagtctattatggggggtgccgtgttcgaaacattagaaggcaacacaatcgaaatcgggtgtgacggtgatagtataaccgttaacggaattaagatggtaaacaagaaagacattgtgacgaacaacggcgtgatccatttgatcgaccaggtccttattccagattcagctaagcaggtgattgaactcgccggaaaacaacagaccacttttacagaccttgtggctcagctgggtttagcctccgcgcttagaccagacggcgaatacactctgctggctccagttaacaacgctttctcagatgacaccctgagcatggaccagagactgctgaaacttatcctgcagaatcacatcttgaaggtgaaagtgggcttaaacgaactatataacgggcagatcttagagacaatcggtggcaaacaactacgtgtctttgtctataggactgccgtctgtattgagaatagctgcatggagaagggttccaaacagggcaggaatggggctatacatatctttagggagatcattaagcctgcggagaaatcactccatgaaaaactgaagcaagacaaacgatttagcaccttcctgtctctgctcgaagcggctgacctcaaggagctgctaacccagccgggtgattggacactattcgtcccgacgaatgacgcgttcaaaggaatgaccagcgaagagaaagagattctgatcagagacaagaatgccctgcagaatattatcctgtatcatctgacccctggggtcttcataggcaaaggtttcgaacccggtgtgactaatatcctcaaaaccactcaagggtctaagatctttttgaaggaggtgaacgatactcttctggtgaacgaactcaaatccaaagaatcagacatcatgaccactaatggagtgattcacgttgtggataagctactgtatcctgcagacaccccagtgggaaatgaccagctgttagaaatactgaacaagctgattaaatacattcagatcaagtttgtgcgcggtagcacctttaaggaaatcccggtcactgtatacacaactaagattatcaccaaagtggttgagcctaaaattaaagtgattgagggcagcttgcaaccgatcataaaaaccgagggaccaactttgaccaaagtcaaaatcgagggtgagcctgagtttcggctgatcaaagagggggagacaatcactgaagtgatccacggcgagcccatcatcaaaaagtatactaagattatcgatggcgttccagtggaaatcacggagaaggaaactagagaagagcggataattacggggcctgagattaagtacacacggataagcactgggggtggcgaaacagaggagaccctaaagaaactccttcaggaagatacacccgtcaggaaactacaggctaacaagaaggtccaaggcagcagaaggaggctaagggaggggagatcacaatag

SEQ ID NO: 279962 - DNA, 2427 bp, Artificial Sequence
  derived and/or modified sequence
atgatccccttcctgcccatgttcagcctgctgctgctgctgatcgtgaaccccatcaacgccaacaaccactacgacaagatcctggcccacagcagaatcagaggcagagaccagggccccaacgtgtgcgccctgcagcagatcctgggcaccaagaagaagtacttcagcacctgcaagaactggtacaagaagagcatctgcggccagaagaccaccgtgctgtacgagtgctgccccggctacatgagaatggagggcatgaagggctgccccgccgtgctgcccatcgaccacgtgtacggcaccctgggcatcgtgggcgccaccaccacccagagatacagcgacgccagcaagctgagagaggagatcgagggcaagggcagcttcacctacttcgcccccagcaacgaggcctgggacaacctggacagcgacatcagaagaggcctggagagcaacgtgaacgtggagctgctgaacgccctgcacagccacatgatcaacaagagaatgctgaccaaggacctgaagaacggcatgatcatccccagcatgtacaacaacctgggcctgttcatcaaccactaccccaacggcgtggtgaccgtgaactgcgccagaatcatccacggcaaccagatcgccaccaacggcgtggtgcacgtgatcgacagagtgctgacccagatcggcaccagcatccaggacttcatcgaggccgaggacgacctgagcagcttcagagccgccgccatcaccagcgacatcctggaggccctgggcagagacggccacttcaccctgttcgcccccaccaacgaggccttcgagaagctgcccagaggcgtgctggagagaatcatgggcgacaaggtggccagcgaggccctgatgaagtaccacatcctgaacaccctgcagtgcagcgagagcatcatgggcggcgccgtgttcgagaccctggagggcaacaccatcgagatcggctgcgacggcgacagcatcaccgtgaacggcatcaagatggtgaacaagaaggacatcgtgaccaacaacggcgtgatccacctgatcgaccaggtgctgatccccgacagcgccaagcaggtgatcgagctggccggcaagcagcagaccaccttcaccgacctggtggcccagctgggcctggccagcgccctgagacccgacggcgagtacaccctgctggcccccgtgaacaacgccttcagcgacgacaccctgagcatggaccagagactgctgaagctgatcctgcagaaccacatcctgaaggtgaaggtgggcctgaacgagctgtacaacggccagatcctggagaccatcggcggcaagcagctgagagtgttcgtgtacagaaccgccgtgtgcatcgagaacagctgcatggagaagggcagcaagcagggcagaaacggcgccatccacatcttcagagagatcatcaagcccgccgagaagagcctgcacgagaagctgaagcaggacaagagattcagcaccttcctgagcctgctggaggccgccgacctgaaggagctgctgacccagcccggcgactggaccctgttcgtgcccaccaacgacgccttcaagggcatgaccagcgaggagaaggagatcctgatcagagacaagaacgccctgcagaacatcatcctgtaccacctgacccccggcgtgttcatcggcaagggcttcgagcccggcgtgaccaacatcctgaagaccacccagggcagcaagatcttcctgaaggaggtgaacgacaccctgctggtgaacgagctgaagagcaaggagagcgacatcatgaccaccaacggcgtgatccacgtggtggacaagctgctgtaccccgccgacacccccgtgggcaacgaccagctgctggagatcctgaacaagctgatcaagtacatccagatcaagttcgtgagaggcagcaccttcaaggagatccccgtgaccgtgtacaccaccaagatcatcaccaaggtggtggagcccaagatcaaggtgatcgagggcagcctgcagcccatcatcaagaccgagggccccaccctgaccaaggtgaagatcgagggcgagcccgagttcagactgatcaaggagggcgagaccatcaccgaggtgatccacggcgagcccatcatcaagaagtacaccaagatcatcgacggcgtgcccgtggagatcaccgagaaggagaccagagaggagagaatcatcaccggccccgagatcaagtacaccagaatcagcaccggcggcggcgagaccgaggagaccctgaagaagctgctgcaggaggacacccccgtgagaaagctgcaggccaacaagaaggtgcagggcagcagaagaagactgagagagggcagaagccagtag

SEQ ID NO: 279963 - protein, 277 aa, Artificial Sequence
  derived and/or modified sequence
MRMEGMKGCPAVLPIDHVYGTLGIVGATTTQRYSDASKLREEIEGKGSFTYFAPSNEAWDNLDSDIRRGLESNVNVELLNALHSHMINKRMLTKDLKNGMIIPSMYNNLGLFINHYPNGVVTVNCARIIHGNQIATNGVVHVIDRVLTQIGTSIQDFIEAEDDLSSFRAAAITSDILEALGRDGHFTLFAPTNEAFEKLPRGVLERIMGDKVASEALMKYHILNTLQCSESIMGGAVFETLEGNTIEIGCDGDSITVNGIKMVNKKDIVTNWCDPFD

SEQ ID NO: 279964 - protein, 796 aa, Artificial Sequence
  derived and/or modified sequence
MSADNQLQVIFITNDRRNKEKAIEEGIPAFTCEEYVKSLTANPELIDRLACLSEEGNEIESGKIIFSEHLPLSKLQQGIKSGTYLQGTFRASRENYLEATVWIHGDNEENKEIILQGLKHLNRAVHEDIVAVELLPKSQWVAPSSVVLHDEGQNEEDVEKEEETERMLKTAVSEKMLKPTGRVVGIIKRNWRPYCGMLSKSDIKESRRHLFTPADKRIPRIRIETRQASTLEGRRIIVAIDGWPRNSRYPNGHFVRNLGDVGEKETETEVLLLEHDVPHQPFSQAVLSFLPKMPWSITEKDMKNREDLRHLCICSVDPPGCTDIDDALHCRELENGNLEVGVHIADVSHFIRPGNALDQESARRGTTVYLCEKRIDMVPELLSSNLCSLKCDVDRLAFSCIWEMNHNAEILKTKFTKSVINSKASLTYAEAQLRIDSANMNDDITTSLRGLNKLAKILKKRRIEKGALTLSSPEVRFHMDSETHDPIDLQTKELRETNSMVEEFMLLANISVAKKIHEEFSEHALLRKHPAPPPSNYEILVKAARSRNLEIKTDTAKSLAESLDQAESPTFPYLNTLLRILATRCMMQAVYFCSGMDNDFHHYGLASPIYTHFTSPIRRYADVIVHRLLAVAIGADCTYPELTDKHKLADICKNLNFRHKMAQYAQRASVAFHTQLFFKSKGIVSEEAYILFVRKNAIVVLIPKYGLEGTVFFEEKDKPNPQLIYDDEIPSLKIEDTVFHVFDKVKVKIMLDSSNLQHQKIRMSLVEPQIPGISIPTDTSNMDLNGPKKKKMKLGK

SEQ ID NO: 279965 - protein, 1302 aa, Artificial Sequence
  derived and/or modified sequence
MAHSKTRTNDGKITYPPGVKEISDKISKEEMVRRLKMVVKTFMDMDQDSEEEKELYLNLALHLASDFFLKHPDKDVRLLVACCLADIFRIYAPEAPYTSPDKLKDIFMFITRQLKGLEDTKSPQFNRYFYLLENIAWVKSYNICFELEDSNEIFTQLYRTLFSVINNGHNQKVHMHMVDLMSSIICEGDTVSQELLDTVLVNLVPAHKNLNKQAYDLAKALLKRTAQAIEPYITNFFNQVLMLGKTSISDLSEHVFDLILELYNIDSHLLLSVLPQLEFKLKSNDNEERLQVVKLLAKMFGAKDSELASQNKPLWQCYLGRFNDIHVPIRLECVKFASHCLMNHPDLAKDLTEYLKVRSHDPEEAIRHDVIVSIVTAAKKDILLVNDHLLNFVRERTLDKRWRVRKEAMMGLAQIYKKYALQSAAGKDAAKQIAWIKDKLLHIYYQNSIDDRLLVERIFAQYMVPHNLETTERMKCLYYLYATLDLNAVKALNEMWKCQNLLRHQVKDLLDLIKQPKTDASVKAIFSKVMVITRNLPDPGKAQDFMKKFTQVLEDDEKIRKQLEVLVSPTCSCKQAEGCVREITKKLGNPKQPTNPFLEMIKFLLERIAPVHIDTESISALIKQVNKSIDGTADDEDEGVPTDQAIRAGLELLKVLSFTHPISFHSAETFESLLACLKMDDEKVAEAALQIFKNTGSKIEEDFPHIRSALLPVLHHKSKKGPPRQAKYAIHCIHAIFSSKETQFAQIFEPLHKSLDPSNLEHLITPLVTIGHIALLAPDQFAAPLKSLVATFIVKDLLMNDRLPGKKTTKLWVPDEEVSPETMVKIQAIKMMVRWLLGMKNNHSKSGTSTLRLLTTILHSDGDLTEQGKISKPDMSRLRLAAGSAIVKLAQEPCYHEIITLEQYQLCALAINDECYQVRQVFAQKLHKGLSRLRLPLEYMAICALCAKDPVKERRAHARQCLVKNINVRREYLKQHAAVSEKLLSLLPEYVVPYTIHLLAHDPDYVKVQDIEQLKDVKECLWFVLEILMAKNENNSHAFIRKMVENIKQTKDAQGPDDAKMNEKLYTVCDVAMNIIMSKSTTYSLESPKDPVLPARFFTQPDKNFSNTKNYLPPEMKSFFTPGKPKTTNVLGAVNKPLSSAGKQSQTKSSRMETVSNASSSSNPSSPGRIKGRLDSSEMDHSENEDYTMSSPLPGKKSDKRDDSDLVRSELEKPRGRKKTPVTEQEEKLGMDDLTKLVQEQKPKGSQRSRKRGHTASESDEQQWPEEKRLKEDILENEDEQNSLPLHQKDASDRRTTMQIVK

SEQ ID NO: 279966 - protein, 687 aa, Artificial Sequence
  derived and/or modified sequence
MDGGALTDTSLTDSYFSTSFIGVNGFGSPVETKYPLMQRMTNSSSSPSLLNDSAKPYSAHDPLTSPASSLFNDFGALNISQRRKTPNPTASEFIPKGGSTSRLSNVSQSNMSAFSQVFSHPSMGSPATAGLAPGMSLSAGSSPLHSPKITPHTSPAPRRRSHTPNPASYMVPSSASTSVNNPVSQTPSSGQVIQKETVGGTTYFYTDTTPAPLTGMVFPNYHIYPPTAPHVAYMQPKANAPSFFMADELRQELINRHLITMAQIDQADMPAVPTEVDSYHSLFPLEPLPPPNRIQKSSNFGYITSCYKAVNSKDDLPYCLRRIHGFRLVNTKCMVLVDMWKKIQHSNIVTLREVFTTKAFAEPSLVFAYDFHAGGETMMSRHFNDPNADAYFTKRKWGQHEGPLPRQHAGLLPESLIWAYIVQLSSALRTIHTAGLACRVMDPTKILITGKTRLRVNCVGVFDVLTFDNSQNNNPLALMAQYQQADLISLGKVVLALACNSLAGIQRENLQKAMELVTINYSSDLKNLILYLLTDQNRMRSVNDIMPMIGARFYTQLDAAQMRNDVIEEDLAKEVQNGRLFRLLAKLGTINERPEFQKDPTWSETGDRYLLKLFRDHLFHQVTEAGAPWIDLSHIISCLNKLDAGVPEKISLISRDEKSVLVVTYSDLKRCFENTFQELIAAANGQL

SEQ ID NO: 279967 - DNA, 2064 bp, Artificial Sequence
  derived and/or modified sequence
atggacggcggcgccctgaccgacaccagcctgaccgacagctacttcagcaccagcttcatcggcgtgaacggcttcggcagccccgtggagaccaagtaccccctgatgcagagaatgaccaacagcagcagcagccccagcctgctgaacgacagcgccaagccctacagcgcccacgaccccctgaccagccccgccagcagcctgttcaacgacttcggcgccctgaacatcagccagagaagaaagacccccaaccccaccgccagcgagttcatccccaagggcggcagcaccagcagactgagcaacgtgagccagagcaacatgagcgccttcagccaggtgttcagccaccccagcatgggcagccccgccaccgccggcctggcccccggcatgagcctgagcgccggcagcagccccctgcacagccccaagatcaccccccacaccagccccgcccccagaagaagaagccacacccccaaccccgccagctacatggtgcccagcagcgccagcaccagcgtgaacaaccccgtgagccagacccccagcagcggccaggtgatccagaaggagaccgtgggcggcaccacctacttctacaccgacaccacccccgcccccctgaccggcatggtgttccccaactaccacatctacccccccaccgccccccacgtggcctacatgcagcccaaggccaacgcccccagcttcttcatggccgacgagctgagacaggagctgatcaacagacacctgatcaccatggcccagatcgaccaggccgacatgcccgccgtgcccaccgaggtggacagctaccacagcctgttccccctggagcccctgcccccccccaacagaatccagaagagcagcaacttcggctacatcaccagctgctacaaggccgtgaacagcaaggacgacctgccctactgcctgagaagaatccacggcttcagactggtgaacaccaagtgcatggtgctggtggacatgtggaagaagatccagcacagcaacatcgtgaccctgagagaggtgttcaccaccaaggccttcgccgagcccagcctggtgttcgcctacgacttccacgccggcggcgagaccatgatgagcagacacttcaacgaccccaacgccgacgcctacttcaccaagagaaagtggggccagcacgagggccccctgcccagacagcacgccggcctgctgcccgagagcctgatctgggcctacatcgtgcagctgagcagcgccctgagaaccatccacaccgccggcctggcctgcagagtgatggaccccaccaagatcctgatcaccggcaagaccagactgagagtgaactgcgtgggcgtgttcgacgtgctgaccttcgacaacagccagaacaacaaccccctggccctgatggcccagtaccagcaggccgacctgatcagcctgggcaaggtggtgctggccctggcctgcaacagcctggccggcatccagagagagaacctgcagaaggccatggagctggtgaccatcaactacagcagcgacctgaagaacctgatcctgtacctgctgaccgaccagaacagaatgagaagcgtgaacgacatcatgcccatgatcggcgccagattctacacccagctggacgccgcccagatgagaaacgacgtgatcgaggaggacctggccaaggaggtgcagaacggcagactgttcagactgctggccaagctgggcaccatcaacgagagacccgagttccagaaggaccccacctggagcgagaccggcgacagatacctgctgaagctgttcagagaccacctgttccaccaggtgaccgaggccggcgccccctggatcgacctgagccacatcatcagctgcctgaacaagctggacgccggcgtgcccgagaagatcagcctgatcagcagagacgagaagagcgtgctggtggtgacctacagcgacctgaagagatgcttcgagaacaccttccaggagctgatcgccgccgccaacggccagctgtag

SEQ ID NO: 279968 - DNA, 2064 bp, Artificial Sequence
  derived and/or modified sequence
atggatggcggcgcgctgacagatacctccctcaccgactcatacttcagcacttcctttatcggcgtgaacggctttgggtcccctgtggagacaaaataccctcttatgcagagaatgaccaattcttcatcatcaccctccctgctcaacgacagtgccaaaccctactctgctcacgaccccctcaccagccctgctagcagcctctttaatgatttcggcgccctgaatatctcacaacgcagaaagacacctaacccaaccgcctcagagtttatccccaaaggcggcagtacttctcgcctctctaatgtctcgcagagcaacatgtcagctttcagccaagtgttctctcacccatcaatggggtcaccggccaccgctggcttggctcctggtatgtctctgagtgcgggcagcagtcccttgcacagtcccaagatcacaccacatacaagtcccgccccgcgacgccggtctcatacgcctaaccctgccagttatatggttcccagttcagcatcaacatccgttaataatcctgtgagccagaccccgagctccggccaggtgatccagaaggaaacagtaggggggaccacgtacttctacactgacaccacccccgccccgctcactgggatggtcttcccaaattatcacatatatccacctacggcaccccacgtggcctacatgcagccaaaagccaatgccccctcattctttatggctgacgaactccggcaggaacttatcaatcgccatctgataactatggcccagattgaccaggccgatatgcctgccgttccaacagaggtggattcatatcactcattattccccctggaacctctcccgccccccaataggatacaaaaatccagtaactttggttacatcacctcgtgttacaaggctgtcaattccaaagacgatctgccctattgcctgcgccgcatacacgggtttcgacttgtgaataccaagtgtatggttctggtggatatgtggaaaaagattcagcacagcaatattgtcaccttgcgagaagtcttcacaactaaggccttcgccgaaccgtccttggtcttcgcttatgattttcacgcggggggggagacaatgatgtcccgccatttcaatgatccgaatgctgatgcatacttcacgaaacggaaatggggacagcatgaggggcccttgccacggcagcatgcaggactcttgccagagtccctaatctgggcttatattgtgcagctgagctcggcgttacgcacaatacacaccgctggcctggcatgtcgcgtaatggatcctacaaagatcctaattacaggtaagacccgcctgcgcgtgaattgcgtgggggtcttcgatgtactgacgttcgataatagccagaacaataacccgcttgccctgatggcccagtatcagcaagcagacctgatctctctcggcaaagttgttctggcattagcgtgtaactcgctggcaggaattcagagggagaatctgcagaaggccatggaactggtgaccattaactatagtagcgacctgaaaaacctcattctgtatctgctgacagatcaaaatcgcatgaggtccgttaacgatattatgccaatgatcggggcacgattctacacacagcttgatgctgcacagatgagaaatgacgtaattgaggaggatctcgctaaagaagtgcagaatggccggctgttcagattgctggctaaattgggcaccattaatgagcgacccgagttccagaaggatccgacttggtccgaaaccggcgaccgatacctgcttaagctgtttagagaccatctgtttcatcaggtcaccgaagctggcgccccctggattgatctgagccacattatttcctgcttgaataagcttgacgcgggcgtacctgagaaaatatccctaatctcccgcgacgaaaagagtgtcttagttgtgacctactctgacctcaaacgctgcttcgagaacaccttccaggaattgattgctgccgcgaacgggcagctgtag

SEQ ID NO: 279969 - DNA, 2064 bp, Artificial Sequence
  derived and/or modified sequence
atggatggaggagccctgacagacaccagcctgacagacagctacttcagcaccagcttcatcggcgtgaatggcttcggcagccctgtggagaccaagtaccccctgatgcagaggatgaccaacagcagcagcagccccagcctgctgaatgattctgccaagccctacagcgcccatgaccccctgaccagccctgccagcagcctcttcaatgactttggagccctgaacatcagccagaggaggaagacccccaaccccacagccagcgagttcatccccaagggcggcagcaccagccggctgagcaatgtgtcccagagcaacatgtctgccttcagccaggtgttcagccaccccagcatgggcagccctgccacagctggcctggcccctggcatgagcctgtctgctggcagcagccccctgcacagccccaagatcaccccccacaccagccctgcccccaggagaagaagccacacccccaacccagccagctacatggtgcccagcagcgccagcacctctgtgaacaaccctgtgtcccagacccccagcagcggccaggtgatccagaaggagaccgtgggcggcaccacctacttctacacagacaccaccccagcccccctgaccggcatggtgttccccaactaccacatctacccacccacagccccccacgtggcctacatgcagcccaaggccaatgcccccagcttcttcatggctgatgagctgcggcaggagctgatcaacagacacctgatcaccatggcccagattgaccaggccgacatgcctgctgtgcccacagaggtggacagctaccacagcctcttccccctggagcccctgcccccacccaaccgcatccagaagagcagcaactttggctacatcaccagctgctacaaggctgtgaacagcaaggatgacctgccctactgcctgcggcgcatccacggcttccggctggtgaacaccaagtgcatggtgctggtggacatgtggaagaagatccagcacagcaacatcgtgaccctgcgggaggtgttcaccaccaaggcctttgctgagcccagcctggtgtttgcctatgacttccacgccggcggggagaccatgatgagccgccacttcaatgaccccaatgctgatgcctacttcaccaagaggaagtggggccagcacgagggccccctgccccggcagcacgccggcctgctgcctgagagcctcatctgggcctacatcgtgcagctgagcagcgccctgcggaccatccacacagctggcctggcctgccgggtgatggaccccaccaagatcctgatcaccgggaagacccggctgcgggtgaactgtgtgggcgtgtttgatgtgctgacctttgacaacagccagaacaacaaccccctggccctgatggcccagtaccagcaggccgacctgatcagcctgggcaaggtggtgctggccctggcctgcaacagcctggccggcatccagcgggagaacctgcagaaggccatggagctggtgaccatcaactacagcagtgacctgaagaacctgatcctgtacctgctgacagaccagaacaggatgaggtctgtgaatgacatcatgcccatgattggagcccgcttctacacccagctggatgctgcccagatgagaaatgatgtgattgaggaggacctggccaaggaggtgcagaatggccgcctcttccggctgctggccaagctgggcaccatcaatgaaagacctgagttccagaaggaccccacctggagcgagactggagaccgctacctgctgaagctgttccgggaccacctgttccaccaggtgacagaagctggggccccctggattgacctgagccacatcatcagctgcctgaacaagctggatgctggggtgcctgagaagatcagcctcatcagcagagatgagaagtctgtgctggtggtgacctacagcgacctgaagcgctgctttgagaacaccttccaggagctgattgctgctgccaacggccagctgtag

SEQ ID NO: 279970 - DNA, 2064 bp, Artificial Sequence
  derived and/or modified sequence
atggacggcggcgccctgaccgacaccagcctgaccgacagctacttttccaccagtttcattggggtgaatggatttggttcccctgtcgagacaaagtatcccctgatgcagcggatgactaattcaagctcatctccctcactcctaaatgatagcgcaaagccttatagtgcgcacgacccccttacctctccagccagctcacttttcaatgacttcggtgccctcaatatcagccagcgccgaaagacacccaaccctaccgcctcggaattcataccaaagggtgggtccacgagtcggctctccaatgtcagccagtctaatatgtctgcattcagccaggtgttcagtcatccatccatgggaagtccggctaccgcaggactggcaccaggcatgtctttatccgctggcagctcgcctctccactctccaaaaattacgccccacacgagcccagctccgcgacgcagaagccacacacccaatcccgcctcttacatggtgcctagctcagcgagcacctccgttaacaacccagtgtctcagactcctagctccgggcaggtcattcagaaagagacagttggggggacaacctacttttacacagataccacccccgcaccgctgacaggtatggtattcccaaactatcacatctatccacccactgctccgcatgttgcttatatgcagcccaaggcaaacgccccatcctttttcatggcagatgaacttcgccaggaactcattaatcgccacctcatcactatggcgcagattgaccaggcagacatgcccgcggtccccactgaagtagacagctaccactcattattccccctggaaccactgccgccaccaaatagaatccagaaatcctcaaactttggctacatcacctcctgctacaaggccgtgaactccaaggacgatctgccttattgcttgcgtagaatccacggcttccgcctcgtgaacactaagtgcatggtgcttgttgatatgtggaagaaaattcagcacagtaacatcgttacgctgcgagaagtgttcaccactaaagcctttgccgagccttcactggttttcgcatacgattttcacgcaggcggggaaaccatgatgtctagacatttcaacgatcccaacgcagatgcttattttaccaaaaggaagtggggacaacacgaggggcccctccccagacagcacgccgggctgctgcccgagtcactgatctgggcttatatcgtgcagctctctagtgcattgagaactatacataccgccggcctcgcttgtagggtaatggacccgacgaaaatcctgatcacggggaaaactcgtctccgggtgaattgtgtgggggtattcgacgtacttacgtttgataacagccagaacaacaaccccctggcactcatggcacagtatcaacaggccgatctgattagtctagggaaggtcgttctggcgctggcatgcaacagtctggcagggatacagcgagagaacctgcaaaaggccatggaactggttaccataaattattcctcagacctgaagaatctcattctgtacctgttgaccgaccagaataggatgagatcggtgaatgacataatgcccatgataggagctcggttctatacacagctcgacgcagcgcagatgcgtaatgatgtcatcgaggaagatcttgcgaaagaagttcagaacggtcgcctattcagactgcttgctaaattaggcaccatcaacgagcggcccgagttccagaaagacccaacatggagcgaaactggcgatagataccttctgaagttatttcgggaccatctgttccatcaagtgacagaggcaggggctccctggatcgacttgtcacacattatcagctgcctcaacaaactagatgcaggagttccagaaaagatatcactcataagcagagatgagaagtcagtgctggtggttacctatagtgacctaaagcgctgttttgagaacactttccaggaattaatagccgccgccaatggacagctgtag

SEQ ID NO: 279971 - DNA, 4940 bp, Artificial Sequence
  derived and/or modified sequence
gccgcagccggcggaggaggcagtagcgggggactcgatggaccgcggctggcaattccaggaatggatggaggtgctttaactgatacaagtctcacagattcctattttagcaccagctttattggagtcaatggatttggaagccctgtagaaacaaaatatcccctgatgcagagaatgactaatagtagcagctccccaagccttctaaatgacagtgccaagccatattcagcccatgatcctctaacatcacctgcttcatccttgtttaatgactttggtgccctcaacatctctcagagacgaaagacaccaaatcctactgcaagcgagtttattcctaaaggaggatcaacctccaggctgagtaacgtgtcccagtcaaatatgtctgccttctctcaagttttctctcacccatccatgggaagccctgctactgctggattagcgccaggaatgtcgttgtctgctgggtcttcccctcttcattcccccaagattactccacatacttctcctgctcccagaagaagaagtcacactccaaatccagcaagttacatggtgccttctagtgcctctacatctgttaataatcctgtttctcagactccgtcttctggtcaggtgatccaaaaggaaactgttggtgggacgacttacttctatacagacacaactccagcacctttgactggaatggtgtttccaaactatcatatttatcctccaactgcacctcacgttgcttatatgcaaccgaaagcaaacgcaccttccttcttcatggctgatgaactccgacaggagctgatcaacagacatttaataacaatggctcaaattgatcaagcagatatgccagcagttcctacagaggttgacagctaccatagcctattccctctagaaccactgccacctcccaaccggatacagaaatcaagtaattttggatatattacatcttgctacaaagctgtaaacagcaaagatgatctgccatattgccttcggaggatacatggttttcgtcttgttaacacaaagtgcatggtgttggtcgacatgtggaagaaaattcaacactcaaatatcgtaactttgcgtgaagtatttaccactaaagcatttgctgagccctctcttgtgtttgcatatgatttccatgctggaggagaaactatgatgagcagacactttaatgaccctaatgctgatgcctacttcaccaagagaaagtggggtcagcacgagggaccattgcccaggcagcatgctggattattgccagaatctcttatttgggcatatattgtccaactaagttctgcattgcgtaccattcatacagcaggtttggcatgtcgagttatggatccaacaaagattctgataactggcaaaacaaggttgcgagtaaattgtgttggagtttttgatgttttaacatttgataacagtcaaaataataatccattggcattaatggcccagtaccagcaagcagatctgatatcattaggaaaagttgtgttggctttggcttgcaactctttggcaggaattcagcgagagaatttacagaaagccatggaactggtgacaatcaactattcctctgacctgaagaatctgattttgtatttgttgactgaccaaaacaggatgcgaagtgtaaatgacatcatgcccatgattggtgctcgattttatactcaattggatgctgctcaaatgagaaatgatgtcatagaggaagaccttgcaaaggaggttcaaaatggaagactgtttaggctcctagcaaaattgggaacaatcaatgagaggccggagtttcagaaggatcccacttggtcagagactggagaccgttatctgttgaaactctttagggatcatctttttcatcaggtgacagaagcaggtgctccctggattgacctcagtcatataatttcttgtcttaacaagctagatgctggtgtgccagaaaaaataagcctgatttccagagatgagaagagtgtacttgtggtgacctacagtgacttaaagcgctgctttgaaaatacttttcaagaactgattgcagctgcaaatggtcagttgtagtatttgctaaaaaagcacgcaggacatggctaaagaccttaaccaatagcaaattgcactacagctgaacttttcatcatctcattcacatttgggaaacgaacaggagatgagcaaagctgcttgcacttcagtcaggtacactgttacttgaaaggaagaatgtttcacttacccaagagctatggctgccattggaggctgttatctgtgaagaatttattttagatttaggagcaccatcaggtgaatgatgttcctgcttttgttttttccacttgtatatgcactaattttaattttttaaagactttttctgatctttgaacttttgccacattgtatacttataatgggaaactttgcaaggacatttttgggaagcaatgctgggcagcgtttttgccattgagggttgcagaatttgctctttttgggatgggttgccctgaataacattacggaccaggtaaataatttcatagaagttcagtatagtacgtaattcttgtaagagtatcgtatgcaagctctctgtatgccacccactgttagttcaaattgagatttttgttttgttttgttcttaagaacataccaagaaaataccagtgaattgttggatatgaattccctgttagttgatttaaatcctttctgaataaagatcagataaacagtaactgaaggagcatgtatagctctttccttcaaattcaactagagcctttttaaaaagacatttgcctgctagtcagatacatttacatttatgcaaattttttaaataggagaaaattaagaaattgtgttaaaggcctaaagttcaggagtgtattactttaggttctttccagtttgctggtttttttttttttttttttttttttttttgggcgggggggaggtttatgaagttttgctctttgaaccacagctttattatggtcctttacactggagacagacacagagacactgttcagaagatgaactaaactcagcagtggtctggtatcaagagctttctgatgttttacagcctgaatttggagggataacgatctgctgtgcctttgcagtcactgcttagcccaaagtaatagtacttttgataataactcactctgtgcgatattcctgaataagtccatctcaaaagtttgggattttcctcctcttaactttcttaatatttggacatgcagttgtcgccaaacttgggtattcatggaatttctagtaaatgaaatacctatactttgatactgaagactgccaaatacataggaattttctttcttaaaaaacagtaatgaagactatatctcctttcccagcactgaatgttttactagcactgggtgctcaccatgcaactgaagaaaatgtggaaactcaaaaggtcaggacagacttccaagcacttgcaactgatgttactgtcttcaattttaataattacacatatttgtatatttcagagaagtttttaatatttctctgtccactttttataagctttaaaatgattttctctgccttgagatttgcatcaagaaaaagcacctctcttcacctgaaagctttgaagactagagacacgctttacacgttttaacaagtatattgagtccacgtttggtagcatcagttgttgagttaaaaagaaaattattgcatttgatctggatggattttaaaagaatataatgttcaatattaaaaggataattcacatttgccaccataatgttcttttttatgtaaaaagaagaacttggagacattaacatgaaaaagtcttttatcattagctcatgtatttgaggaagagcagctgtctttttatatgttttttgacaaatcatattgtattcttttgtacaaaaaagaactacttgtattctagaagaaatatgaaatgcttaatttataagcgggctggagattttttccaatattgttttctttgaaaatgaaaggggatcatctattttagttttggggtctgggaactttttgaaaatttaatttgtggaccaatgttttgtgaaagctaaagagggcaggggttaaaatagggcttgaatttctcattctgtatagaccagcaaacttccctgtgcaaggcaagtttacatcacaaatccaagaatgtttgcatcctaaatgctagtttgcttcagcccctagttaacctcaggacttggtttgcatataaaaggtagacagctgatatgttttcatgaataaatattgtcagccagaaaaggttggtgtcaggtaatgcatatttttttaagctttgttttatatttatttttcatttagtttttattgggaatggttttcaaagaactctcagttctgcctaggtgtttttgggggagccctgttttccatagtgtaattccatttaagaggttgtctaaaagtctttttaattaatagaaagattttaatatccaagagtagtcaaattaaggatataaactttccacaccttcctgtcgtgacagataaaagcacagaaaggacaacccttgaaatcatgtaacgttggtcatttcaatattttgtacctgttttaaattctgttagtgtatttacttcattgtaaatatttttgagggtacctttgtattttgcttttgaccttggttctgtgatttggatgtcaacaacttccctaaaaagcaccagtgtgttaggttctaatgtcatgacccaatttgtgttattcatctttaatcctgttttcagtctctatgtgtacagcagtatttttaataaagaattacagagataaa

SEQ ID NO: 279972 - DNA, 2064 bp, Artificial Sequence
  derived and/or modified sequence
atggacggtggcgctctaacagacacctccctgactgattcctatttcagcacctccttcattggggtgaatggtttcggaagtcctgtcgagactaaatatcccttaatgcagagaatgacaaactccagtagtagccccagcctattgaatgacagtgctaagccttactctgcccacgatcccctgacgagtccggcatcctccctgttcaatgatttcggagccctcaacattagtcagaggcgaaagactcctaatccaaccgcatcagaattcatccccaaaggcggatcaacaagccgcctcagcaacgtctctcagtccaacatgtctgccttcagccaagtgttcagccacccctcaatgggatctccggcaaccgctggtctggcgccaggcatgtctctgtcagcgggaagttccccactccattctccaaagatcacacctcacacatcccccgctccgagaagacgatcccataccccaaaccccgcatcatacatggtgccaagctctgcttctacctctgtgaataatcccgtcagtcaaaccccttcctctggtcaggtcatacagaaggagacggtgggaggaaccacctacttctataccgataccacaccagcgcctttgaccggcatggtgttccctaattaccatatttatccacccacagctcctcatgtggcctatatgcaaccaaaagcgaacgccccttccttcttcatggcagacgagttgcgccaagagctcattaaccgtcatctgataaccatggcacagatagaccaggccgatatgcccgcagtcccgaccgaagtcgatagctaccattccctgtttcccttggaacctctgccgccacctaacaggatccagaagtcctcaaattttggctatatcacctcctgctataaagccgtgaactccaaggatgatttaccatactgtttgcgcaggattcatgggtttaggctggtgaacaccaagtgtatggtgctggtggacatgtggaaaaaaatacagcacagtaacattgtgacattaagagaggttttcaccacgaaggccttcgcggagccctccctggtctttgcctacgacttccacgccggaggggaaacaatgatgagtaggcattttaatgaccctaatgcggatgcttactttaccaagcgcaaatggggccagcacgaaggccctctcccaaggcagcatgcgggactgctgcccgagagcctcatctgggcttatatcgtgcagttgagcagtgcactcaggaccatccataccgccggactggcttgccgagtgatggaccctaccaagatcctgattaccggtaagacccgccttcgagtgaactgtgtgggcgtcttcgatgtcctaaccttcgataattcacaaaataataatccgctggcacttatggcccagtaccagcaggctgacctaataagccttggtaaggtggtcttagcactcgcatgcaatagcctagctggaatacaacgagagaacctacaaaaggccatggagctggtaacaattaattatagttcggatctgaaaaacctaatcttgtatttgttgacagatcagaataggatgcggagcgttaacgatattatgcccatgatcggtgcccgtttttacacgcaacttgatgctgctcagatgaggaacgacgttattgaggaagatcttgcaaaggaagtgcagaatggacgtctgtttcgcctactcgcaaagctcggtacaatcaatgagcgacctgagttccagaaagatcctacctggtccgagactggagacagataccttcttaagctgtttagagaccatctgttccaccaagtcaccgaggcaggcgcaccatggatagatctgtcccatatcatctcatgcttgaataagctagatgctggagtgccggaaaaaataagcctcatttccagagatgagaagtccgtgctggtggtaacttatagcgacctgaagcgctgctttgaaaacacatttcaggagttaatagcagccgctaatgggcagctgtag

SEQ ID NO: 279973 - protein, 575 aa, Artificial Sequence
  derived and/or modified sequence
MKLTDSTKGWIVWAALDSSMRGMSLSAGSSPLHSPKITPHTSPAPRRRSHTPNPASYMVPSSASTSVNNPVSQTPSSGQVIQKETVGGTTYFYTDTTPAPLTGMVFPNYHIYPPTAPHVAYMQPKANAPSFFMADELRQELINRHLITMAQIDQADMPAVPTEVDSYHSLFPLEPLPPPNRIQKSSNFGYITSCYKAVNSKDDLPYCLRRIHGFRLVNTKCMVLVDMWKKIQHSNIVTLREVFTTKAFAEPSLVFAYDFHAGGETMMSRHFNDPNADAYFTKRKWGQHEGPLPRQHAGLLPESLIWAYIVQLSSALRTIHTAGLACRVMDPTKILITGKTRLRVNCVGVFDVLTFDNSQNNNPLALMAQYQQADLISLGKVVLALACNSLAGIQRENLQKAMELVTINYSSDLKNLILYLLTDQNRMRSVNDIMPMIGARFYTQLDAAQMRNDVIEEDLAKEVQNGRLFRLLAKLGTINERPEFQKDPTWSETGDRYLLKLFRDHLFHQVTEAGAPWIDLSHIISCLNKLDAGVPEKISLISRDEKSVLVVTYSDLKRCFENTFQELIAAANGQL

SEQ ID NO: 279974 - DNA, 1728 bp, Artificial Sequence
  derived and/or modified sequence
atgaagctgacagactccactaaaggttggatagtctgggctgccctcgacagcagcatgaggggcatgtctcttagcgcaggatcatctcccctgcactcccccaaaatcacaccacacacgagcccggcaccacggaggcggtcccataccccaaatcccgcctcctacatggtgccatcatctgccagtacatccgtgaataatccagtgagccaaaccccctccagtggccaggtgatccagaaggagacggtgggcgggacgacatatttctacactgatactacaccggctcccctgacgggtatggtgtttcccaactatcacatttatcctcctactgctccccacgtcgcttacatgcagcccaaagctaatgcccccagcttctttatggccgatgagcttcgccaggaactgatcaataggcacctgatcacaatggcacagattgaccaggctgacatgccagctgtaccaaccgaagtggactcctatcactccctcttccctctagagccgctacctccacccaaccgcatccagaaatcctccaacttcggctacattacctcctgttacaaagctgtgaactcaaaagacgatcttccatactgtttgagacggattcacggctttcgcctggtcaacaccaaatgcatggttctcgtcgacatgtggaaaaaaatccagcactctaacattgtgaccttgcgtgaggtatttacaaccaaggctttcgctgaaccatctttagtgtttgcctatgattttcatgccggcggagaaaccatgatgtcacgccactttaacgacccaaatgctgatgcctattttaccaaacggaagtggggacagcacgagggtcctctgcccagacagcacgcaggactgcttcccgagagcctaatttgggcctatattgttcagctatcaagcgccctgagaacaatccatactgcagggctggcatgcagagtgatggatcctacaaagattttgataacaggaaagacccgccttcgtgttaattgcgttggtgtctttgacgtgttaacgttcgacaactcccagaataataatccgttagcactgatggctcagtatcaacaggcagacctcatctcactgggcaaagttgtgctggcactggcctgtaactctctggctgggatacaacgggaaaatcttcagaaagccatggaattagtgactataaactactcttctgatctgaagaatctgatactttacctgttaaccgaccagaatcgcatgcgctccgtaaacgatattatgcctatgattggtgcaagattttatacccagctggatgcggcgcaaatgcggaacgacgtgattgaggaggacctagccaaagaggtgcagaatgggagattattccggttactggcgaaactgggaacaataaatgagagacctgaatttcagaaggatcctacatggtctgagaccggcgaccggtatctcctgaaattgttccgcgaccatctcttccatcaggttaccgaggctggtgcaccatggatcgatctgtcacacattattagttgtcttaacaaacttgacgcgggagtccccgagaaaatcagtctgattagtcgcgatgagaagtctgtgcttgttgttacctactccgacctaaaacgctgttttgaaaacacatttcaggagctgatcgcggctgcaaacggacaattatag

SEQ ID NO: 279975 - DNA, 1728 bp, Artificial Sequence
  derived and/or modified sequence
atgaagctgacagacagcaccaagggctggatcgtgtgggccgccctggacagctccatgaggggcatgagcctgtctgctggcagcagccccctgcacagccccaagatcaccccccacaccagccctgcccccaggagaagaagccacacccccaacccagccagctacatggtgcccagcagcgccagcacctctgtgaacaaccctgtgtcccagacccccagcagcggccaggtgatccagaaggagaccgtgggcggcaccacctacttctacacagacaccaccccagcccccctgaccggcatggtgttccccaactaccacatctacccacccacagccccccacgtggcctacatgcagcccaaggccaatgcccccagcttcttcatggctgatgagctgcggcaggagctgatcaacagacacctgatcaccatggcccagattgaccaggccgacatgcctgctgtgcccacagaggtggacagctaccacagcctcttccccctggagcccctgcccccacccaaccgcatccagaagagcagcaactttggctacatcaccagctgctacaaggctgtgaacagcaaggatgacctgccctactgcctgcggcgcatccacggcttccggctggtgaacaccaagtgcatggtgctggtggacatgtggaagaagatccagcacagcaacatcgtgaccctgcgggaggtgttcaccaccaaggcctttgctgagcccagcctggtgtttgcctatgacttccacgccggcggggagaccatgatgagccgccacttcaatgaccccaatgctgatgcctacttcaccaagaggaagtggggccagcacgagggccccctgccccggcagcacgccggcctgctgcctgagagcctcatctgggcctacatcgtgcagctgagcagcgccctgcggaccatccacacagctggcctggcctgccgggtgatggaccccaccaagatcctgatcaccgggaagacccggctgcgggtgaactgtgtgggcgtgtttgatgtgctgacctttgacaacagccagaacaacaaccccctggccctgatggcccagtaccagcaggccgacctgatcagcctgggcaaggtggtgctggccctggcctgcaacagcctggccggcatccagcgggagaacctgcagaaggccatggagctggtgaccatcaactacagcagtgacctgaagaacctgatcctgtacctgctgacagaccagaacaggatgaggtctgtgaatgacatcatgcccatgattggagcccgcttctacacccagctggatgctgcccagatgagaaatgatgtgattgaggaggacctggccaaggaggtgcagaatggccgcctcttccggctgctggccaagctgggcaccatcaatgaaagacctgagttccagaaggaccccacctggagcgagactggagaccgctacctgctgaagctgttccgggaccacctgttccaccaggtgacagaagctggggccccctggattgacctgagccacatcatcagctgcctgaacaagctggatgctggggtgcctgagaagatcagcctcatcagcagagatgagaagtctgtgctggtggtgacctacagcgacctgaagcgctgctttgagaacaccttccaggagctgattgctgctgccaacggccagctgtag

SEQ ID NO: 279976 - DNA, 1728 bp, Artificial Sequence
  derived and/or modified sequence
atgaagctgaccgacagcaccaagggctggatcgtgtgggccgccctggatagttctatgcgcgggatgagcctgtctgcaggatctagccccctccactccccaaaaatcacacctcatacatccccagcccctcggcgccgctcacacaccccaaatcccgcctcctacatggtcccttcctctgcaagtactagcgtaaacaacccggtatcccagactcccagctctggtcaggttattcagaaggagacagtgggaggcaccacctatttttacaccgacacaacacccgctcctttgaccgggatggtgttccccaactatcacatatatccacccaccgcaccccacgtggcatatatgcagcccaaagcaaacgcgccctcattctttatggccgatgagctgcggcaggagttgattaaccggcacctcatcacaatggcacaaatagaccaagcagatatgccagcggtgcctaccgaggtggattcttaccatagtttattcccactggagcctctcccgccgcctaaccgcatccagaagtcaagtaatttcgggtacataacttcctgttacaaagctgttaatagcaaagatgatcttccttactgcctgcgacgcattcacgggtttcgcttagtgaacacaaagtgcatggtgcttgtggacatgtggaaaaaaattcagcatagcaacatagtgaccctcagagaggtgttcacaacgaaagccttcgctgagcccagcctagttttcgcttacgacttccacgcaggcggggagaccatgatgtcccgacatttcaacgaccccaacgcagatgcgtactttactaagagaaaatgggggcagcacgaagggccactaccgcggcagcatgccggactactgccagagtccctgatctgggcctacatcgttcaactgtcaagtgcattgagaacaatccatactgccggattggcttgcagggtgatggatccaactaagattcttatcaccggtaagaccagattgcgcgtcaactgtgtcggcgtgttcgatgtactgactttcgacaactcccagaacaataaccccctagcccttatggcgcagtatcaacaggcagacctgattagtctcgggaaggtggtgcttgcactcgcatgcaacagcttggccggcattcaaagagagaatttgcagaaagcaatggagctggttacaattaactacagctctgatttgaagaacttaattctctacctactgactgatcagaaccgaatgagaagcgtcaatgatatcatgcctatgataggcgctcgtttttacacgcagctggatgcagcccagatgagaaacgacgtaatagaggaggatctcgccaaggaggtgcagaacgggaggctgtttcggctcctagcgaaactgggtacgattaacgaaaggcctgaattccagaaagacccaacctggtctgagacgggcgaccggtatctgcttaaactgtttcgggaccatctgttccaccaggtcactgaagcaggggctccctggattgatttgtcccatatcatatcttgcctgaacaagctggatgctggagtgcccgagaagatctcactcatttcccgggatgagaagtcagtcttagtcgtgacatatagtgacctaaagcgatgcttcgaaaacacatttcaggagctgattgcagctgccaacggacaattatag

SEQ ID NO: 279977 - DNA, 1728 bp, Artificial Sequence
  derived and/or modified sequence
atgaaactcaccgattcaaccaaaggctggattgtgtgggcggcactcgactcctccatgcgcggaatgagtctcagtgcagggtcaagccctttgcacagtcctaagataacaccccacaccagcccagctcctaggagaagatcacacactcctaatccagcaagctacatggtccccagctccgccagtacctcagtgaataatcccgtatctcagaccccgagctcaggccaggttattcagaaggagacagtgggcggaactacctacttttacacagatacaactcccgcaccactgactgggatggtgtttcccaattaccacatttacccgcctacggcccctcatgtagcttatatgcagcccaaggcaaacgcaccctctttctttatggcggatgagttgagacaagaattgatcaaccggcacctgattactatggcacagatcgatcaggctgacatgccagctgtacccaccgaagtagatagctatcactccctgtttcccctagaacctctcccccctcctaaccgaattcagaagtcctctaattttggctacatcacgtcatgttacaaggctgtgaactccaaggatgatctcccgtattgcctgcgacgcattcatggattccggttggtgaatacgaaatgtatggtcctggtcgatatgtggaaaaaaattcagcattcaaacatcgtgaccctgagagaggtgttcactacaaaggcatttgccgaaccctccctggtctttgcttacgatttccacgccggaggcgagaccatgatgagccgccactttaacgaccctaacgctgatgcctatttcaccaagcgcaagtggggacagcacgaagggccattgcctcgccaacacgccggactgctgcctgagtcgcttatctgggcttatattgtgcagctgtcaagtgccttgcgcacaatccatacagcgggacttgcctgcagggtaatggaccctactaagatactaatcacagggaagaccaggctgcgtgtgaattgcgtaggagtcttcgatgtgcttacatttgataattcacagaataataatcctctcgctctgatggctcagtatcaacaggccgacttgatttccttgggcaaggtagtcttggcattggcgtgtaactctctcgccggtatccaaagggagaacctgcagaaggccatggaacttgtgacgatcaattattcttcagacctcaagaatctgatcctgtatctactgacagaccaaaatcgcatgaggtctgtcaatgatataatgcccatgatcggcgcacgattctatactcagctggacgcagctcagatgcggaatgacgtaattgaagaggacctcgccaaggaagtccaaaatggacgactattccgtctgctggcgaaattggggactattaacgaaaggcccgagttccagaaagatcctacgtggtccgaaacaggagataggtacttgcttaagctgttcagagaccatctatttcatcaggtcactgaggcaggagctccttggatcgatttgtcccatattattagttgcttgaacaaactagatgccggagtacccgagaaaatttcactcatcagcagagacgagaagagcgtgcttgtagtcacatattctgacctaaaacggtgcttcgagaacacctttcaagaactcattgcagccgctaatgggcagctatag

SEQ ID NO: 279978 - DNA, 4544 bp, Artificial Sequence
  derived and/or modified sequence
atgaaactgactgattcgactaaaggatggatagtttgggcagcgttggacagctctatgaggggaatgtcgttgtctgctgggtcttcccctcttcattcccccaagattactccacatacttctcctgctcccagaagaagaagtcacactccaaatccagcaagttacatggtgccttctagtgcctctacatctgttaataatcctgtttctcagactccgtcttctggtcaggtgatccaaaaggaaactgttggtgggacgacttacttctatacagacacaactccagcacctttgactggaatggtgtttccaaactatcatatttatcctccaactgcacctcacgttgcttatatgcaaccgaaagcaaacgcaccttccttcttcatggctgatgaactccgacaggagctgatcaacagacatttaataacaatggctcaaattgatcaagcagatatgccagcagttcctacagaggttgacagctaccatagcctattccctctagaaccactgccacctcccaaccggatacagaaatcaagtaattttggatatattacatcttgctacaaagctgtaaacagcaaagatgatctgccatattgccttcggaggatacatggttttcgtcttgttaacacaaagtgcatggtgttggtcgacatgtggaagaaaattcaacactcaaatatcgtaactttgcgtgaagtatttaccactaaagcatttgctgagccctctcttgtgtttgcatatgatttccatgctggaggagaaactatgatgagcagacactttaatgaccctaatgctgatgcctacttcaccaagagaaagtggggtcagcacgagggaccattgcccaggcagcatgctggattattgccagaatctcttatttgggcatatattgtccaactaagttctgcattgcgtaccattcatacagcaggtttggcatgtcgagttatggatccaacaaagattctgataactggcaaaacaaggttgcgagtaaattgtgttggagtttttgatgttttaacatttgataacagtcaaaataataatccattggcattaatggcccagtaccagcaagcagatctgatatcattaggaaaagttgtgttggctttggcttgcaactctttggcaggaattcagcgagagaatttacagaaagccatggaactggtgacaatcaactattcctctgacctgaagaatctgattttgtatttgttgactgaccaaaacaggatgcgaagtgtaaatgacatcatgcccatgattggtgctcgattttatactcaattggatgctgctcaaatgagaaatgatgtcatagaggaagaccttgcaaaggaggttcaaaatggaagactgtttaggctcctagcaaaattgggaacaatcaatgagaggccggagtttcagaaggatcccacttggtcagagactggagaccgttatctgttgaaactctttagggatcatctttttcatcaggtgacagaagcaggtgctccctggattgacctcagtcatataatttcttgtcttaacaagctagatgctggtgtgccagaaaaaataagcctgatttccagagatgagaagagtgtacttgtggtgacctacagtgacttaaagcgctgctttgaaaatacttttcaagaactgattgcagctgcaaatggtcagttgtagtatttgctaaaaaagcacgcaggacatggctaaagaccttaaccaatagcaaattgcactacagctgaacttttcatcatctcattcacatttgggaaacgaacaggagatgagcaaagctgcttgcacttcagtcaggtacactgttacttgaaaggaagaatgtttcacttacccaagagctatggctgccattggaggctgttatctgtgaagaatttattttagatttaggagcaccatcaggtgaatgatgttcctgcttttgttttttccacttgtatatgcactaattttaattttttaaagactttttctgatctttgaacttttgccacattgtatacttataatgggaaactttgcaaggacatttttgggaagcaatgctgggcagcgtttttgccattgagggttgcagaatttgctctttttgggatgggttgccctgaataacattacggaccaggtaaataatttcatagaagttcagtatagtacgtaattcttgtaagagtatcgtatgcaagctctctgtatgccacccactgttagttcaaattgagatttttgttttgttttgttcttaagaacataccaagaaaataccagtgaattgttggatatgaattccctgttagttgatttaaatcctttctgaataaagatcagataaacagtaactgaaggagcatgtatagctctttccttcaaattcaactagagcctttttaaaaagacatttgcctgctagtcagatacatttacatttatgcaaattttttaaataggagaaaattaagaaattgtgttaaaggcctaaagttcaggagtgtattactttaggttctttccagtttgctggtttttttttttttttttttttttttttttgggcgggggggaggtttatgaagttttgctctttgaaccacagctttattatggtcctttacactggagacagacacagagacactgttcagaagatgaactaaactcagcagtggtctggtatcaagagctttctgatgttttacagcctgaatttggagggataacgatctgctgtgcctttgcagtcactgcttagcccaaagtaatagtacttttgataataactcactctgtgcgatattcctgaataagtccatctcaaaagtttgggattttcctcctcttaactttcttaatatttggacatgcagttgtcgccaaacttgggtattcatggaatttctagtaaatgaaatacctatactttgatactgaagactgccaaatacataggaattttctttcttaaaaaacagtaatgaagactatatctcctttcccagcactgaatgttttactagcactgggtgctcaccatgcaactgaagaaaatgtggaaactcaaaaggtcaggacagacttccaagcacttgcaactgatgttactgtcttcaattttaataattacacatatttgtatatttcagagaagtttttaatatttctctgtccactttttataagctttaaaatgattttctctgccttgagatttgcatcaagaaaaagcacctctcttcacctgaaagctttgaagactagagacacgctttacacgttttaacaagtatattgagtccacgtttggtagcatcagttgttgagttaaaaagaaaattattgcatttgatctggatggattttaaaagaatataatgttcaatattaaaaggataattcacatttgccaccataatgttcttttttatgtaaaaagaagaacttggagacattaacatgaaaaagtcttttatcattagctcatgtatttgaggaagagcagctgtctttttatatgttttttgacaaatcatattgtattcttttgtacaaaaaagaactacttgtattctagaagaaatatgaaatgcttaatttataagcgggctggagattttttccaatattgttttctttgaaaatgaaaggggatcatctattttagttttggggtctgggaactttttgaaaatttaatttgtggaccaatgttttgtgaaagctaaagagggcaggggttaaaatagggcttgaatttctcattctgtatagaccagcaaacttccctgtgcaaggcaagtttacatcacaaatccaagaatgtttgcatcctaaatgctagtttgcttcagcccctagttaacctcaggacttggtttgcatataaaaggtagacagctgatatgttttcatgaataaatattgtcagccagaaaaggttggtgtcaggtaatgcatatttttttaagctttgttttatatttatttttcatttagtttttattgggaatggttttcaaagaactctcagttctgcctaggtgtttttgggggagccctgttttccatagtgtaattccatttaagaggttgtctaaaagtctttttaattaatagaaagattttaatatccaagagtagtcaaattaaggatataaactttccacaccttcctgtcgtgacagataaaagcacagaaaggacaacccttgaaatcatgtaacgttggtcatttcaatattttgtacctgttttaaattctgttagtgtatttacttcattgtaaatatttttgagggtacctttgtattttgcttttgaccttggttctgtgatttggatgtcaacaacttccctaaaaagcaccagtgtgttaggttctaatgtcatgacccaatttgtgttattcatctttaatcctgttttcagtctctatgtgtacagcagtatttttaataaagaattacagagataaattt

SEQ ID NO: 279979 - DNA, 1728 bp, Artificial Sequence
  derived and/or modified sequence
atgaagctgaccgacagcaccaagggctggatcgtgtgggccgccctggacagcagcatgagaggcatgagcctgagcgccggcagcagccccctgcacagccccaagatcaccccccacaccagccccgcccccagaagaagaagccacacccccaaccccgccagctacatggtgcccagcagcgccagcaccagcgtgaacaaccccgtgagccagacccccagcagcggccaggtgatccagaaggagaccgtgggcggcaccacctacttctacaccgacaccacccccgcccccctgaccggcatggtgttccccaactaccacatctacccccccaccgccccccacgtggcctacatgcagcccaaggccaacgcccccagcttcttcatggccgacgagctgagacaggagctgatcaacagacacctgatcaccatggcccagatcgaccaggccgacatgcccgccgtgcccaccgaggtggacagctaccacagcctgttccccctggagcccctgcccccccccaacagaatccagaagagcagcaacttcggctacatcaccagctgctacaaggccgtgaacagcaaggacgacctgccctactgcctgagaagaatccacggcttcagactggtgaacaccaagtgcatggtgctggtggacatgtggaagaagatccagcacagcaacatcgtgaccctgagagaggtgttcaccaccaaggccttcgccgagcccagcctggtgttcgcctacgacttccacgccggcggcgagaccatgatgagcagacacttcaacgaccccaacgccgacgcctacttcaccaagagaaagtggggccagcacgagggccccctgcccagacagcacgccggcctgctgcccgagagcctgatctgggcctacatcgtgcagctgagcagcgccctgagaaccatccacaccgccggcctggcctgcagagtgatggaccccaccaagatcctgatcaccggcaagaccagactgagagtgaactgcgtgggcgtgttcgacgtgctgaccttcgacaacagccagaacaacaaccccctggccctgatggcccagtaccagcaggccgacctgatcagcctgggcaaggtggtgctggccctggcctgcaacagcctggccggcatccagagagagaacctgcagaaggccatggagctggtgaccatcaactacagcagcgacctgaagaacctgatcctgtacctgctgaccgaccagaacagaatgagaagcgtgaacgacatcatgcccatgatcggcgccagattctacacccagctggacgccgcccagatgagaaacgacgtgatcgaggaggacctggccaaggaggtgcagaacggcagactgttcagactgctggccaagctgggcaccatcaacgagagacccgagttccagaaggaccccacctggagcgagaccggcgacagatacctgctgaagctgttcagagaccacctgttccaccaggtgaccgaggccggcgccccctggatcgacctgagccacatcatcagctgcctgaacaagctggacgccggcgtgcccgagaagatcagcctgatcagcagagacgagaagagcgtgctggtggtgacctacagcgacctgaagagatgcttcgagaacaccttccaggagctgatcgccgccgccaacggccagctgtag

SEQ ID NO: 279980 - protein, 1088 aa, Artificial Sequence
  derived and/or modified sequence
MRPKTFPATTYSGNSRQRLQEIREGLKQPSKSSVQGLPAGPNSDTSLDAKVLGSKDATRQQQQMRATPKFGPYQKALREIRYSLLPFANESGTSAAAEVNRQMLQELVNAGCDQEMAGRALKQTGSRSIEAALEYISKMGYLDPRNEQIVRVIKQTSPGKGLMPTPVTRRPSFEGTGDSFASYHQLSGTPYEGPSFGADGPTALEEMPRPYVDYLFPGVGPHGPGHQHQHPPKGYGASVEAAGAHFPLQGAHYGRPHLLVPGEPLGYGVQRSPSFQSKTPPETGGYASLPTKGQGGPPGAGLAFPPPAAGLYVPHPHHKQAGPAAHQLHVLGSRSQVFASDSPPQSLLTPSRNSLNVDLYELGSTSVQQWPAATLARRDSLQKPGLEAPPRAHVAFRPDCPVPSRTNSFNSHQPRPGPPGKAEPSLPAPNTVTAVTAAHILHPVKSVRVLRPEPQTAVGPSHPAWVPAPAPAPAPAPAPAAEGLDAKEEHALALGGAGAFPLDVEYGGPDRRCPPPPYPKHLLLRSKSEQYDLDSLCAGMEQSLRAGPNEPEGGDKSRKSAKGDKGGKDKKQIQTSPVPVRKNSRDEEKRESRIKSYSPYAFKFFMEQHVENVIKTYQQKVNRRLQLEQEMAKAGLCEAEQEQMRKILYQKESNYNRLKRAKMDKSMFVKIKTLGIGAFGEVCLACKVDTHALYAMKTLRKKDVLNRNQVAHVKAERDILAEADNEWVVKLYYSFQDKDSLYFVMDYIPGGDMMSLLIRMEVFPEHLARFYIAELTLAIESVHKMGFIHRDIKPDNILIDLDGHIKLTDFGLCTGFRWTHNSKYYQKGSHVRQDSMEPSDLWDDVSNCRCGDRLKTLEQRARKQHQRCLAHSLVGTPNYIAPEVLLRKGYTQLCDWWSVGVILFEMLVGQPPFLAPTPTETQLKVINWENTLHIPAQVKLSPEARDLITKLCCSADHRLGRNGADDLKAHPFFSAIDFSSDIRKQPAPYVPTISHPMDTSNFDPVDEESPWNDASEGSTKAWDTLTSPNNKHPEHAFYEFTFRRFFDDNGYPFRCPKPSGAEASQAESSDLESSDLVDQTEGCQPVYV

SEQ ID NO: 279981 - DNA, 3267 bp, Artificial Sequence
  derived and/or modified sequence
atgagacccaagaccttccccgccaccacctacagcggcaacagcagacagagactgcaggagatcagagagggcctgaagcagcccagcaagagcagcgtgcagggcctgcccgccggccccaacagcgacaccagcctggacgccaaggtgctgggcagcaaggacgccaccagacagcagcagcagatgagagccacccccaagttcggcccctaccagaaggccctgagagagatcagatacagcctgctgcccttcgccaacgagagcggcaccagcgccgccgccgaggtgaacagacagatgctgcaggagctggtgaacgccggctgcgaccaggagatggccggcagagccctgaagcagaccggcagcagaagcatcgaggccgccctggagtacatcagcaagatgggctacctggaccccagaaacgagcagatcgtgagagtgatcaagcagaccagccccggcaagggcctgatgcccacccccgtgaccagaagacccagcttcgagggcaccggcgacagcttcgccagctaccaccagctgagcggcaccccctacgagggccccagcttcggcgccgacggccccaccgccctggaggagatgcccagaccctacgtggactacctgttccccggcgtgggcccccacggccccggccaccagcaccagcacccccccaagggctacggcgccagcgtggaggccgccggcgcccacttccccctgcagggcgcccactacggcagaccccacctgctggtgcccggcgagcccctgggctacggcgtgcagagaagccccagcttccagagcaagaccccccccgagaccggcggctacgccagcctgcccaccaagggccagggcggcccccccggcgccggcctggccttccccccccccgccgccggcctgtacgtgccccacccccaccacaagcaggccggccccgccgcccaccagctgcacgtgctgggcagcagaagccaggtgttcgccagcgacagccccccccagagcctgctgacccccagcagaaacagcctgaacgtggacctgtacgagctgggcagcaccagcgtgcagcagtggcccgccgccaccctggccagaagagacagcctgcagaagcccggcctggaggccccccccagagcccacgtggccttcagacccgactgccccgtgcccagcagaaccaacagcttcaacagccaccagcccagacccggcccccccggcaaggccgagcccagcctgcccgcccccaacaccgtgaccgccgtgaccgccgcccacatcctgcaccccgtgaagagcgtgagagtgctgagacccgagccccagaccgccgtgggccccagccaccccgcctgggtgcccgcccccgcccccgcccccgcccccgcccccgcccccgccgccgagggcctggacgccaaggaggagcacgccctggccctgggcggcgccggcgccttccccctggacgtggagtacggcggccccgacagaagatgccccccccccccctaccccaagcacctgctgctgagaagcaagagcgagcagtacgacctggacagcctgtgcgccggcatggagcagagcctgagagccggccccaacgagcccgagggcggcgacaagagcagaaagagcgccaagggcgacaagggcggcaaggacaagaagcagatccagaccagccccgtgcccgtgagaaagaacagcagagacgaggagaagagagagagcagaatcaagagctacagcccctacgccttcaagttcttcatggagcagcacgtggagaacgtgatcaagacctaccagcagaaggtgaacagaagactgcagctggagcaggagatggccaaggccggcctgtgcgaggccgagcaggagcagatgagaaagatcctgtaccagaaggagagcaactacaacagactgaagagagccaagatggacaagagcatgttcgtgaagatcaagaccctgggcatcggcgccttcggcgaggtgtgcctggcctgcaaggtggacacccacgccctgtacgccatgaagaccctgagaaagaaggacgtgctgaacagaaaccaggtggcccacgtgaaggccgagagagacatcctggccgaggccgacaacgagtgggtggtgaagctgtactacagcttccaggacaaggacagcctgtacttcgtgatggactacatccccggcggcgacatgatgagcctgctgatcagaatggaggtgttccccgagcacctggccagattctacatcgccgagctgaccctggccatcgagagcgtgcacaagatgggcttcatccacagagacatcaagcccgacaacatcctgatcgacctggacggccacatcaagctgaccgacttcggcctgtgcaccggcttcagatggacccacaacagcaagtactaccagaagggcagccacgtgagacaggacagcatggagcccagcgacctgtgggacgacgtgagcaactgcagatgcggcgacagactgaagaccctggagcagagagccagaaagcagcaccagagatgcctggcccacagcctggtgggcacccccaactacatcgcccccgaggtgctgctgagaaagggctacacccagctgtgcgactggtggagcgtgggcgtgatcctgttcgagatgctggtgggccagccccccttcctggcccccacccccaccgagacccagctgaaggtgatcaactgggagaacaccctgcacatccccgcccaggtgaagctgagccccgaggccagagacctgatcaccaagctgtgctgcagcgccgaccacagactgggcagaaacggcgccgacgacctgaaggcccaccccttcttcagcgccatcgacttcagcagcgacatcagaaagcagcccgccccctacgtgcccaccatcagccaccccatggacaccagcaacttcgaccccgtggacgaggagagcccctggaacgacgccagcgagggcagcaccaaggcctgggacaccctgaccagccccaacaacaagcaccccgagcacgccttctacgagttcaccttcagaagattcttcgacgacaacggctaccccttcagatgccccaagcccagcggcgccgaggccagccaggccgagagcagcgacctggagagcagcgacctggtggaccagaccgagggctgccagcccgtgtacgtgtag

SEQ ID NO: 279982 - DNA, 3267 bp, Artificial Sequence
  derived and/or modified sequence
atgcgtccaaaaacctttccggcaaccacctacagcggcaactctcggcaacgcctgcaggagataagggaaggcttaaagcagccctccaagtcaagcgtccagggactcccggctgggccaaattccgacacgtcactagacgcaaaggtattgggttcgaaggacgctacgagacagcaacagcagatgcgtgcaacacccaagttcggaccctatcagaaggcgcttcgcgagatccgatacagtctcctccctttcgcaaacgagtctggcacatcggctgccgccgaagtgaacaggcaaatgctccaggagctggtcaacgctggctgtgaccaagagatggctggaagagcccttaaacagaccggctcccgatctatcgaggccgctctcgagtatatctccaagatggggtatttggacccccgaaacgaacaaatagttcgtgtcatcaaacagacttctccaggaaaggggctgatgcctacgcctgtcactcggcgcccatcttttgagggcacaggcgatagcttcgcaagctaccaccagctgagtggcaccccatatgagggaccatcgttcggcgccgacgggcctaccgctctggaggagatgccaaggccttatgtggactacctcttccctggagtcggacctcacggacccggccatcaacatcagcatccccctaaaggctatggagcttccgtagaggccgctggggcccacttccccctgcagggtgctcactacggccgccctcacctgctggtcccaggagaaccactgggatatggcgttcagagaagcccctcatttcaatccaagacacctcctgagacaggcgggtacgcgagcctccctactaaagggcaggggggcccccctggggctgggctggccttccccccaccagcagcaggattatatgtcccccatccacaccacaagcaagccggtcccgcagcccatcagctgcatgttttgggatcacgaagccaggtgtttgcctcagactccccccctcagtcacttctcacaccatccaggaactctctgaacgtcgatctgtacgaattaggatccacctcagttcagcagtggccagccgcaacactggcccggagggatagcttgcagaagcctgggttggaagcccctcctagggctcacgtcgcctttcgaccagattgtccagtaccatcaaggacaaatagtttcaattcacaccaacctcgccctggccctcccgggaaggcagaacctagccttcctgcccccaatacagtcaccgccgtcactgctgcccatatcctacatcctgtaaaaagtgtccgggtgcttaggccagagcctcagactgcagtaggccctagccatcccgcatgggtgccggcacccgcgccagcaccagctccagcccctgctccggcagccgagggcctcgacgccaaggaggaacacgctctggccctagggggggccggggcgtttccacttgacgtagaatacggagggccagatagacgttgcccccctccaccctatcccaagcatcttctcctgcggagcaaaagtgagcagtacgacttggacagcctttgcgctgggatggaacagtctttgcgagctggtcccaatgagcccgagggaggagacaaatcccggaaaagcgctaagggggataaagggggtaaggataaaaagcagatccagacttcaccagtgcctgtgcgcaaaaactcacgcgacgaagaaaaacgagaaagccggataaagtcctactccccttatgcttttaaattttttatggagcaacatgttgaaaacgtgattaagacataccagcagaaggttaaccggcggctgcaactggaacaagagatggctaaagccggcctgtgtgaggctgagcaggagcagatgcgaaaaatactgtaccagaaggaaagtaactacaatcgactgaagagagccaagatggacaagagcatgttcgtaaagattaaaactttgggtatcggtgcctttggggaggtgtgcctggcatgtaaggtagatacacatgccctgtacgcgatgaagactctgagaaagaaagacgtgctgaatcggaatcaagtggcccacgtcaaagcagagcgcgatatcctggcggaagctgacaacgaatgggtcgtgaagctctactattctttccaggataaagatagtttatacttcgttatggactacattcccgggggggatatgatgagtctattgattcggatggaggtgtttcccgaacatttagccagattctacatcgctgagttaacactggccatcgagtccgtgcataaaatggggtttattcaccgggatattaagccggataatattctgatcgatctggatgggcacattaaactgactgactttggcctgtgcaccggattccgttggacccataattctaaatattatcaaaagggatcccacgttagacaggacagtatggaaccatcagatctttgggatgatgtgagcaattgtcgttgtggtgatagactgaaaacactggaacagcgagctcggaaacagcaccagcgctgcctcgcccattccttggtgggcacaccaaattacatcgccccagaagttctactccgaaaaggttacacacagttgtgcgattggtggagtgttggcgttattctgtttgagatgctggtcggtcagccaccttttctggctccaactcctaccgaaacccagctgaaggtgattaattgggaaaataccctacatataccggcccaggtcaaactgagtcccgaggcccgcgacctcatcactaagctttgctgctccgcagaccaccgcttgggaaggaacggcgcagacgatctgaaagcccacccttttttctccgccatcgatttttcaagcgatattaggaaacaacctgcaccatacgtgccaactatttctcatcctatggacacttccaatttcgaccctgtcgatgaagagtctccctggaatgacgccagtgaaggttctaccaaggcatgggatactctaactagccccaataacaaacaccctgaacacgctttctacgagtttacattcaggcgattctttgacgataatgggtacccatttagatgcccgaaaccctctggagcagaggccagccaggccgagtccagcgacctggaatctagtgatcttgtagaccagacggaaggttgccagcccgtgtatgtgtag

SEQ ID NO: 279983 - DNA, 3267 bp, Artificial Sequence
  derived and/or modified sequence
atgcggccaaagaccttcccagctactacatattccggcaacagtaggcagagactgcaggaaattagggaggggcttaaacagccctccaagagctccgtgcagggcctgccagcaggtcccaattccgacacttcactcgacgcaaaggtactcggttccaaggatgctacccggcagcagcagcagatgcgggctacacctaaatttggcccttaccagaaggcacttcgtgagatccgctattccctgctgcccttcgctaacgaatctgggacctccgccgcggccgaggtgaacaggcagatgctgcaggaactggtcaatgctggctgcgatcaggaaatggccggccgagcacttaaacagaccggttctaggtccatcgaagccgcactggagtatattagtaaaatgggttacttggatcccagaaatgaacagattgtcagagtcatcaagcagacttcccctgggaagggattgatgcccacaccagttactcgcagaccctcttttgagggaaccggagattcttttgcctcctatcaccaactgtccgggacaccttatgaagggcccagtttcggcgccgatggacctacagccctcgaggagatgccccgcccttacgtggactatttgtttccaggagtcggaccccacggccccggtcatcagcaccagcacccacctaaaggatacggcgcttccgtggaggcagccggtgctcatttcccgcttcagggggcacattatggccgccctcacctccttgtgccaggggaaccacttggctacggcgttcagcggtctcctagcttccaaagtaagacccccccagaaaccggcggctacgcttctcttcccacaaagggacaaggggggccaccaggcgctggcttggcattcccgccaccggccgcaggcctgtatgtgccccaccctcatcacaaacaagccggccctgccgcacatcaactgcatgtcctgggatctagaagccaggtgtttgcaagcgactcaccgccacagtcccttctgacaccatcaagaaatagcctaaatgtcgatttgtacgagctcggcagcacgagcgttcaacagtggccagcagccacccttgcgagacgcgactcgttgcagaagccaggtctggaagctccccctcgggcccacgtcgcctttagacctgattgtccggtgccgtctagaactaattccttcaatagccatcagcccaggcctgggccacctggcaaggccgaaccatcgttgcctgccccgaacacggtaaccgccgtgaccgcagcacacatcctgcatccggttaagtcagtgcgcgtgcttagaccagagccacagacagcggtggggccctcccatcccgcctgggttccagctccagcaccagcaccagcacctgctcccgccccagctgcagagggcctggatgcaaaggaggagcacgcgctggctctcgggggtgctggcgccttcccattggatgtggaatatggcggacctgatcgacggtgtccacctccgccgtaccctaaacatctcctgctcagatctaagtccgagcagtatgatctggacagtctttgtgctggtatggaacaatctttgcgggccgggcctaatgagccggaaggtggggacaagtcccggaaaagcgctaaaggggataagggcggcaaagataagaagcagatccagacaagtcctgtcccggttcgaaaaaactcccgggacgaggaaaaacgagaatctcggataaagtcatatagcccatatgcctttaaattctttatggagcagcatgtggaaaatgtgattaaaacttaccaacaaaaagtcaacaggcgactgcagctggaacaggagatggccaaagcgggtttatgcgaggcagagcaggagcagatgagaaaaattttatatcaaaaggagagcaattacaaccgactaaagcgggcgaaaatggacaaatctatgttcgtgaagattaaaacactgggcatcggagccttcggagaagtttgcctggcctgtaaggtagacactcacgccctatacgccatgaaaaccctgaggaaaaaagatgtgttgaacaggaatcaggttgcacacgtaaaggccgaacgggacatcctagccgaggcggacaacgagtgggtggtgaaattatattattcattccaagacaaagactcattatattttgtcatggattacattcctggtggcgacatgatgtcactgctgatcagaatggaggtttttccagagcacctcgcccgattctatatcgctgagctcactctcgcgattgagagtgtgcacaaaatgggttttattcaccgagatataaaaccagacaacatactcatcgacttggatggacacattaaacttacagacttcgggctctgcactggattccgctggactcacaacagcaaatattaccagaaaggcagccatgtgcgtcaggactctatggaaccatcagacctgtgggatgatgtgtccaactgccggtgtggggaccgtctgaagaccctggaacagcgagcaagaaagcagcaccagcgatgtttggcacattcactcgtagggactccaaattacatcgcaccagaggtgctcctgaggaagggatacactcaactctgcgattggtggagcgttggcgtcatccttttcgagatgctggtgggccagcccccgttccttgcccctacacctactgagacacagctgaaagtcatcaattgggagaacacgctgcatatcccagcccaggtaaagctgagcccagaggctcgagatcttatcacaaaactatgttgttctgcggatcacagactgggaaggaacggagcagacgatctgaaagctcacccgtttttttccgcgatagacttttcttctgacatccgcaaacagccagccccttacgtcccaactatttcccatcccatggacacctctaacttcgaccccgttgacgaggagagtccctggaatgatgcctcggagggttctaccaaggcctgggatacacttacttctcccaataacaagcatccagaacacgccttctatgagttcacatttcgccggttcttcgacgacaacgggtacccgtttaggtgtcccaagcctagtggcgctgaggcatcccaggcggagtcctccgatctggagtcctctgacctagtcgatcagaccgaaggttgtcagcccgtgtacgtttag

SEQ ID NO: 279984 - DNA, 3267 bp, Artificial Sequence
  derived and/or modified sequence
atgaggcccaagaccttccctgccaccacctacagcggcaacagccggcagaggctgcaggagatccgggagggcctgaagcagcccagcaagagctctgtgcagggcctgcctgctggccccaacagcgacaccagcctggatgccaaggtgctgggcagcaaggatgccacccggcagcagcagcagatgagggccacccccaagtttggcccctaccagaaggccctgcgggagatccgctacagcctgctgccctttgccaatgaaagtggcaccagcgctgctgctgaggtgaaccggcagatgctgcaggagctggtgaatgccggctgtgaccaggagatggccggccgggccctgaagcagacaggcagccgcagcattgaagctgccctggagtacatcagcaagatgggctacctggaccccagaaatgagcagatcgtgcgggtcatcaagcagaccagccctgggaagggcctgatgcccacccctgtgacccggcggcccagctttgagggcaccggggacagctttgccagctaccaccagctgagcggcaccccctatgagggccccagctttggagcagatggccccacagccctggaggagatgccccggccctacgtggactacctgtttcctggggtgggcccccacggccctggccaccagcaccagcacccccccaagggctatggagcctctgtggaggccgccggggcccacttccccctgcagggcgcccactacggccggccccacctgctggtgcctggagagcccctgggctatggagtgcagaggagccccagcttccagagcaagaccccacctgagactggaggctacgccagcctgcccaccaagggccagggcggccccccaggggccggcctggccttccccccacctgctgctggcctgtatgtgccccacccccaccacaagcaggccggccctgctgcccaccagctgcacgtgctgggcagccgcagccaggtgtttgccagtgacagccccccccagagcctgctgacccccagcaggaacagcctgaatgtggacctgtatgagctgggcagcacctctgtgcagcagtggccagctgccaccctggcccggcgggacagcctgcagaagccaggcctggaggccccaccccgggcccacgtggccttccggccagactgccctgtgcccagcaggaccaacagcttcaacagccaccagccccggcccggccccccaggcaaggccgagcccagcctgcctgcccccaacacagtgacagctgtgacagctgcccacatcctgcaccctgtgaagtctgtgcgggtgctgcggcctgagccccagacagctgtgggccccagccacccagcctgggtgcctgccccagccccagccccagccccagccccagccccagctgctgagggcctggatgccaaggaggagcacgccctggccctgggcggggccggggccttccccctggatgtggagtatggaggccctgaccggcgctgccccccaccaccctaccccaagcacctgctgctgcggagcaagtctgagcagtatgacctggacagcctgtgtgccggcatggagcagagcctgcgggccggccccaatgaacctgagggcggggacaagagcaggaagagcgccaagggggacaagggcggcaaggacaagaagcagatccagaccagccctgtgcctgtgaggaagaacagcagagatgaggagaagcgggagagccgcatcaagagctacagcccctatgccttcaagttcttcatggagcagcacgtggagaatgtcatcaagacctaccagcagaaggtgaacagaaggctgcagctggagcaggagatggccaaggccggcctgtgtgaggccgagcaggagcagatgaggaagatcctgtaccagaaggagagcaactacaaccggctgaagagggccaagatggacaagtccatgtttgtgaagatcaagaccctgggcatcggggcctttggagaggtgtgcctggcctgcaaggtggacacccacgccctgtatgccatgaagaccctgaggaagaaggatgtgctgaacagaaaccaggtggcccacgtgaaggccgagcgggacatcctggccgaggccgacaatgagtgggtggtgaagctgtactacagcttccaggacaaggacagcctgtactttgtgatggactacatccctggaggagacatgatgagcctgctgatccgcatggaggtgtttcctgagcacctggcccgcttctacatcgccgagctgaccctggccattgaatctgtgcacaagatgggcttcatccaccgggacatcaagccagacaacatcctgattgacctggatggccacatcaagctgacagactttggcctgtgcaccggcttccgctggacccacaacagcaagtactaccagaagggcagccacgtgcggcaggacagcatggagcccagcgacctgtgggatgatgtgagcaactgccgctgtggggaccggctgaagaccctggagcagagggccaggaagcagcaccagcgctgcctggcccacagcctggtgggcacccccaactacatcgcccctgaggtgctgctgaggaagggctacacccagctgtgtgactggtggagcgtgggcgtcatcctgtttgagatgctggtgggccagccccccttcctggcccccacccccacagagacccagctgaaggtgatcaactgggagaacaccctgcacatcccagcccaggtgaagctgagccctgaggcccgggacctgatcaccaagctgtgctgcagcgctgaccaccggctgggcagaaatggagcagatgacctgaaggcccaccccttcttcagcgccatcgacttcagcagtgacatcaggaagcagcctgccccctacgtgcccaccatcagccaccccatggacaccagcaactttgatcctgtggatgaggagagcccctggaatgatgccagcgagggcagcaccaaggcctgggacaccctgaccagccccaacaacaagcaccctgagcacgccttctatgagttcaccttccgccgcttctttgatgacaatggctaccccttccgctgccccaagcccagcggggctgaggccagccaggccgagagcagtgacctggagagcagtgacctggtggaccagacagagggctgccagcctgtgtatgtgtag

SEQ ID NO: 279985 - DNA, 5511 bp, Artificial Sequence
  derived and/or modified sequence
ttgggtctgcgctttggaaccgcggcgtgagcgccccgggaagatggagcagtcgccgtccacgccaccgccgccgcccggggctcccccgtccctgcggggccagcagcagctccagccaccagtgcccggtctcccggcgcgagaggcccgggagccgccggccaggacgcccccgagggtgtagaccgcgcccctggagagagtgataatcttcaaaatgaagactttggaaaattttaggttctctataggaactacaaaaatggaaggaaagaacattttcaaaaggaaattattttgaaagtatgtttacaacaaactgatactattgacagtttttttttttaaataataaaacactttaagaagattgtatttatggtaaaaggaaactggactaacaatgaggccaaagacttttcctgccacgacttattctggaaatagccggcagcgactgcaagagattcgtgaggggttaaaacagccatccaagtcttcggttcaggggctacccgcaggaccaaacagtgacacttccctggatgccaaagtcctggggagcaaagatgccaccaggcagcagcagcagatgagagccaccccaaagttcggaccttatcagaaagccttgagggaaatcagatattccttgttgccttttgctaatgaatcgggcacctctgcagctgcagaagtgaaccggcaaatgctgcaggaactggtgaacgcaggatgcgaccaggagatggctggccgagctctcaagcagactggcagcaggagcatcgaggccgccctggagtacatcagcaagatgggctacctggacccgaggaatgagcagattgtgcgggtcattaagcagacctccccaggaaaggggctcatgccaaccccagtgacgcggaggcccagcttcgaaggaaccggcgattcgtttgcgtcctaccaccagctgagcggtaccccctacgagggcccaagcttcggcgctgacggccccacggcgctggaggagatgccgcggccgtacgtggactaccttttccccggagtcggcccccacgggcccggccaccagcaccagcacccacccaagggctacggtgccagcgtagaggcagcaggggcacacttcccgctgcagggcgcgcactacgggcggccgcacctgctggtgcctggggaacccctgggctacggagtgcagcgcagcccctccttccagagcaagacgccgccggagaccgggggttacgccagcctgcccacgaagggccagggaggaccgccaggcgccggcctcgctttcccaccccctgccgccgggctctacgtgccgcacccacaccacaagcaggccggtcccgcggcccaccagctgcatgtgctgggctcccgcagccaggtgttcgccagcgacagccccccgcagagcctgctcactccctcgcggaacagcctcaacgtggacctgtatgaattgggcagcacctccgtccagcagtggccggctgccaccctggcccgccgggactccctgcagaagccgggcctggaggcgccgccgcgcgcgcacgtggccttccggcctgactgcccagtgcccagcaggaccaactccttcaacagccaccagccgcggcccggtccgcctggcaaggccgagccctccctgcccgcccccaacaccgtgacggctgtcacggccgcgcacatcttgcacccggtgaagagcgtgcgtgtgctgaggccggagccgcagacggctgtggggccctcgcaccccgcctgggtgcccgcgcctgccccggcccccgcccccgcccccgccccggctgcggagggcttggacgccaaggaggagcatgccctggcgctgggcggcgcaggcgccttcccgctggacgtggagtacggaggcccagaccggaggtgcccgcctccgccctacccgaagcacctgctgctgcgcagcaagtcggagcagtacgacctggacagcctgtgcgcaggcatggagcagagcctccgtgcgggccccaacgagcccgagggcggcgacaagagccgcaaaagcgccaagggggacaaaggcggaaaggataaaaagcagattcagacctctcccgttcccgtccgcaaaaacagcagagacgaagagaagagagagtcacgcatcaagagctactcgccatacgcctttaagttcttcatggagcagcacgtggagaatgtcatcaaaacctaccagcagaaggttaaccggaggctgcagctggagcaagaaatggccaaagctggactctgtgaagctgagcaggagcagatgcggaagatcctctaccagaaagagtctaattacaacaggttaaagagggccaagatggacaagtctatgtttgtcaagatcaaaaccctggggatcggtgcctttggagaagtgtgccttgcttgtaaggtggacactcacgccctgtacgccatgaagaccctaaggaaaaaggatgtcctgaaccggaatcaggtggcccacgtcaaggccgagagggacatcctggccgaggcagacaatgagtgggtggtcaaactctactactccttccaagacaaagacagcctgtactttgtgatggactacatccctggtggggacatgatgagcctgctgatccggatggaggtcttccctgagcacctggcccggttctacatcgcagagctgactttggccattgagagtgtccacaagatgggcttcatccaccgagacatcaagcctgataacattttgatagatctggatggtcacattaaactcacagatttcggcctctgcactgggttcaggtggactcacaattccaaatattaccagaaagggagccatgtcagacaggacagcatggagcccagcgacctctgggatgatgtgtctaactgtcggtgtggggacaggctgaagaccctagagcagagggcgcggaagcagcaccagaggtgcctggcacattcactggtggggactccaaactacatcgcacccgaggtgctcctccgcaaagggtacactcaactctgtgactggtggagtgttggagtgattctcttcgagatgctggtggggcagccgccctttttggcacctactcccacagaaacccagctgaaggtgatcaactgggagaacacgctccacattccagcccaggtgaagctgagccctgaggccagggacctcatcaccaagctgtgctgctccgcagaccaccgcctggggcggaatggggccgatgacctgaaggcccaccccttcttcagcgccattgacttctccagtgacatccggaagcagccagccccctacgttcccaccatcagccaccccatggacacctcgaatttcgaccccgtagatgaagaaagcccttggaacgatgccagcgaaggtagcaccaaggcctgggacacactcacctcgcccaataacaagcatcctgagcacgcattttacgaattcaccttccgaaggttctttgatgacaatggctacccctttcgatgcccaaagccttcaggagcagaagcttcacaggctgagagctcagatttagaaagctctgatctggtggatcagactgaaggctgccagcctgtgtacgtgtagatgggggccaggcacccccaccactcgctgcctcccaggtcagggtcccggagccggtgccctcacaggccaatagggaagccgagggctgttttgttttaaattagtccgtcgattacttcacttgaaattctgctcttcaccaagaaaacccaaacaggacacttttgaaaacaggactcagcatcgctttcaataggcttttcaggaccttcactgcattaaaacaatatttttgaaaatttagtacagtttagaaagagcacttattttgtttatatccattttttcttactaaattatagggattaactttgacaaatcatgctgctgttattttctacatttgtattttatccatagcacttattcacatttaggaaaagacataaaaactgaagaacattgatgagaaatctctgtgcaataatgtaaaaaaaaaaaaagataacactctgctcaatgtcacggagaccattttatccacacaatggtttttgttttttattttttcccatgtttcaaaattgtgatataatgatataatgttaaaagctgctttttttggctttttgcatatctagtataataggaagtgtgagcaaggtgatgatgtggctgtgatttccgacgtctggtgtgtggagagtactgcatgagcagagttcttctattataaaattaccatatcttgccattcacagcaggtcctgtgaatacgtttttactgagtgtctttaaatgaggtgttctagacagtgtgctgataatgtattgtgcgggtgacctcttcgctatgattgtatctcttactgttttgttaaagaaatgcagatgtgtaactgagaagtgatttgtgtgtgtgtcttggttgtgattggattctttggggggggggaactgaaacatttgtcatatactgaacttatatacatcaaaagggattaatacagcgatgccaaaaagtttaatcacggacacatgtccgtttctgtagtccgtatgctctttcattcttggtagagctggtatgtggaatgccatacctctgaccctactacttacctttttactgacagactgcccacactgaaagcttcagtgaatgttcttagtcctgttttcttctgttactgtcaggaaactgagtgatctaatggttctctcactttttttttgttcttttagtgtactttgaagtatcaaatcttaacttggtttaaacaatacatattcctaacctttgtaaaaaagcaaagattcttcaaaatgacattgaaataaaaagtaagccatacgtattttcttagaagtatagatgtatgtgcgtgtatacacacacacacacacacacagagataaacacaatattccttatttcaaattagtatgattcctatttaaagtgatttatatttgagtaaaaagttcaattcttttttgctttttaaaaaatctgatgcttcataattttcattatattattccacatatttttccttgaagttcttagcataatgtatccattacttagtatatatctaggcaacaacacttagaagtttatcagtgtttaaactaaaaaaataaagattcctgtgtactggtttacatttgtgtgagtggcatactcaagtctgctgtgcctgtcgtcgtgactgtcagtattctcgctattttatagtcgtgccatgttgttactcacagcgctctgacatactttcatgtggtaggttctttctcaggaactcagtttaactattatttattgatatatcattacctttgaaaagcttctactggcacaatttattattaaaattttgaatccaaatccc

SEQ ID NO: 279986 - DNA, 3632 bp, Artificial Sequence
  derived and/or modified sequence
acatcttgccatcacatccttcagcccaactccagaacttctggggagctttccctcggggatggagtgcggcctggagcaaacccgtttgtgaaatgcaagtctccagtgtcccgagggttgggaacggggggcgaggcgaggaatggaccctgaagaagagagtgataatcttcaaaatgaagactttggaaaattttaggttctctataggaactacaaaaatggaaggaaagaacattttcaaaaggaaattattttgaaagtatgtttacaacaaactgatactattgacagtttttttttttaaataataaaacactttaagaagattgtatttatggtaaaaggaaactggactaacaatgaggccaaagacttttcctgccacgacttattctggaaatagccggcagcgactgcaagagattcgtgaggggttaaaacagccatccaagtcttcggttcaggggctacccgcaggaccaaacagtgacacttccctggatgccaaagtcctggggagcaaagatgccaccaggcagcagcagcagatgagagccaccccaaagttcggaccttatcagaaagccttgagggaaatcagatattccttgttgccttttgctaatgaatcgggcacctctgcagctgcagaagtgaaccggcaaatgctgcaggaactggtgaacgcaggatgcgaccaggagatggctggccgagctctcaagcagactggcagcaggagcatcgaggccgccctggagtacatcagcaagatgggctacctggacccgaggaatgagcagattgtgcgggtcattaagcagacctccccaggaaaggggctcatgccaaccccagtgacgcggaggcccagcttcgaaggaaccggcgattcgtttgcgtcctaccaccagctgagcggtaccccctacgagggcccaagcttcggcgctgacggccccacggcgctggaggagatgccgcggccgtacgtggactaccttttccccggagtcggcccccacgggcccggccaccagcaccagcacccacccaagggctacggtgccagcgtagaggcagcaggggcacacttcccgctgcagggcgcgcactacgggcggccgcacctgctggtgcctggggaacccctgggctacggagtgcagcgcagcccctccttccagagcaagacgccgccggagaccgggggttacgccagcctgcccacgaagggccagggaggaccgccaggcgccggcctcgctttcccaccccctgccgccgggctctacgtgccgcacccacaccacaagcaggccggtcccgcggcccaccagctgcatgtgctgggctcccgcagccaggtgttcgccagcgacagccccccgcagagcctgctcactccctcgcggaacagcctcaacgtggacctgtatgaattgggcagcacctccgtccagcagtggccggctgccaccctggcccgccgggactccctgcagaagccgggcctggaggcgccgccgcgcgcgcacgtggccttccggcctgactgcccagtgcccagcaggaccaactccttcaacagccaccagccgcggcccggtccgcctggcaaggccgagccctccctgcccgcccccaacaccgtgacggctgtcacggccgcgcacatcttgcacccggtgaagagcgtgcgtgtgctgaggccggagccgcagacggctgtggggccctcgcaccccgcctgggtgcccgcgcctgccccggcccccgcccccgcccccgccccggctgcggagggcttggacgccaaggaggagcatgccctggcgctgggcggcgcaggcgccttcccgctggacgtggagtacggaggcccagaccggaggtgcccgcctccgccctacccgaagcacctgctgctgcgcagcaagtcggagcagtacgacctggacagcctgtgcgcaggcatggagcagagcctccgtgcgggccccaacgagcccgagggcggcgacaagagccgcaaaagcgccaagggggacaaaggcggaaaggataaaaagcagattcagacctctcccgttcccgtccgcaaaaacagcagagacgaagagaagagagagtcacgcatcaagagctactcgccatacgcctttaagttcttcatggagcagcacgtggagaatgtcatcaaaacctaccagcagaaggttaaccggaggctgcagctggagcaagaaatggccaaagctggactctgtgaagctgagcaggagcagatgcggaagatcctctaccagaaagagtctaattacaacaggttaaagagggccaagatggacaagtctatgtttgtcaagatcaaaaccctggggatcggtgcctttggagaagtgtgccttgcttgtaaggtggacactcacgccctgtacgccatgaagaccctaaggaaaaaggatgtcctgaaccggaatcaggtggcccacgtcaaggccgagagggacatcctggccgaggcagacaatgagtgggtggtcaaactctactactccttccaagacaaagacagcctgtactttgtgatggactacatccctggtggggacatgatgagcctgctgatccggatggaggtcttccctgagcacctggcccggttctacatcgcagagctgactttggccattgagagtgtccacaagatgggcttcatccaccgagacatcaagcctgataacattttgatagatctggatggtcacattaaactcacagatttcggcctctgcactgggttcaggtggactcacaattccaaatattaccagaaagggagccatgtcagacaggacagcatggagcccagcgacctctgggatgatgtgtctaactgtcggtgtggggacaggctgaagaccctagagcagagggcgcggaagcagcaccagaggtgcctggcacattcactggtggggactccaaactacatcgcacccgaggtgctcctccgcaaagggtacactcaactctgtgactggtggagtgttggagtgattctcttcgagatgctggtggggcagccgccctttttggcacctactcccacagaaacccagctgaaggtgatcaactgggagaacacgctccacattccagcccaggtgaagctgagccctgaggccagggacctcatcaccaagctgtgctgctccgcagaccaccgcctggggcggaatggggccgatgacctgaaggcccaccccttcttcagcgccattgacttctccagtgacatccggaagcagccagccccctacgttcccaccatcagccaccccatggacacctcgaatttcgaccccgtagatgaagaaagcccttggaacgatgccagcgaaggtagcaccaaggcctgggacacactcacctcgcccaataacaagcatcctgagcacgcattttacgaattcaccttccgaaggttctttgatgacaatggctacccctttcgatgcccaaagccttcaggagcagaagcttcacaggctgagagctcagatttagaaagctctgatctggtggatcagactgaaggctgccagcctgtgtacgtgtag

SEQ ID NO: 279987 - DNA, 3267 bp, Artificial Sequence
  derived and/or modified sequence
atgcggcccaagaccttccccgccaccacctacagcggcaacagcaggcaacgactccaggagattagagaggggctgaaacagcctagcaaatcatcagttcaggggctgccagctggcccaaactcggacaccagcctggatgccaaggtcctcggcagcaaggacgccacacgtcagcagcagcagatgcgcgctacacccaaattcggtccgtatcagaaagccctacgggaaatacgttactcgctgttgccatttgcaaacgaatccggtacctccgccgccgctgaagttaacaggcagatgctgcaagaactcgtcaatgcaggctgtgaccaagagatggcaggccgagccctgaagcaaacaggctctagatccattgaggccgccctcgagtatatttcgaagatggggtacctcgatccgcggaatgagcaaatcgtcagggtgattaaacagacctccccaggcaaggggcttatgcccacccctgtaacgcggcgcccgagcttcgaagggactggggacagttttgctagttatcatcaactctccggcactccatacgagggacccagctttggtgcagacggtccaacagccctcgaggagatgcctcgcccctacgtggattatctgtttcccggagtgggtccccacggaccgggtcaccaacatcagcatcctccaaaaggttacggggctagtgttgaagccgccggagcacacttccccctccagggggctcactatggcaggccacatctgctcgtacccggagagcccctcggttatggagtgcagagatccccctctttccagtctaagactccccctgagacggggggctatgcctctctgcccaccaaaggacagggaggtcctccgggcgccggtctggcatttcccccccctgccgccggcctttatgtcccccacccccaccataagcaagccggcccagccgcacaccagctccacgtcctcggcagtaggtctcaagtatttgcatcagacagccccccacagagtcttcttaccccgtcaaggaattccctgaacgtcgatctgtacgaactaggatcaacctccgtccagcaatggcctgccgccacattggcccggagagattcacttcagaagccagggctggaagcaccaccacgggctcacgtggcattccgacccgactgcccagtgccatctcgcaccaattctttcaatagtcaccagccaagacctggaccacccggcaaagcagagccttcgctcccagcacctaacactgtcaccgctgtgactgccgcgcacatcttacaccccgtgaaaagcgtgagagttttacggcccgagcctcaaacggccgtgggcccttcacatccagcttgggtcccagccccagcacccgcgcccgcaccagcacccgccccggctgctgagggccttgacgcaaaggaagagcatgcactggccctaggcggcgccggggcgtttccactggacgtggaatatggaggaccggacagacgatgccccccacctccctatcccaagcaccttttgctgcggagcaagtcagaacagtatgacctggattcgctctgtgccggaatggaacaaagtttgagggccggtcccaacgaaccggaaggtggagataagtcgagaaaaagcgccaagggcgacaagggcgggaaagacaagaagcagatccagactagcccagtgcctgttaggaagaacagcagggatgaggagaaaagagaatcccggatcaaatcctacagcccatatgcattcaaattttttatggagcagcacgtagaaaatgttatcaagacctaccaacagaaggtaaatagacggctgcagttagagcaggagatggctaaggcaggcctgtgtgaggctgaacaggaacaaatgcggaagatcctgtatcagaaagagagcaattacaaccgcctgaagagagcaaagatggataagtccatgttcgtgaagatcaagacattgggcattggggccttcggggaagtgtgtctagcatgcaaggtcgatacccatgccctatatgctatgaaaacacttaggaaaaaggatgtgctcaacagaaaccaggtggcacacgtaaaggccgagcgcgacattctggctgaggcggataatgaatgggtcgtgaagctgtactattctttccaggacaaagactcactctattttgtgatggactatatacccgggggagatatgatgtccctgctgatcaggatggaagtcttccccgagcacttggccagattttacatagctgagttgactctggcaatcgagtcagttcacaagatgggttttattcacagggacattaaaccagataatattttgatagacctggacggtcacatcaaactgactgatttcgggctgtgtactggatttaggtggactcataacagcaaatactatcaaaagggaagtcatgttcgacaagatagcatggagcctagtgatctgtgggacgatgtgtcaaactgccggtgcggcgataggttaaaaacactggagcagagagctcgcaagcagcaccagagatgtctcgctcattccctcgtaggcactccgaactacatcgccccagaggtgctgctccggaagggctacactcagctgtgcgactggtggtctgtgggggtcattctttttgagatgttggtgggccagccacctttcctggcccctacccccactgaaacccagctgaaggttattaactgggaaaatacgttacacatccccgcacaagtaaaactgtctccagaagccagggaccttataacaaagctgtgttgttccgccgaccaccgcctgggaaggaacggcgccgatgacctcaaggcccacccctttttcagtgccatcgacttctcctctgatattaggaaacagcccgccccctatgtgcctacaatctctcaccctatggataccagtaactttgacccagtagacgaagagagcccatggaatgatgccagcgaaggatcgaccaaagcttgggatactctaacctctcctaacaataagcacccagagcacgccttctacgaattcacatttaggagatttttcgatgataacggctatccatttagatgccccaaaccatccggggctgaagctagccaggccgaatctagtgatctcgaaagctccgatctggttgatcagacggaaggatgtcagcccgtttacgtttag

SEQ ID NO: 279988 - DNA, 3267 bp, Artificial Sequence
  derived and/or modified sequence
atgcggcccaagaccttccccgccaccacctacagcggcaacagcagacagaggctgcaagagatccgggaaggtcttaagcaaccatcaaaaagctctgtgcagggcctgcccgccggccctaactctgacacatccctggacgccaaagtgctggggtccaaggatgccaccaggcagcaacagcaaatgcgggccaccccaaaattcgggccataccagaaggcactgcgggagattcggtacagcctgctacctttcgccaacgagtctggaacttctgctgctgccgaggtgaacagacaaatgctccaagagctggtcaatgctggctgcgatcaggagatggccggccgagcccttaaacagacaggatcccgctctatagaggcggcacttgagtacatttccaagatgggatatctggaccccaggaacgaacagattgtgagggtcatcaaacagactagtccaggcaaaggactgatgcccacccccgtcacgcgaagaccttctttcgagggaacgggggattccttcgcctcttatcaccagctgagtggtaccccctacgaaggaccgtccttcggggccgacggaccaacagctctagaagaaatgcccagaccttacgtcgattacctgttcccaggcgtcggccctcacggccccggacaccagcatcagcaccctcccaaaggttacggcgcatctgtcgaagcagcaggagcccatttccccttgcagggcgcacattatgggcggccccacctactcgtccccggcgaacccttagggtatggcgtgcagcgatccccatccttccagagtaaaaccccccctgagacgggcggttacgcgagtctgcccacaaaaggccagggaggaccaccaggggctgggctcgccttccctccccctgccgccgggctgtacgtgccgcacccacaccataagcaggctgggcccgccgcacatcaattacatgtgttgggaagcaggagtcaggtttttgcctccgactcgccaccccaatccctgctgacgcccagccggaattccctgaacgtggacctttacgaactgggtagtaccagcgtgcagcagtggcccgccgcgaccttggcaaggcgagattccttgcagaaacccggactggaggcaccccctcgagcccatgtagccttcaggccagactgccccgtaccaagtagaactaactcttttaacagtcaccaaccacgccccggaccccccggaaaggcagagccttcgctgcccgctcctaatacagtgacagctgttacggctgcacacatactgcaccccgttaaatcagtcagagttctgagacctgaaccacagacagcggtcggtcctagccacccagcttgggtgccagcccctgcgccggccccggcccccgcccccgcacccgctgctgagggactcgatgctaaggaggagcacgcgcttgcgctggggggagcgggtgcctttccattggacgtggaatatggcggaccggaccgacgctgccccccaccaccatacccgaagcatcttttgttgcgttcaaagagcgaacagtatgaccttgacagtctctgtgccggtatggagcaatctttacgtgctggacctaacgaacctgagggcggcgacaagagccgaaagtccgcaaaaggcgacaagggtggcaaggacaagaaacaaattcagacatctcccgtgccagtgcggaaaaattccagggacgaggagaaacgggaatcccgaattaagtcttactctccgtatgcattcaagttttttatggaacagcacgtggaaaatgtcatcaaaacttaccagcagaaggtgaacaggcgccttcagttggagcaggaaatggctaaggctggactctgtgaggcggagcaggaacaaatgagaaaaatcctctaccagaaggagagcaactataataggcttaaacgcgcaaagatggataaaagtatgttcgtgaagatcaagacacttggtattggagcctttggcgaggtgtgcctggcgtgtaaagtggacactcatgcattatatgccatgaaaactcttagaaaaaaggacgtgctgaatcgcaatcaggtggcccacgttaaagctgaacgtgacatattagccgaggccgacaatgagtgggtggttaagttgtattactcttttcaggataaggactctctgtacttcgtcatggactacattccaggtggggacatgatgtcactcctgattcggatggaggtgttcccagaacatttggcccgcttttacatcgcagagttaacccttgcgattgaatctgttcataaaatggggtttattcacagagatatcaagcccgataatatcctgatcgaccttgacggtcatattaaattaacagacttcggcctctgcacaggtttcagatggacacataattcgaaatattatcagaagggctcacacgttagacaggatagcatggagccgtccgatctgtgggatgacgtgtccaactgtcgttgtggtgatcgactcaaaacccttgaacaacgggccaggaagcagcatcagaggtgcctggcccattctctcgtgggcactcctaattacatcgcacctgaggtcctcctccgcaagggctatacgcagttatgtgactggtggtccgttggcgtgattctgtttgaaatgttggtgggccagcctccttttctggcacctacacccactgagactcagttgaaggtgatcaactgggagaacactcttcatatcccagctcaggtcaagctctccccagaggcaagggacctaattaccaagctatgttgtagcgctgaccaccgcctaggccgcaacggggcagatgatctaaaagcacacccattctttagcgcaatcgactttagtagcgacattagaaaacagccagcaccttatgtcccgacaatatctcaccctatggatacttccaacttcgacccagtcgacgaggagagcccttggaacgatgccagcgagggaagcaccaaggcttgggacaccctcacctctcctaacaacaagcaccccgagcatgctttctatgagtttactttcaggcggtttttcgatgataacggatacccgttccgctgccctaagccaagtggtgctgaggcttcccaggcagagtcctcagatttagagtccagcgaccttgtggaccagaccgaagggtgccagccagtctatgtctag

SEQ ID NO: 279989 - DNA, 3267 bp, Artificial Sequence
  derived and/or modified sequence
atgagacccaagaccttccccgcaacaacctatagtggtaatagccggcagaggctacaagagatacgtgagggacttaaacagcctagtaagagttctgtccaagggctgcccgctggacctaattccgacacaagtttggacgcaaaggtgcttggcagtaaagacgcgacaaggcagcagcagcagatgcgggctacccccaagttcgggccataccagaaggcattgcgcgagattcgctattccctgctcccttttgccaacgagtccggaacctcggcggctgcagaagtaaacaggcagatgttacaggagctggtgaacgccggatgcgaccaagaaatggctggccgagccctgaaacagactggatcgagaagtatagaggccgcactggagtacatctccaagatggggtacctagatccgagaaatgaacaaattgtgcgggtgatcaagcagacctccccagggaagggactaatgcctactccagtcacacgcagacctagcttcgaaggcactggcgactcctttgctagttaccaccagctctctggtacaccgtatgaagggccatcatttggtgccgatggtcctaccgcgctggaggagatgccaagaccttatgtcgactatcttttccctggagtgggccctcacgggcctgggcaccagcaccagcatcccccaaaggggtacggcgcttcggtggaagctgctggcgcacacttcccccttcagggcgcacattatggacgccctcatctgctggtccccggagaaccactggggtatggtgtgcagcggagcccttcattccagagcaaaacaccacccgagacgggtggctatgccagtctgccgacgaaagggcagggaggccctccaggggcagggcttgcgttccctcctccagccgcaggactttatgtgccccaccctcaccataaacaggcgggtcctgctgcgcatcagttgcacgtgctgggaagcaggtcccaagtcttcgctagcgattcccctccccagagcctccttacgccaagcaggaattcattgaatgttgatctctatgagttgggaagtacctccgtgcagcagtggcctgcggctacattggcgcgtcgggactcacttcagaaaccgggactggaggcaccaccgagggctcatgtggcctttagacctgactgtcctgtgccaagtagaaccaacagctttaattcccaccagccacgccctgggcctcccggtaaggcagagccttcactccccgctccaaataccgtgacagcggtgaccgctgcgcacattctgcatccagtgaagtcagtgcgagtcttgcgacccgagccacaaacagccgtggggccatcacaccccgcttgggtgccagccccagcacccgcaccagcccctgcgcctgcaccggctgcagagggattggatgctaaggaggaacacgccctggccctgggaggagctggcgcatttcctttggacgtcgagtatggcggacctgaccggcgatgtccccctccaccttatcccaagcacctactgcttcggagcaagtcagagcagtacgaccttgactccctttgcgcagggatggaacaatccttgagggccggtcccaacgagccagagggaggggataagtctcgcaaaagtgctaaaggggataaaggagggaaggacaaaaaacagatccagaccagtccagtgcccgtccgaaagaattccagagatgaagagaaacgagaaagccgtatcaaatcttatagtccttacgcctttaaattcttcatggaacagcacgtggaaaacgtgattaagacatatcagcagaaggtgaatcggcgtctgcagctggagcaggaaatggcaaaagctggcttgtgtgaagctgaacaggagcaaatgcgcaagatcctgtaccagaaagaaagtaattacaaccgtttgaaaagagctaagatggataaaagcatgtttgtaaagatcaagaccctcgggattggggcatttggcgaggtttgtttggcctgcaaggttgatacccatgccttgtatgccatgaagaccctaagaaagaaagatgtgctgaatcgcaaccaggtcgcacatgtgaaagctgagcgcgatatactcgccgaagcagataacgaatgggttgtgaaactgtactacagctttcaggataaagactccctctacttcgtgatggattacattccagggggtgacatgatgagcctattaattaggatggaggtgttccccgagcatctggcgagattttatatcgccgaactcaccctcgccattgaatctgtacataagatgggctttattcatcgcgatatcaagccagataacattctgattgacctcgatgggcacataaaattaaccgacttcgggttgtgcactggattccggtggactcacaattcaaagtactaccagaaagggtcgcacgttcgccaggattccatggagccgtctgacttgtgggacgatgtctcgaactgcagatgtggagaccgcctgaagaccctggaacagagggcacgcaagcagcatcaacggtgtttggctcatagcctcgttggtactcccaattacatcgcccctgaggtcctgttgagaaaaggctacactcagctatgcgactggtggtccgtgggcgttatcttattcgagatgctggtggggcaacccccatttctggcgccaaccccaaccgagactcagttgaaagtcatcaattgggagaacactctgcacatccccgcacaggttaagctgagtccagaggcaagagacctcatcactaaactgtgctgctcagccgaccatagactgggaagaaacggcgctgacgatctgaaggctcaccctttcttcagcgcgattgacttttcatccgacattagaaagcagccagccccatatgttccaactatcagccatcctatggacacgtcaaactttgaccctgtggatgaagagagcccctggaatgacgcctccgaaggctccaccaaggcatgggacacactgacaagccccaacaataaacaccccgagcatgctttttacgaatttacgttcaggcggttcttcgacgacaacgggtatccattccggtgtcccaagccgagtggggctgaagcctcgcaggcagagtcgtcagacctagagagttccgacctggtcgatcagacagaaggctgccagccagtttatgtttag

SEQ ID NO: 279990 - DNA, 3267 bp, Artificial Sequence
  derived and/or modified sequence
atgcgcccaaaaacctttccagcaactacttactctgggaatagccgccagagactgcaagagatacgggagggccttaagcagccaagcaaaagctcagtacaggggctgccggctggtccaaactcagatacatccctggatgcaaaggtccttggctcaaaggacgctacccggcagcagcagcagatgcgcgctacccctaaatttggcccataccagaaggcattgcgcgaaatcaggtactccctgttaccattcgcaaatgaatcaggtacttcagcagcagctgaagtgaaccgccagatgctgcaagagctggtcaatgccggatgcgaccaagagatggctggcagagctctgaagcaaaccggtagccgttctatcgaggccgcactcgagtacatctctaagatgggatacctcgatccccgaaacgagcagattgtgagagtcattaaacaaacatcaccgggtaaaggactgatgcccacccctgtgacacgcagacctagcttcgagggcacaggagatagttttgcaagttaccaccaactctctggcaccccatacgagggaccgagctttggcgcagatggccctaccgcacttgaagagatgccaaggccttatgtggactacctctttccaggggtcgggccacatgggccaggtcaccaacaccagcacccgccaaaagggtacggggcatcagtggaggccgcaggggcacactttcctcttcagggagctcattacggcagaccacatctgctcgtccccggtgagcctttggggtacggagtgcagcggtcaccctcctttcagtctaaaacaccacccgaaaccgggggatacgcttccctgcctaccaaagggcagggaggcccacctggcgctggactcgccttcccacctccagcggctggattgtacgtcccccatccccaccataagcaggcaggcccagcggctcaccagttgcacgtcttgggatccagatcgcaagtgttcgcatccgattccccacctcagtccctgttaacccctagcagaaacagtcttaacgtggatctttacgaactgggctccactagtgtgcagcagtggcccgcagctaccttggctagacgagatagcctgcagaagccaggactagaggccccacccagggcccacgtcgcttttcggcctgattgtccagtgccatctcggaccaatagttttaattcccatcagcccaggcctgggccaccgggtaaagctgaaccttcgctgcctgctccaaatacagtgaccgcggtcactgctgcccatatactgcaccccgtgaagtccgtccgcgtgttgcggccagaacctcaaacggcagttggaccctcccaccctgcctgggtgccagcgccagccccagccccagcacccgctcctgcccctgccgcagaaggcctggatgccaaagaggagcatgccctggccctggggggtgccggagcctttcctctggatgtagaatacggtggacctgacagacgatgtccacctccaccttacccgaagcatttgttactgcgttctaagagtgagcaatacgacctcgatagcctgtgtgctggtatggagcagtctttaagggctggcccaaacgagccagagggaggagataagagcagaaagagtgcaaagggggacaaaggcggaaaagacaagaaacagatccaaacatctccggttccagtgcggaaaaacagcagagatgaagaaaaacgtgagtccagaatcaagagctactcaccatacgcctttaagtttttcatggaacaacatgtggaaaacgtgatcaagacctaccagcagaaagttaataggagattgcaattggagcaggagatggccaaggccggtctgtgcgaggctgagcaagagcagatgcgcaaaatcctgtaccagaaagagtccaactataatcgccttaagagagctaaaatggacaagtccatgttcgtgaaaatcaagaccttaggaatcggggctttcggtgaggtgtgtctggcatgcaaggtggacacccacgccctgtatgcgatgaagaccttacgaaagaaggatgtgctaaatcgcaatcaggttgcacatgtgaaagctgaacgcgacatccttgctgaagctgacaatgagtgggtggtcaaactgtactactctttccaagacaaagattctctctattttgtcatggattatatacctgggggtgacatgatgtccctgttgattcggatggaggtgttccctgagcacttagccagattttatatcgcagagttaaccctggcgattgaatcagtgcataagatgggctttatccaccgggacatcaaaccagacaacatactgatcgatctggacggacatatcaaattaaccgattttggtctatgcactggatttcgttggacccataatagcaaatactaccagaagggctcccacgttaggcaggactctatggaaccatctgatctgtgggacgatgtgagcaactgcaggtgcggtgatagattgaaaaccctggagcagagggccagaaagcaacaccaacggtgccttgcccattcactggtcggcacccctaactatatcgcgccagaggttttgctccggaaaggttacacccagttgtgcgattggtggtcagttggggtgatcctgtttgagatgctggttgggcagccacctttcttagccccaactccaaccgaaacccagctcaaggtcatcaattgggaaaacaccttacacattcctgcccaggtgaagttaagcccagaggctagagatcttatcactaagttatgctgtagtgccgatcatcgactggggaggaacggtgctgatgaccttaaagcccacccgttcttttctgcaatcgatttttcttccgacatccgcaaacagccagccccatatgtgccaactatttcacacccaatggacacctccaactttgaccccgtagatgaagaatcaccatggaacgacgcatctgagggtagtactaaagcctgggataccttgacatcccctaacaataaacaccccgagcatgcattctacgagtttacgtttagacgcttctttgatgacaacggttacccttttagatgccccaaaccttctggtgcggaagctagccaggctgagagtagcgacctggagagctcggatctagtagatcagaccgaaggctgccaacccgtgtacgtctag

SEQ ID NO: 279991 - DNA, 91 bp, Artificial Sequence
  derived and/or modified sequence
ggacaacatacacaaatcagtcaagatacatcatttcaacagaatgaaagacaaaaaccatttgatcacttcaatcgatgatgaaaaagca

SEQ ID NO: 279992 - DNA, 10857 bp, Artificial Sequence
  derived and/or modified sequence
gcggcgtcggggcttcacaacaacagtggtggccgtagcagcggccgggccgggctgaggcgcaggcggggagcgggcccggcgccgcggcgctggtggatgctggggctccgaggcgacggccggggggcgggggccgaggcaggtataacggtaccggcggcggcagcgccgctgctcttcccttctcctcaggaggggggccaatggctagcgagaagccgggcccgggcccggggctcgagcctcagcccgtggggctcattgccgtcggggccgctggcggaggcggcgggggcagcggtggtggcggcaccgggggcagcgggatgggggagctaaggggggcgtccggctccggctcggtgatgctccccgcggggatgattaacccttcggtgccgatccgcaacatccggatgaaattcgcagtgttgattggactcatacaggtcggagaggtcagcaacagggacatcgtggagacggtgctcaacctgctggttggtggagaatttgacttggagatgaactttattatccaggatgctgagagtataacatgtatgacagagcttttggagcactgtgatgtaacatgtcaagcagaaatatggagcatgtttacagccattctacgaaaaagtgttcggaatttacagactagcacagaagttgggctaattgaacaagtattgctgaaaatgagtgctgtagatgacatgatagcagatcttctagttgatatgttgggggttcttgccagctacagcatcactgtcaaggagttgaagcttttgttcagcatgcttcgaggagaaagtggaatctggccaagacatgcagtaaaattattatcagttcttaatcagatgccacagagacacggtcctgatacttttttcaatttccctggttgtagcgctgcggcaattgccttgcctcctattgcaaagtggccttatcagaatggcttcaccttaaacacttggtttcgtatggatccattaaataatattaatgttgataaggataaaccttatctttattgttttcgtactagcaaaggagttggttactctgctcattttgttggcaactgtttaatagtcacatcattgaagtccaaaggaaaaggttttcagcattgtgtgaaatatgattttcaaccacgcaagtggtacatgatcagcattgtccacatttacaatcgatggaggaacagtgaaattcggtgttatgttaatggacaactggtatcttatggtgatatggcttggcatgttaacacaaatgatagctatgacaagtgctttcttggatcatcagaaactgctgatgcaaatagggtattctgtggtcaacttggtgccgtgtatgtgttcagtgaagcactcaacccagcacagatatttgcaattcatcagttaggacctggatataagagtaccttcaagtttaaatctgagagtgatattcatttggcagaacatcataaacaggtgttatatgatgggaaacttgcaagtagcattgcctttacatataatgctaaggccactgatgctcagctctgcctggaatcatcaccaaaagagaatgcatcaatttttgtgcattccccacatgctctaatgcttcaggatgtgaaagcgatagtaacacattcaattcatagtgcaattcattcaattggagggattcaagtgctttttccactttttgcccaattggataataggcagctcaatgacagtcaagtggaaacaactgtctgtgctactctgttggcattcctggttgaactacttaaaagttcagtagccatgcaagaacagatgctgggtggaaaaggctttttagtcattggctacttacttgaaaagtcatcaagagttcatataactagagctgtcctggagcaatttttatcttttgcaaaataccttgatggtttatctcatggagcacctttgctgaagcagctttgtgatcacattttatttaacccagccatctggatacatacacctgcaaaggttcagctttccctatacacatatttgtctgctgaatttattggaactgctaccatctacaccaccatacgcagagtaggaacagtattacagctaatgcacaccttaaaatattactactgggttattaatcctgctgacagtagtggcattacacctaaaggattagatggtccccggccatcacaaaaagaaattatatcactgagggcatttatgctactttttctgaaacagctgatactaaaggatcgaggggtcaaggaagatgaacttcagagtatattaaattacctacttacgatgcatgaggatgaaaatattcatgatgtgctacagttactggtggctttaatgtcggaacacccagcctcaatgataccagcatttgatcaaagaaatggaataagggtgatctacaaattattggcttctaaaagtgaaagtatttgggttcaagctttgaaggttctgggatactttctgaagcatttaggtcacaagagaaaagttgaaattatgcacacccatagtcttttcactcttcttggagaaaggctgatgttgcatacaaacactgtgactgtcaccacatacaacacactttatgagatcttgacagaacaagtatgtactcaggtcgtacacaaaccacatccagagccagattctacagtgaaaattcagaatccaatgattcttaaagtggtggcaactttgttaaaaaactctacaccaagtgcagagctgatggaagttcgtcgtttatttttatctgatatgataaaacttttcagtaacagccgtgaaaatagaagatgcttattgcagtgttcagtgtggcaggattggatgttttctcttggctatatcaatcctaaaaattctgaggaacagaagattaccgaaatggtctacaatatcttccggattcttttgtatcatgcaataaaatatgaatggggaggctggagagtctgggtggataccctctcaatagcccattccaaggtcacttatgaagctcataaggaatacctagccaaaatgtatgaggaatatcaaagacaagaggaggaaaacattaaaaagggaaagaaagggaatgtgagcaccatctctggtctttcatcacagacaacaggagcaaaaggtggaatggaaattcgagagatagaagatctttcacaaagccagagcccagaaagtgagaccgattaccctgtcagcacagatactcgagacttactcatgtcaacaaaagtgtcagatgatattcttggaaattcagatagaccaggaagtggtgtacatgtggaagtacatgatcttttagtagatataaaagcagagaaagtggaagcaacagaagtaaagctcgatgatatggatttatcaccggagactttagtaggtggagagaatggtgcccttgtggaggttgaatctctgttggataatgtatatagtgctgctgttgagaaactccagaacaatgtacatggaagtgttggtatcattaaaaaaaatgaagaaaaggataatggtccattgataacattagcagatgagaaagaagaccttcccaatagtagtacatcatttctctttgataaaatacccaaacaggaggaaaaactacttcctgaactttctagcaatcacattattccaaatattcaggacacacaagtacatcttggtgttagtgatgatcttggattgcttgctcacatgaccggtagcgtagacttaacttgtacatccagtataatagaagaaaaagaattcaaaatccatacaacttcagatggaatgagcagtatttctgaaagagacttagcgtcatcaactaaggggctggagtatgctgaaatgactgctacaactctggaaactgagtcttctagtagcaaaattgtaccaaatattgatgcaggaagtataatttcagatactgaaaggtctgacgatggcaaagaatcaggaaaagaaatccgaaaaatccaaacaactactacgacacaagctgtgcagggtcggtctatcacccaacaagaccgagatctccgagttgatttaggatttcgaggaatgccaatgactgaggaacagcgacgccagtttagcccaggtccacggactacaatgtttcgtattcctgagtttaaatggtctccaatgcaccagcggcttctcactgatttactatttgcattagaaactgatgtacatgtttggaggagccattctacaaagtctgtaatggattttgtcaatagcaatgaaaatattatttttgtacataacacaattcacctcatttcccaaatggtagacaacatcatcattgcttgtggaggaattttacctttgctctctgctgctacatcaccaactgtaagtactaagacggaattggaaaatattgaagtgacacaaggcatgtcagctgagacagcagtaactttcctcagccggctgatggctatggttgatgtacttgtgtttgcaagctctctaaattttagtgagattgaagctgagaaaaacatgtcttctggaggtttaatgcgacagtgcctaagattagtttgttgtgttgctgtgagaaactgtttagaatgtcggcaaagacagagagacaggggaaataaatcttcccatggaagcagtaaacctcaggaagttcctcaaagtgtgactgctacagcagcttcgaagactccattggaaaatgttccaggtaacctttctcctattaaggatccggatagacttcttcaggatgttgatatcaatcgccttcgtgctgttgtctttcgggatgtggatgatagcaaacaagcacagttcttagctctggctgttgtttacttcatttcggttctgatggtttccaagtatcgtgacatattagaaccccagagagagactacaagaactggaagccaaccaggtagaaacatcaggcaagaaataaattcaccaacaagtacagttgtggtcataccatctatccctcatccaagtttgaaccatggattccttgccaagttaattcctgagcagagctttggccactcattttacaaagaaacacctgctgcatttccagacaccataaaagaaaaagaaacaccaactcctggtgaagatattcaggtagaaagttcaattccccatacagattcaggaattggagaggagcaagtggctagcatcctgaatggggcagaattagaaacaagtacaggccctgatgccatgagtgaactcttatccactttgtcatccgaagtgaagaaatcacaagagagcttaactgaaaatcctagtgaaacgttgaagcctgcaacatccatatctagcattagtcaaaccaaaggcatcaatgtgaaggaaatactgaaaagtcttgtggctgctccagttgaaatagcagaatgtggccctgaacctatcccatacccagatccagcattgaagagagaaacacaagctattcttcctatgcagtttcattcctttgacaggagtgttgtggtgcctgtaaagaaaccacctccaggtagtttagctgtaaccactgtgggagccactactgctggaagtgggctgccaacaggcagtacctctaatatatttgctgctactggagctacaccaaaaagtatgattaatacaacaggtgccgtggattcagggtcctcctcctcttcctcctcttctagttttgtgaatggtgctactagcaaaaaccttccagctgtacaaactgttgctccaatgccagaagattcagctgaaaatatgagcatcactgcaaaacttgaaagagcgttagaaaaagttgctcctcttcttcgtgaaatttttgtagactttgccccattcctatctcgtacacttcttggcagtcatggacaagagctattgatagaaggccttgtttgtatgaagtccagcacatctgtggttgagcttgttatgctgctttgttctcaggaatggcaaaactctattcagaagaatgcaggacttgcatttattgagctcatcaatgaaggaagattactgtgccatgctatgaaggaccatatagtccgtgttgcaaatgaagctgagtttattttgaacagacaaagagccgaggatgtacataaacatgcagagtttgagtcacagtgtgcccaatatgctgctgatagaagagaggaagaaaagatgtgtgaccatcttatcagtgctgctaaacatcgagatcatgtaacagcaaatcagctgaaacagaagattctcaatattctcacaaataaacatggtgcttggggagcagtttctcatagccaattgcatgatttctggcgtttggattactgggaagatgatcttcgtcgaaggagacgatttgttcgcaatgcatttggctccactcatgctgaagcattgctgaaagctgcaatagaatatggcacggaagaagatgtagtaaagtcaaagaaaacattcagaagtcaagcaatagtgaaccaaaatgcagagacagaacttatgctggaaggagacgatgatgcagtcagtctgctacaggagaaagaaattgacaaccttgcaggcccagtggttctcagcacccctgcccagctcatcgctcccgtggtggtggccaaggggactctctccatcaccacgacagaaatctacttcgaggtagatgaggatgattctgccttcaagaagatcgacacgaaagttcttgcatacactgagggacttcacggaaaatggatgttcagcgagatacgagctgtattttcaagacgttaccttctacaaaacactgctttggaagtatttatggcaaaccgaacctcagttatgtttaatttccctgatcaagcaacagtaaaaaaagttgtctatagcttgcctcgggttggagtagggaccagctatggtctgccacaagccaggaggatatcattggccactcctcgacagctttataaatcttccaatatgactcagcgctggcaaagaagggaaatttcaaacttcgaatatttgatgttccttaatactattgcaggacggacatataatgatctgaaccaatatccagtgtttccgtgggtgttaaccaactatgaatcagaagagttggacctgactcttccaggaaacttcagggatctatcaaagccaattggtgctttgaaccccaagagagctgtgttttatgcagagcgttatgagacatgggaagatgatcaaagcccaccctaccattataatacccattattcaacagcaacatctactttatcctggcttgttcgaattgaacctttcacaaccttcttcctcaatgcaaatgatggaaaatttgatcatccagatcgaaccttctcatccgttgcaaggtcttggagaactagtcagagagatacttctgatgtaaaggaactaattccagagttctactacctaccagagatgtttgtcaacagtaatggatataatcttggagtcagagaagatgaagtagtggtaaatgatgttgatcttcccccttgggcaaaaaaacctgaagactttgtgcggatcaacaggatggccctagaaagtgaatttgtttcttgccaacttcatcagtggatcgaccttatatttggctataagcagcgaggaccagaagcagttcgtgctctgaatgtttttcactacttgacttatgaaggctctgtgaacctggatagtatcactgatcctgtgctcagggagattccagaagcttatttcattagagacccccacactttccttcttacaaaggactttattaaggccatggaggcacagatacagaactttggacagacgccatctcagttgcttattgagccacatccgcctcggagctctgccatgcacctgtgtttccttccacagagtccgctcatgtttaaagatcagatgcaacaggatgtgataatggtgctgaagtttccttcaaattctccagtaacccatgtggcagccaacactctgccccacttgaccatccccgcagtggtgacagtgacttgcagccgactctttgcagtgaatagatggcacaacacagtaggcctcagaggagctccaggatactccttggatcaagcccaccatcttcccattgaaatggatccattaatagccaataattcaggtgtaaacaaacggcagatcacagacctcgttgaccagagtatacaaatcaatgcacattgttttgtggtaacagcagataatcgctatattcttatctgtggattctgggataagagcttcagagtttattctacagaaacagggaaattgactcagattgtatttggccattgggatgtggtcacttgcttggccaggtccgagtcatacattggtggggactgctacatcgtgtccggatctcgagatgccaccctgctgctctggtactggagtgggcggcaccatatcataggagacaaccctaacagcagtgactatccggcaccaagagccgtcctcacaggccatgaccatgaagttgtctgtgtttctgtctgtgcagaacttgggcttgttatcagtggtgctaaagagggcccttgccttgtccacaccatcactggagatttgctgagagcccttgaaggaccagaaaactgcttattcccacgcttgatatctgtctccagcgaaggccactgtatcatatactatgaacgagggcgattcagtaatttcagcattaatgggaaacttttggctcaaatggagatcaatgattcaacacgggccattctcctgagcagtgacggccagaacctggtcaccggaggggacaatggggtagtagaggtctggcaggcctgtgacttcaagcaactgtacatttaccctggatgtgatgctggcattagagcaatggacttgtcccatgaccagaggactctgatcactggcatggcttctggtagcattgtagcttttaatatagattttaatcggtggcattatgagcatcagaacagatactgaagataaaggaagaaccaaaagccaagttaaagctgagagcacaagtgctgcatggaaaggcaatatctctggtggaaaaaactcgtctacatcgacctccgtttgtacattccatcacacccagcaatagctgtacattgtagtcagcaaccattttactttgtgtgttttttcacgactgaacaccagctgctatcaagcaagcttatatcatgtaaattatatgaattaggagatgttttggtaattatttcatatattgttgtttattgagaaaaggttgtaggatgtgtcacaagagacttttgacaattctgaggaaccttgtgtccagttgttacaaagtttaagctttgaacctaacctgcatcccatttccagcctcttttcaagctgagaaaaaaaaaaaaaaacacgtttgatactttgtacatcagatgcatcttatttaaaagggatacttttgtaaaagtaaaaccttgtataaagaacaaaatgtttcttaattttattgtggagttacaacttgcatgttccttactcctgttggcttgatggaacaggtgcattcacactatgaaacagaaagatctgtccaaggacacagcttgtatgaaagggttgaatttgggctccatcagtaatttttgacattttcaccaaaatatagtttgcactttttaatctaaagtcatcccttctgagtgaaatttgctcataaagcatttggatactaagccattatttgccattttgggtactttatacaaagaaaattcagccctaccctgcataatttgaagacacagcagaaagggggcttagggatgaggtcctggtttttcttgtataaataggagtcatgggcgttagttctgtagtaataacttcccagcacctggacatctcttccagagttatcccactggcttggtgtgtatacattaggggaggataatctgatgctaactttttttttctctttggttcttgaatagcttagtttctttaataacaagtcaaactttattacaacaataactgaagttattcttttaggttctcgtgaaattctcactgaaagccacattcttagcctaaggcatttcatcttttatgatataaaatgatggctatcaaatgattttccatacattgtactgatcaagttatacacccaggggtatatacactttcttcatgtttcttctttgtatatttggtgactgtatcgtcatagatgtacatattgtgtcggtagggctatgaggcatgttacaggaatgtaattttctcagaatttacactcactcgcagtcatttatttaaaaagataaaacaagataatgggttctttgtattggcactttgcaccagaaacatatcattatttattgatgtgattacttatttgttatccaccttgtactagtaagttttagcactgaattccttcttcactgttgtttgtatttatgaaattctgaaattatggggaatcagcgtaatgattaagttattcatcaccaggctgtaagcaatatcttgagtttgtagcttagaattgggaggatacttaacatctggaagacaagttcatttcatcttgagatcatggtgaaatattttggatatataaattccttaagctattgtaaccatgttttattgcaaagatgtaaaatatgccagatgtgtgtgagttggaaatcaaaaaaagaaaaataaaatatgcaaagaattc

SEQ ID NO: 279993 - protein, 524 aa, Artificial Sequence
  derived and/or modified sequence
MFVNSNGYNLGVREDEVVVNDVDLPPWAKKPEDFVRINRMALESEFVSCQLHQWIDLIFGYKQRGPEAVRALNVFHYLTYEGSVNLDSITDPVLREIPEAYFIRDPHTFLLTKDFIKAMEAQIQNFGQTPSQLLIEPHPPRSSAMHLCFLPQSPLMFKDQMQQDVIMVLKFPSNSPVTHVAANTLPHLTIPAVVTVTCSRLFAVNRWHNTVGLRGAPGYSLDQAHHLPIEMDPLIANNSGVNKRQITDLVDQSIQINAHCFVVTADNRYILICGFWDKSFRVYSTETGKLTQIVFGHWDVVTCLARSESYIGGDCYIVSGSRDATLLLWYWSGRHHIIGDNPNSSDYPAPRAVLTGHDHEVVCVSVCAELGLVISGAKEGPCLVHTITGDLLRALEGPENCLFPRLISVSSEGHCIIYYERGRFSNFSINGKLLAQMEINDSTRAILLSSDGQNLVTGGDNGVVEVWQACDFKQLYIYPGCDAGIRAMDLSHDQRTLITGMASGSIVAFNIDFNRWHYEHQNRY

SEQ ID NO: 279994 - protein, 1159 aa, Artificial Sequence
  derived and/or modified sequence
MYLSICCCFLLWAPALTLKNLNYSVPEEQGAGTVIGNIGRDARLQPGLPPAERGGGGRSKSGSYRVLENSAPHLLDVDADSGLLYTKQRIDRESLCRHNAKCQLSLEVFANDKEICMIKVEIQDINDNAPSFSSDQIEMDISENAAPGTRFPLTSAHDPDAGENGLRTYLLTRDDHGLFGLDVKSRGDGTKFPELVIQKALDREQQNHHTLVLTALDGGEPPRSATVQINVKVIDSNDNSPVFEAPSYLVELPENAPLGTVVIDLNATDADEGPNGEVLYSFSSYVPDRVRELFSIDPKTGLIRVKGNLDYEENGMLEIDVQARDLGPNPIPAHCKVTVKLIDRNDNAPSIGFVSVRQGALSEAAPPGTVIALVRVTDRDSGKNGQLQCRVLGGGGTGGGGGLGGPGGSVPFKLEENYDNFYTVVTDRPLDRETQDEYNVTIVARDGGSPPLNSTKSFAIKILDENDNPPRFTKGLYVLQVHENNIPGEYLGSVLAQDPDLGQNGTVSYSILPSHIGDVSIYTYVSVNPTNGAIYALRSFNFEQTKAFEFKVLAKDSGAPAHLESNATVRVTVLDVNDNAPVIVLPTLQNDTAELQVPRNAGLGYLVSTVRALDSDFGESGRLTYEIVDGNDDHLFEIDPSSGEIRTLHPFWEDVTPVVELVVKVTDHGKPTLSAVAKLIIRSVSGSLPEGVPRVNGEQHHWDMSLPLIVTLSTISIILLAAMITIAVKCKRENKEIRTYNCRIAEYSHPQLGGGKGKKKKINKNDIMLVQSEVEERNAMNVMNVVSSPSLATSPMYFDYQTRLPLSSPRSEVMYLKPASNNLTVPQGHAGCHTSFTGQGTNASETPATRMSIIQTDNFPAEPNYMGSRQQFVQSSSTFKDPERASLRDSGHGDSDQADSDQDTNKGSCCDMSVREALKMKTTSTKSQPLEQEPEECVNCTDECRVLGHSDRCWMPQFPAANQAENADYRTNLFVPTVEANVETETYETVNPTGKKTFCTFGKDKREHTILIANVKPYLKAKRALSPLLQEVPSASSSPTKACIEPCTSTKGSLDGCEAKPGALAEASSQYLPTDSQYLSPSKQPRDPPFMASDQMARVFADVHSRASRDSSEMGAVLEQLDHPNRDLGRESVDAEEVVREIDKLLQDCRGNDPVAVRK

SEQ ID NO: 279995 - DNA, 3480 bp, Artificial Sequence
  derived and/or modified sequence
atgtacttgtcaatctgttgttgctttctcttgtgggcccctgcgctgacgcttaagaatcttaactatagcgttcccgaggagcagggcgctggtaccgtgataggtaatattgggcgcgatgccaggctgcagcctggactccctcctgccgagcgcgggggaggcggcagatccaaatccgggtcataccgcgtcctcgagaacagcgcccctcacctacttgacgtggatgcggacagcggtctactctatacaaaacaaagaatagatagggagtccctttgtagacacaacgccaagtgtcaactatccctggaggtattcgcaaacgacaaagaaatctgcatgatcaaggtcgagattcaggacataaacgataatgcgccgtcgttttcatccgatcagattgagatggacatttcagaaaatgccgcaccaggaaccaggtttcccctgacatcggcgcacgatcccgacgccggggagaacgggctaagaacatacctgttgactcgggacgaccacgggctcttcgggttagacgtgaaatcacgcggtgatgggacaaagtttcctgaactggtcatccagaaggccttggaccgtgagcagcagaatcatcataccctcgtgttaacagccctggatggcggagagcctccacgcagcgccacagtccagatcaacgtgaaagtaatcgattcaaacgataactctcctgtctttgaagccccttcttacctggtggaactcccagaaaacgctcctctgggtaccgttgtgatagaccttaacgccaccgatgccgacgagggcccaaacggcgaggtactgtatagcttttcttcctacgtcccagatcgcgtgagagagctctttagcatcgaccccaagacaggcctaatccgggtgaaggggaacctggattatgaagagaacggaatgctggaaatcgatgttcaggcacgggatttggggcctaacccaattccagcccactgcaaggtcacagtcaaattgatcgacagaaacgacaatgcaccttcaattggcttcgtgtcggttagacagggggcactctctgaagccgcccctcctgggactgtcatcgccctggtcagagttacagatagggattctggcaaaaatggacaacttcagtgtcgggttctgggcggtgggggcacggggggcggcggaggattgggcggtccaggcggttcggtgccgtttaaattggaagaaaattatgacaacttctatactgtggtcaccgatcgtcccttggaccgcgagacacaggacgaatacaatgtgaccatcgtggctcgggatggaggttctcccccgctgaatagcaccaagtcattcgctattaagattttggacgagaatgacaatcccccgcgttttacaaagggtctgtacgtattgcaggttcatgaaaacaatattcccggagaatatctaggtagtgtcctggcccaggaccccgacctgggccaaaatggaacggtcagttactccatcctcccaagccacatcggggatgtttctatatatacatatgtcagcgtcaacccaaccaacggcgccatttatgcgcttcgaagctttaatttcgaacagactaaggccttcgaattcaaagtgcttgcgaaagactcgggagctcctgcccacttagagtccaatgccaccgtgcgggttactgtcctagacgtgaatgataacgccccagtcatcgtcctgccaacgctgcagaatgataccgcagagctgcaggtccccagaaatgctggcctgggatacctagtgtccaccgtgcgggcactggacagtgacttcggggaatctgggcggctgacctatgaaattgtggacggaaatgacgaccacctattcgaaatagaccccagctctggcgagatacgcacattgcacccattttgggaagatgtcaccccagtggtcgaactggttgtgaaggtgacggaccacggaaagcccacactgagtgctgtggcaaaactgatcattcggagcgtgtccggaagtctccctgagggcgtgccgcgggtgaacggcgagcagcaccactgggatatgtcactgccccttatagtgacattgtcgacaatttctattatcctgcttgcagcgatgatcacaattgccgtgaaatgcaaacgggagaacaaagaaattcgcacatacaattgtcgcatcgccgaatactcacacccacagctcgggggcggcaaaggcaaaaaaaagaagatcaacaaaaatgatatcatgctggtgcaaagtgaggtcgaagagaggaatgccatgaacgtgatgaacgtggtgtcatctcctagtttggctacttcccctatgtatttcgactaccagacgcgcctgccccttagctcacccaggagcgaggtgatgtatctaaaacccgcatctaataatctgacagtcccacaggggcatgccggatgccacacctcctttaccggccagggaaccaatgcatctgaaactccagcgacgaggatgagtattatccagaccgataattttcctgctgagccaaactatatgggctcgcggcagcagttcgtacagtcctcctcaacatttaaagatcccgaacgcgctagtctgcgagattcaggccacggagattctgaccaggccgactctgatcaggacacgaacaagggttcatgttgcgacatgtccgtgagagaggcactgaagatgaagacaacaagcactaaatcgcagccgcttgagcaagaacctgaagagtgcgtgaactgcactgacgagtgccgggtgttggggcacagtgaccggtgctggatgccccaattccctgcagccaaccaagctgaaaacgccgattacagaaccaatttatttgtgcctaccgtggaggccaatgtagagactgagacatacgagactgtgaatccaacaggcaagaagacattctgcacctttggtaaagacaagagagaacacaccattctcatagcaaacgtcaaaccatacctgaaggccaaaagagccctctcacctctgctgcaggaagtgccctcagcttcttcttcccccaccaaagcttgtatcgagccttgtacttctactaaaggaagtctcgacggctgtgaagctaaacccggcgccctggcagaagcttcctcacaatacctgcccaccgacagccagtacctgtccccctccaaacaaccccgcgaccccccttttatggccagcgaccagatggcgcgggtgttcgctgacgttcacagccgggcttcaagggattcaagcgaaatgggagcggtgcttgagcagttagatcatccgaaccgcgatctcggcagggagtccgtcgacgcggaggaagtggtgagggaaatcgacaagcttctgcaggattgccgcggaaatgatccggtggctgtgaggaagtag

SEQ ID NO: 279996 - DNA, 3480 bp, Artificial Sequence
  derived and/or modified sequence
atgtacctgagcatctgctgctgcttcctgctgtgggccccagccctgaccctgaagaacctgaactacagcgtgcctgaggagcagggcgccggcaccgtgattggcaacatcggcagagatgcccggctgcagcccggcctgcccccagctgagcggggcggcggcggccgcagcaagagcggcagctacagagtgctggagaacagcgccccccacctgctggatgtggatgctgacagcggcctgctgtacaccaagcagagaattgaccgggagagcctgtgccgccacaatgccaagtgccagctgagcctggaggtgtttgccaatgacaaggagatctgcatgatcaaggtggagatccaggacatcaatgacaatgcccccagcttcagcagtgaccagatcgagatggacatcagtgaaaatgctgcccctggcacccgcttccccctgaccagcgcccatgaccctgatgctggagaaaatggcctgcggacctacctgctgaccagagatgaccacggcctgtttggcctggatgtgaagagcagaggagatggcaccaagtttcctgagctggtgatccagaaggccctggaccgggagcagcagaaccaccacaccctggtgctgacagccctggatggaggagagcccccaagaagtgccaccgtgcagatcaacgtgaaggtgattgacagcaatgacaacagccctgtgtttgaggcccccagctacctggtggagctgcctgaaaatgcccccctgggcaccgtggtgattgacctgaatgccacagatgctgatgagggccccaatggagaggtgctgtacagcttcagcagctatgtgcctgacagagtgcgggagctgttcagcattgaccccaagacaggcctcatccgggtgaagggcaacctggactatgaagaaaatggcatgctggagattgatgtgcaggcccgggacctgggccccaaccccatcccagcccactgcaaggtgacagtgaagctgattgacagaaatgacaatgcccccagcattggatttgtgtctgtgcggcagggcgccctgtctgaggccgcccctcctggcaccgtgattgccctggtgcgggtgacagaccgggacagcggcaagaatggccagctgcagtgccgggtgctgggcggcggcggcactggaggcggcggcggcctgggcggccctgggggctctgtgcccttcaagctggaggagaactatgacaacttctacacagtggtgacagaccggcccctggaccgggagacccaggatgagtacaacgtgaccatcgtggccagagatggcggcagcccccccctgaacagcaccaagagctttgccatcaagatcctggatgaaaatgacaaccccccacgcttcaccaagggcctgtatgtgctgcaggtgcatgagaacaacatccctggagagtacctgggctctgtgctggcccaggaccctgacctgggccagaatggcaccgtgtcctacagcatcctgcccagccacatcggagatgtgtccatctacacctacgtgtctgtgaaccccaccaatggagccatctatgccctgcgctccttcaactttgagcagaccaaggcctttgagttcaaggtgctggccaaggacagcggggccccagcccacctggagagcaatgccaccgtgcgggtgacagtgctggatgtgaatgacaatgcccctgtgattgtgctgcccaccctgcagaatgacacagctgagctgcaggtgcccagaaatgccggcctgggctacctggtgtccacagtgcgggccctggacagcgactttggagagagcggccgcctgacctatgaaattgtggatggaaatgatgaccacctgtttgaaattgaccccagcagcggggagatccgcaccctgcaccccttctgggaggatgtgacccctgtggtggagctggtggtgaaggtgacagaccacggcaagcccaccctgtctgctgtggccaagctgatcatccgctctgtgtctggcagcctgcctgagggcgtgccccgggtgaatggagagcagcaccactgggacatgagcctgcccctgattgtgaccctgagcaccatcagcatcatcctgctggccgccatgatcaccatcgctgtgaagtgcaagcgggagaacaaggagatccgcacctacaactgcagaattgctgagtacagccacccccagctgggcggcggcaagggcaagaagaagaagatcaacaagaatgacatcatgctggtgcagagcgaggtggaggagagaaatgccatgaatgtgatgaatgtggtgagcagccccagcctggccaccagccccatgtactttgactaccagacccggctgcccctgagcagccccaggtctgaggtgatgtacctgaagccagccagcaacaacctgactgtgccccagggccacgccggctgccacaccagcttcaccggccagggcaccaatgccagcgagaccccagccaccaggatgagcatcatccagacagacaacttccctgctgagcccaactacatgggcagccggcagcagtttgtgcagagcagcagcaccttcaaggaccctgagcgggccagcctgcgggacagcggccacggggacagcgaccaggccgacagcgaccaggacaccaacaagggcagctgctgtgacatgtctgtgcgggaggccctgaagatgaagaccaccagcaccaagagccagcccctggagcaggagcctgaggagtgtgtgaactgcacagatgaatgtcgggtgctgggccacagcgaccgctgctggatgccccagtttcctgctgccaaccaggctgaaaatgctgactaccgcaccaacctgtttgtgcccaccgtggaggccaacgtggagacagagacctatgaaacagtgaaccccaccgggaagaagaccttctgcaccttcggcaaggacaagcgggagcacaccatcctgattgccaacgtgaagccctacctgaaggccaagagggccctgagccccctgctgcaggaggtgcccagcgccagcagcagccccaccaaggcctgcatcgagccctgcaccagcaccaagggcagcctggatggctgtgaggccaagccaggggccctggccgaggccagcagccagtacctgcccacagacagccagtacctgagccccagcaagcagccccgggacccccccttcatggccagtgaccagatggcccgggtgtttgctgatgtgcacagccgggccagccgggacagcagcgagatgggcgctgtgctggagcagctggaccaccccaacagagacctgggccgggagagcgtggatgctgaggaggtggtgcgggagattgacaagctgctgcaggactgcagaggaaatgaccctgtggccgtgaggaagtag

SEQ ID NO: 279997 - DNA, 3480 bp, Artificial Sequence
  derived and/or modified sequence
atgtacctgagcatctgctgctgcttcctgctgtgggcccccgccctcacacttaaaaaccttaactattccgttccagaagagcaaggcgccggtacagtaattggcaacatcggcagggacgcccgcctccagccaggcttaccgccagccgagcggggtggaggaggccgatctaagtctgggtcctaccgagtcctcgagaacagcgcacctcatctgttggatgtagacgcagactctgggctgttgtatacgaaacagcgcattgaccgcgagtctctgtgcagacataacgccaagtgtcagcttagtttagaggttttcgcaaacgacaaagagatctgcatgattaaggtcgagatccaagacatcaacgacaatgccccaagcttttcaagcgaccagattgaaatggacatcagcgagaacgctgcccccggcactaggtttccattgacttccgcccatgaccccgacgccggggagaatgggctgagaacgtatctgctaacaagagacgaccacggcctgttcggcctggatgtcaaaagtcgcggcgacggcactaagtttccggaattagtgatacaaaaagctcttgatcgtgagcagcagaaccatcatacactcgtactaaccgccttagacgggggagagccaccaaggagcgcgaccgtccaaattaatgtaaaggtaatagactccaacgacaacagccctgtatttgaggcaccaagctatcttgttgaactgccggaaaatgcccctctgggaacggtggtgattgacttgaacgctacagacgccgatgaggggccgaacggcgaggtgttgtattccttctcttcctatgtccctgatcgagtaagggagcttttttccattgacccaaagaccggcctgattagggtgaaggggaatctggattatgaggagaatggcatgctggaaattgacgtgcaggcccgtgacctgggcccgaatcctatcccagcacactgtaaggtaacggtgaaattgatcgatagaaatgataatgccccctcaattggcttcgtctccgtgcggcagggagcactgtccgaagcagcgcctcccggcacagtcatcgcgctggtgagggtgaccgacagggacagcggaaagaacggccaattgcagtgtagggtgctgggaggaggggggaccggaggagggggcgggcttgggggccctgggggcagtgttccatttaagctggaagagaactatgataacttctacaccgtcgttactgataggccactcgatcgtgaaacacaagatgagtacaacgtgactatagtcgcgcgggatgggggatcccctcccctgaatagtaccaagagttttgctattaaaatcctggatgaaaacgataacccccctagattcactaagggcctgtacgtgctgcaagtacacgagaacaacattccgggtgagtacctgggaagtgtattggcccaggaccccgatcttggccagaatgggaccgtgtcctatagtattctccccagtcatattggggacgtttcgatttacacctacgtctctgtgaacccaaccaatggggctatctacgctttgcgtagttttaacttcgaacagactaaggccttcgaattcaaggtgttagcaaaggattccggagcacccgcccatctcgagtctaacgctacagtgagagtgactgttttggacgttaatgataatgccccagtaattgtcctgcctactctacagaatgatacggcggaactgcaggtgccgaggaacgcaggactcggctacctagtatccaccgttagggccctggacagtgatttcggcgagtcaggcaggctgacatacgagattgtggatgggaatgatgaccacctctttgagatcgatccatcctctggggagattcgtactcttcacccattttgggaggacgtgacacctgtcgtggagctggttgttaaagtgaccgaccacgggaaaccaaccctcagcgctgtagcgaaactcataattaggtccgtttcagggtccctgccggaaggcgttccaagagtgaacggggagcagcaccattgggatatgtcattgccgttaatcgtcactttatctacgatctcgatcatcttactcgctgccatgatcaccatcgccgttaagtgcaagcgcgagaacaaagagattagaacttacaattgtaggatagccgagtactcacacccccagctcggaggcgggaagggaaagaaaaagaagattaacaagaatgatatcatgttggtgcagtctgaagtagaggagcgaaacgcaatgaatgttatgaatgtggtgtcttccccaagtttagcaacctcgccaatgtacttcgactaccagactcgtctgccacttagttcccctaggtccgaagttatgtacctgaaacctgctagcaataaccttacggtgccccagggacacgcaggttgtcacacctcctttactgggcaggggacaaacgcatccgaaacaccagcaactaggatgtcaatcatccagacggataatttccctgcggagccaaattacatgggatcccgacagcagtttgtgcagagtagcagcacctttaaagaccctgaaagagcctccctgcgtgattccggacacggcgattcagatcaagcggatagtgatcaggatacgaacaagggctcatgttgtgacatgagcgttagagaggcactgaagatgaaaactacaagtacaaagtcccaacccctcgagcaggaacctgaagagtgtgtcaattgcactgacgagtgtcgggtgcttggccattcagacaggtgctggatgcctcagtttcccgcagcaaaccaggccgaaaatgccgattatcggacgaacctgttcgtgcctacggtagaggcaaatgtggagactgaaacatacgaaactgtcaacccaacaggcaaaaagacgttctgtacatttggtaaagacaaaagggaacatacaatcctgatagcaaacgtaaagccatacctaaaggctaagagggcgctgtctccactgctgcaagaggtacctagtgcctcatcgtccccgacaaaagcatgcattgagccctgtacctcgaccaagggtagcctggatggatgcgaagctaaacccggcgccctggccgaagcatctagtcagtaccttcctactgattcgcagtatttgagtccgagtaagcagccacgggaccccccatttatggcgtcagatcagatggcccgggtctttgctgatgtgcacagccgggcgagcagggattcctctgaaatgggagcagtgctggagcagttagaccaccccaatcgagatctcgggagggagtccgtcgatgctgaggaggtcgtccgggaaatcgacaagctcttgcaagattgtcgtggcaacgacccagtcgcagtgcgaaagtag

SEQ ID NO: 279998 - DNA, 3480 bp, Artificial Sequence
  derived and/or modified sequence
atgtatctttcgatttgttgctgcttcttactgtgggcccctgccttgacactcaagaacttgaattacagcgtccctgaggagcaaggggctgggacagtcatcggtaatattgggagggacgcacgcctccagcccggtctgcctcctgctgagcgcggaggaggaggcagatctaagtctggaagctaccgcgttctggagaattctgcccctcatctgcttgatgtcgatgcagacagtggcctgctatataccaagcagagaatcgaccgagaatctctttgtaggcacaatgcaaagtgtcagttatctctggaggtgtttgcaaacgataaggaaatctgtatgattaaagtagaaatccaggatattaacgacaatgccccttctttcagctccgatcagatcgagatggacatcagcgagaacgcggctccaggcaccaggttcccactcacaagcgcccatgacccggacgctggggaaaacggtttaaggacgtatcttctgactagggacgaccacggcctgtttggccttgatgtgaaaagcagaggagatgggactaaatttcccgaattggtcatacagaaagctttggaccgcgaacagcaaaatcaccatacgctggtccttaccgccctagacgggggagaaccaccgagatccgccaccgtgcagatcaacgtcaaagtcatcgactctaacgataacagtcccgtttttgaggccccaagctacttggtggagctccctgagaacgcccctttgggcaccgttgtcatcgaccttaacgccacagacgccgacgaggggcctaatggagaggttctgtattcattctccagctacgtgcctgacagagtgagggaactgttttcaatagatcctaaaactgggctcatcagggtgaagggaaacctggattacgaggagaacggcatgcttgagatagatgtgcaggctcgtgacctgggcccaaacccaatcccagctcactgtaaagtcaccgttaagctcattgaccgaaacgataacgcgccttctattggtttcgtgagtgtacgacagggagccctctccgaagccgcaccacctggcaccgtcatcgctctggtccgggtgactgaccgcgattcaggcaagaacggacagctgcagtgcagggtactgggtggcggaggcactgggggtggcggaggcctggggggacccggaggaagcgtgcctttcaagttagaagaaaactatgacaacttttacaccgtggttacagataggccgctggatcgggagacacaggacgaatacaacgttactatcgtagcacgagacggcggtagccctcccctaaacagtactaagtcttttgccatcaaaatcctcgatgagaacgacaaccctcccagattcaccaagggactgtatgtgctccaggtgcacgagaataacattcccggagagtacctggggagtgtgctggcgcaggatcctgacctgggtcaaaacggtaccgtcagttattcgatcctaccgagccacattggggacgtttccatctatacgtacgtgagcgtgaacccaaccaacggagccatttacgcccttcggagcttcaacttcgaacagactaaagctttcgaattcaaagtcttggctaaagactctggtgcacccgcacacctagaatccaacgccaccgtcagggttacagtcttggacgtgaatgataatgctccagtcatagtgctccccacattacagaatgacacagccgaactgcaggtacccaggaatgctggtttggggtacctggtgtcaaccgtgcgagccctggatagcgacttcggggaatcggggcgtctgacctacgagatcgtggacggcaacgacgaccacctgttcgagattgacccatccagcggagagatacggactttacatcccttctgggaggacgtgacccccgtggtcgagctcgtcgtcaaagtcaccgaccatgggaaacctacattgagcgcggtggctaagctaatcatccgcagcgtaagcggctctctgcctgagggagtgcccagagtcaacggggaacagcatcattgggatatgagcctccctcttattgtgacattgtcaactatttccattattctgctggccgctatgataactattgccgtgaagtgtaagagagagaacaaggaaatacgcacttacaattgtagaatcgcagaatattctcacccgcagttgggcggagggaaggggaagaagaaaaaaatcaacaagaacgacattatgctggtccagtctgaggtggaggaaagaaatgctatgaatgtgatgaatgtagtgtccagtcctagcctcgccaccagcccaatgtacttcgactaccaaacgcggttgccactgagcagtcctcgcagtgaagtgatgtaccttaaacccgctagtaataacctgaccgtgccacagggacatgctggctgccatacctcatttaccggacaaggcactaatgcgagcgaaacgcccgctacaagaatgtccatcattcagacagacaacttccctgccgagcccaattatatgggatctcgacaacagttcgtacagagttcctctacatttaaagacccagagagagcatctctgcgcgattctggacacggggactcggatcaggctgactctgatcaggatactaataaggggagttgctgcgacatgtcagttcgggaagccctgaaaatgaagacaacctctacaaagtctcagcctctggagcaggaacctgaggaatgtgttaactgcacagatgaatgtagagtgcttggccattccgatcgctgttggatgccacaattcccggcagcaaaccaggccgagaacgcggattaccggactaatctttttgtacccacagtggaagcaaacgtggaaactgaaacctatgagaccgtcaaccctaccgggaaaaagaccttctgcactttcggcaaagacaaacgggagcatacaatcctgattgcgaacgtgaagccatatcttaaagccaagagagccttgtctcccctgttgcaggaggtcccctccgcctcctcctcacccactaaagcttgcatagaaccgtgtactagtacaaagggaagcctggacgggtgtgaggccaaacctggcgctctagcggaagcaagcagtcaatatctgcccacagactcccagtatctgagtcccagcaagcagccccgagatccacctttcatggcttctgaccaaatggccagggtgtttgctgatgtgcactctcgcgcttccagggatagcagtgaaatgggcgctgtgcttgaacagctcgaccacccaaacagagacctaggcagggaaagcgtagatgctgaagaagtggtgagggaaatcgacaaactgcttcaggattgccgtgggaatgacccagtggccgtgcggaaatag

SEQ ID NO: 279999 - DNA, 7523 bp, Artificial Sequence
  derived and/or modified sequence
tcctgcccccaccttacaggtctgggatgtacctttccatctgttgctgctttcttctatgggcccctgccctcactctcaagaacctcaactactccgtgccggaggagcaaggggccggcacggtgatcgggaacatcggcagggatgctcgactgcagcctgggcttccgcctgcagagcgcggcggcggagggcgcagcaagtcgggtagctaccgggtgctggagaactccgcaccgcacctgctggacgtggacgcagacagcgggctcctctacaccaagcagcgcatcgaccgcgagtccctgtgccgccacaatgccaagtgccagctgtccctcgaggtgttcgccaacgacaaggagatctgcatgatcaaggtagagatccaggacatcaacgacaacgcgccctccttctcctcggaccagatcgaaatggacatctcggagaacgctgctccgggcacccgcttccccctcaccagcgcacatgaccccgacgccggcgagaatgggctccgcacctacctgctcacgcgcgacgatcacggcctctttggactggacgttaagtcccgcggcgacggcaccaagttcccagaactggtcatccagaaggctctggaccgcgagcaacagaatcaccatacgctcgtgctgactgccctggacggtggcgagcctccacgttccgccaccgtacagatcaacgtgaaggtgattgactccaacgacaacagcccggtcttcgaggcgccatcctacttggtggaactgcccgagaacgctccgctgggtacagtggtcatcgatctgaacgccaccgacgccgatgaaggtcccaatggtgaagtgctctactctttcagcagctacgtgcctgaccgcgtgcgggagctcttctccatcgaccccaagaccggcctaatccgtgtgaagggcaatctggactatgaggaaaacgggatgctggagattgacgtgcaggcccgagacctggggcctaaccctatcccagcccactgcaaagtcacggtcaagctcatcgaccgcaacgacaatgcgccgtccatcggtttcgtctccgtgcgccagggggcgctgagcgaggccgcccctcccggcaccgtcatcgccctggtgcgggtcactgaccgggactctggcaagaacggacagctgcagtgtcgggtcctaggcggaggagggacgggcggcggcgggggcctgggcgggcccgggggttccgtccccttcaagcttgaggagaactacgacaacttctacacggtggtgactgaccgcccgctggaccgcgagacacaagacgagtacaacgtgaccatcgtggcgcgggacgggggctctcctcccctcaactccaccaagtcgttcgcgatcaagattctagacgagaacgacaacccgcctcggttcaccaaagggctctacgtgcttcaggtgcacgagaacaacatcccgggagagtacctgggctctgtgctcgcccaggatcccgacctgggccagaacggcaccgtatcctactctatcctgccctcgcacatcggcgacgtgtctatctacacctatgtgtctgtgaatcccacgaacggggccatctacgccctgcgctcctttaacttcgagcagaccaaggcttttgagttcaaggtgcttgctaaggactcgggggcgcccgcgcacttggagagcaacgccacggtgagggtgacagtgctagacgtgaatgacaacgcgccagtgatcgtgctccccacgctgcagaacgacaccgcggagctgcaggtgccgcgcaacgctggcctgggctatctggtgagcactgtgcgcgccctagacagcgacttcggcgagagcgggcgtctcacctacgagatcgtggacggcaacgacgaccacctgtttgagatcgacccgtccagcggcgagatccgcacgctgcaccctttctgggaggacgtgacgcccgtggtggagctggtggtgaaggtgaccgaccacggcaagcctaccctgtccgcagtggccaagctcatcatccgctcggtgagcggatcccttcccgagggggtaccacgggtgaatggcgagcagcaccactgggacatgtcgctgccgctcatcgtgactctgagcactatctccatcatcctcctagcggccatgatcaccatcgccgtcaagtgcaagcgcgagaacaaggagatccgcacttacaactgccgcatcgccgagtacagccacccgcagctgggtgggggcaagggcaagaagaagaagatcaacaaaaatgatatcatgctggtgcagagcgaagtggaggagaggaacgccatgaacgtcatgaacgtggtgagcagcccctccctggccacctcccccatgtacttcgactaccagacccgcctgcccctcagctcgccccggtcggaggtgatgtatctcaaaccggcctccaacaacctgactgtccctcaggggcacgcgggctgccacaccagcttcaccggacaagggactaatgcaagcgagacccctgccactcggatgtccataattcagacagacaattttcccgcagagcccaattacatgggcagcaggcagcagtttgttcaaagtagctccacgtttaaggacccagaaagagccagcctgagagacagtgggcacggggacagtgatcaggctgacagtgaccaagacactaacaaaggctcctgctgtgacatgtctgttagggaggcactcaagatgaaaactacttcaactaaaagccaaccacttgaacaagaaccagaagagtgtgttaattgcacagatgaatgccgagtgcttggtcattctgacaggtgctggatgccacagttccctgcagccaatcaggctgaaaatgcagattaccgcacaaatctctttgtacctacagttgaagctaatgttgagactgagacttacgaaactgtgaatcccactgggaaaaagactttttgtacatttggaaaagacaagcgagagcacactattctcattgccaacgttaaaccttatttaaaagccaaacgtgccctgagccctctcctccaagaggtcccctcagcatcaagcagcccaaccaaggcgtgcatcgagccttgcacctcaacaaaaggctccctggatggctgtgaagcaaaaccaggagccctggctgaagcaagcagtcagtacttgcccactgacagtcaatatctgtcacctagtaagcaaccaagagaccctcccttcatggcttccgatcagatggcaagggtctttgcagatgtgcattccagagccagccgggattccagtgagatgggtgctgttcttgagcagcttgaccaccccaacagggatctgggcagagagtctgtggatgcagaggaagttgtgagagaaattgataagcttttgcaagactgccggggaaacgaccctgtggctgtgagaaagtgaaaaaagaaaaaaaaaaaggcattggcattttcttgtctcttctgttgatttaaaaatgatccctcctggtgataacccattttacagggatgaagaaagaccaatgctgctttaaggcttttagtgaacatctgaagtgcccacaagtatgttctttccactgctgatttctttttcagagataacaatggtttcgttttgaccaaacttgtattaggacagaattaatgatgcttaaagagaaaagaaaaaaagagagaagaaaaaggagagatgaaaaaggaggatgaggagaagaattaccttttgacaatctgttaggaaggtatgcagtgtgagaactgaagtatttctgatcactctcagactgtcctccgtgatttatgctgacttaactgtttacctataaaccccatacaaagcagggtcataatttgtgatctgtggtggatttctagcagtcatcacaggcttctactgaaagtcctgaaaagaccttgcagtagtccaagctacaccaaacattaacacatatttgtggtaaacatttctgtataaagttacctgacacacatataaacacaaggaacattccatatcattagtcgaaaacaaaaacaaaaaaaaaacctttggtcatttgtaagacatctcatgtcatataaaagttaaatgtaaaaagatacagtccattttgtcctgcacacacgtagactaattcacgtcattaaagaagaagaaaacttaaagatttaaaatgcctatttagcattttagtgtccaacaaagatttaaacaatgatgaatatgttttaaatttgacatagaaaagttctaaaaaatagttaccattgagtggtaagattcagagaaaattaacttgattaatatgttttattcatttgtggacactaaaatagctcaggaaagtgaaaatgtcttagacatacgcaagtcacatgaccatttaaatgtgcaaatgtaagaagattcaatgtgtttacatcaaatgacatattttattgatttattgcagattcagtgcatatgagccaaattgttgagtgtgtaagagctatattgtgtattttattaaattaatatatagttgtgttgcaaaaatatttgggcttatattgtaaatggcaagtgttgccttggtagctgtcgaactctatgagttttgttttttcctgcttccttttccccatggagtgtgggaagcagtgcctcagagcaaagtctcttgtttaatgtatagtctaccaagtactacagtacataatctgttcaaaatgtgtttgagtgagctgatggagctaactgaaaggtcaaaaattacatccatcagtcatggttatgtgcaagtccttgtagaagcttttattaaagtcatgctaaatcacaagaattgacatttgtaccaatatctgaaacttcttcatgttttttcaataacatacagcttctgcctgtgtagatattatgccatcagttggttctcaaaagtattttaagtgcttcagatgtgtgttcccattatattttgaaaacatgaaaaatgctttaatgcatgtatgtaccagcagtggttacttgcattgtgtagtgtttttcaagaggtctgggtcttaacaaaatgttttcctttatctcagtgctcttctgcctctttttgttggtgtcctttgagaacaatacaccttctattccttcatttggttacacctttccttgtgacatttagcgagtttcaaacttacttccatatgaggctaagaaacctcaaatttcaggaattgggaaaaataaaattagcacttgcagaagtagcagcagatgggaaaatgccttgattgacattttctttcagcatttaaaatttttggcattttacagcttcatgacaaacagttttgtgcccataccttagaaaatgtggtgctgagttaaataaaggctgtttgagcactggagcagaaaaatgcattatttgcaaactggtggataattttgtgccttctcttctggccaccaagccagtgtagaaacagcaaaaatgtcataaaaattcttatatttaaaacaaaaacaaaagcaaaaacaaacattgaattaaattaagttttgtaattttaaactttaaaaacttctactgaaaatatttccgccaaatgccatcaatattttagactgtacctcgtttgcaaaactgctttgagagggaagagtggacaactcccatcagccttattctcttgagaactatattttggttcctagtaacagcctttccaaagctctactcttggtttttattactcataaatgtttaaattagaaaagaagggaccttgtacatgtgaaacctaattgactctctatattttggacaatttatgtatctgaaatgtgttgtctctgttatatgatgttatttttgccaggagactacaggttgatttagcttgatagctgaaatttgatggaaaactgatttccatttagtcttaccaagtgttgcttctctcttactagacagatatccacttagtaaaatctaaagcagtatgtaaatgaaaccagcaaagagagtagggtttattttataaacattcttaatgctaagtaaccagttgttcaatttattatatgtgtctgaggacattaaaacaccataaggttgtaataattggttgtgccaatgtgtgagggatttacctttaggctctctgtcaccagtgatttactagtgttagctgtttaacacattatctgtatttagtagtgattatttatttacaagttggtggtaattcagcagtcaggactctaagcttttatagttgaattgaggaaatctcgcttttattcatttagctggcaactgcctttattgcagacctctggtgcttggctttcaaggaagcctatgagatgccaaaatcacacctttagagagcaccttgctctaataggtgatgcatgagcaaacagtgagatttgaaggggttttaacataatttagaatgtgaaaaaaatatcaattcatatctttcaagtactaacccctcaaaaaagcccacacatacaaaatatgtgatgtgataccactttgtcttttaggtctttaagtaactgaagttaagcacagaaaaaaaaatcacttcatggaaatttcagtaagaaacccaaacttctaaaaattgcttgcagatgagctaaaaaaaaaaaaaaaaaaaaaaagcaacaaaataaccttttcatcagagttaaaagtagtgagaatctgttagttatacgtataccaaagtaaacattaaagagacatatcatgcaatttcaaagaattctttcatgctatttcttaacctgacatttctaactttattgcaggcaatatacaaagattggctcactactccataggttaattgaattcctggttgagaaactaacttgttttgttttccaaaattagctgaaatcttgtaaaacatgacttccctttaaaggatctagatattgttcaatttaaaatatggcaccataaaaaagtcatgtagtaatagagcatatgcttttttagaaccaggttaaaagctgtttgttatctaatagagtaaaagttactgaggtcaacagatagacaggtctggcataatatatgcccagtcataatagtctaattatattcttttgacaacagacagcattcatcagagcactaattcgaatgagagttttggctatcaagatgtgttgattctaaatattattgaatgagacctgattaaagtctgactttcctggccccagtgttttgcaggttggctatttccattatcagcccatcactccataaagttcttagctgcaccaagtgattggtgaacaaggacaacaacaaaagcagcatacattgtatggatttatctcaacgctattgtttaatggctgtgtttaatgtgatctatctggaaaatgaggactccgaataaaaagctattactaata

SEQ ID NO: 280000 - DNA, 3480 bp, Artificial Sequence
  derived and/or modified sequence
atgtacctgagcatctgctgctgcttcctgctgtgggcccccgccctgaccctgaagaacctgaactacagcgtgcccgaggagcagggcgccggcaccgtgatcggcaacatcggcagagacgccagactgcagcccggcctgccccccgccgagagaggcggcggcggcagaagcaagagcggcagctacagagtgctggagaacagcgccccccacctgctggacgtggacgccgacagcggcctgctgtacaccaagcagagaatcgacagagagagcctgtgcagacacaacgccaagtgccagctgagcctggaggtgttcgccaacgacaaggagatctgcatgatcaaggtggagatccaggacatcaacgacaacgcccccagcttcagcagcgaccagatcgagatggacatcagcgagaacgccgcccccggcaccagattccccctgaccagcgcccacgaccccgacgccggcgagaacggcctgagaacctacctgctgaccagagacgaccacggcctgttcggcctggacgtgaagagcagaggcgacggcaccaagttccccgagctggtgatccagaaggccctggacagagagcagcagaaccaccacaccctggtgctgaccgccctggacggcggcgagccccccagaagcgccaccgtgcagatcaacgtgaaggtgatcgacagcaacgacaacagccccgtgttcgaggcccccagctacctggtggagctgcccgagaacgcccccctgggcaccgtggtgatcgacctgaacgccaccgacgccgacgagggccccaacggcgaggtgctgtacagcttcagcagctacgtgcccgacagagtgagagagctgttcagcatcgaccccaagaccggcctgatcagagtgaagggcaacctggactacgaggagaacggcatgctggagatcgacgtgcaggccagagacctgggccccaaccccatccccgcccactgcaaggtgaccgtgaagctgatcgacagaaacgacaacgcccccagcatcggcttcgtgagcgtgagacagggcgccctgagcgaggccgccccccccggcaccgtgatcgccctggtgagagtgaccgacagagacagcggcaagaacggccagctgcagtgcagagtgctgggcggcggcggcaccggcggcggcggcggcctgggcggccccggcggcagcgtgcccttcaagctggaggagaactacgacaacttctacaccgtggtgaccgacagacccctggacagagagacccaggacgagtacaacgtgaccatcgtggccagagacggcggcagcccccccctgaacagcaccaagagcttcgccatcaagatcctggacgagaacgacaacccccccagattcaccaagggcctgtacgtgctgcaggtgcacgagaacaacatccccggcgagtacctgggcagcgtgctggcccaggaccccgacctgggccagaacggcaccgtgagctacagcatcctgcccagccacatcggcgacgtgagcatctacacctacgtgagcgtgaaccccaccaacggcgccatctacgccctgagaagcttcaacttcgagcagaccaaggccttcgagttcaaggtgctggccaaggacagcggcgcccccgcccacctggagagcaacgccaccgtgagagtgaccgtgctggacgtgaacgacaacgcccccgtgatcgtgctgcccaccctgcagaacgacaccgccgagctgcaggtgcccagaaacgccggcctgggctacctggtgagcaccgtgagagccctggacagcgacttcggcgagagcggcagactgacctacgagatcgtggacggcaacgacgaccacctgttcgagatcgaccccagcagcggcgagatcagaaccctgcaccccttctgggaggacgtgacccccgtggtggagctggtggtgaaggtgaccgaccacggcaagcccaccctgagcgccgtggccaagctgatcatcagaagcgtgagcggcagcctgcccgagggcgtgcccagagtgaacggcgagcagcaccactgggacatgagcctgcccctgatcgtgaccctgagcaccatcagcatcatcctgctggccgccatgatcaccatcgccgtgaagtgcaagagagagaacaaggagatcagaacctacaactgcagaatcgccgagtacagccacccccagctgggcggcggcaagggcaagaagaagaagatcaacaagaacgacatcatgctggtgcagagcgaggtggaggagagaaacgccatgaacgtgatgaacgtggtgagcagccccagcctggccaccagccccatgtacttcgactaccagaccagactgcccctgagcagccccagaagcgaggtgatgtacctgaagcccgccagcaacaacctgaccgtgccccagggccacgccggctgccacaccagcttcaccggccagggcaccaacgccagcgagacccccgccaccagaatgagcatcatccagaccgacaacttccccgccgagcccaactacatgggcagcagacagcagttcgtgcagagcagcagcaccttcaaggaccccgagagagccagcctgagagacagcggccacggcgacagcgaccaggccgacagcgaccaggacaccaacaagggcagctgctgcgacatgagcgtgagagaggccctgaagatgaagaccaccagcaccaagagccagcccctggagcaggagcccgaggagtgcgtgaactgcaccgacgagtgcagagtgctgggccacagcgacagatgctggatgccccagttccccgccgccaaccaggccgagaacgccgactacagaaccaacctgttcgtgcccaccgtggaggccaacgtggagaccgagacctacgagaccgtgaaccccaccggcaagaagaccttctgcaccttcggcaaggacaagagagagcacaccatcctgatcgccaacgtgaagccctacctgaaggccaagagagccctgagccccctgctgcaggaggtgcccagcgccagcagcagccccaccaaggcctgcatcgagccctgcaccagcaccaagggcagcctggacggctgcgaggccaagcccggcgccctggccgaggccagcagccagtacctgcccaccgacagccagtacctgagccccagcaagcagcccagagacccccccttcatggccagcgaccagatggccagagtgttcgccgacgtgcacagcagagccagcagagacagcagcgagatgggcgccgtgctggagcagctggaccaccccaacagagacctgggcagagagagcgtggacgccgaggaggtggtgagagagatcgacaagctgctgcaggactgcagaggcaacgaccccgtggccgtgagaaagtag

SEQ ID NO: 280001 - protein, 158 aa, Artificial Sequence
  derived and/or modified sequence
MGKGDPKKPRGKMSSYAFFVQTCREEHKKKHPDASVNFSEFSKKCSERWKTMSAKEKGKFEDMAKADKARYEREMKTYIPPKGETKKKFKDPNAPKRPPSAFFLFCSEYRPKIKGEHPGLSIGDVAKKLGEMWNNTAADDKQPYEKKAAKLKEKYEKF

SEQ ID NO: 280002 - DNA, 477 bp, Artificial Sequence
  derived and/or modified sequence
atggggaagggcgacccaaagaaacccagagggaaaatgagtagttacgcttttttcgtgcagacctgccgcgaggagcacaaaaagaagcacccagatgctagcgtcaatttctcagagttctcaaagaagtgcagcgagcggtggaaaaccatgtctgcaaaggaaaagggcaaattcgaggatatggccaaagctgataaggctcggtacgaacgagaaatgaaaacatacattccccctaaaggagagaccaagaagaagtttaaggatcccaacgctccaaagaggccaccctccgcgttcttcttgttctgttctgagtatagaccaaagatcaagggtgagcatcccggattgtccatcggggacgtagccaagaaattgggtgagatgtggaacaacaccgcagcagatgataaacagccctacgagaagaaagccgctaagctgaaggaaaaatacgaaaagttttag

SEQ ID NO: 280003 - DNA, 294 bp, Artificial Sequence
  derived and/or modified sequence
atgggaaaaggggatcctaagaagcccaggggtaaaatgtcttcgtacgcattttttgttcagacctgtcgcgaagaacacaagaaaaagcaccctgacgcctctgtgaatttctccgaattctctaagaagtgctctgagagatggaaaaccatgtctgccaaagagaagggcaagtttgaggacatggccaaagccgataaagcacggtacgaacgggagatgaaaacttatattccccctaaaggggaaaccaagaaaaagttcaaagaccccaatgcacctaagcgctag

SEQ ID NO: 280004 - DNA, 477 bp, Artificial Sequence
  derived and/or modified sequence
atggggaagggggaccccaagaaacccaggggtaagatgtcgtcatacgcttttttcgtgcagacttgccgcgaggagcacaaaaagaagcacccagacgcatctgttaacttctccgagttctccaagaaatgcagtgagcgttggaaaacaatgagcgctaaagagaaggggaagtttgaagacatggccaaagccgacaaagcgaggtatgaaagggagatgaaaacttacattccccccaaaggtgagaccaagaagaagttcaaggaccctaatgcaccaaaacgcccaccaagtgccttcttcttgttttgcagcgagtatcgccccaagatcaaaggagaacatccaggattatccattggagacgttgcgaagaagctgggagaaatgtggaacaacactgctgccgatgacaaacaaccttatgaaaaaaaggccgctaagttgaaagaaaagtatgagaaattttag

SEQ ID NO: 280005 - DNA, 489 bp, Artificial Sequence
  derived and/or modified sequence
atgggaaagggagaccctaagaaaccacgcggtaagatgagttcttatgcctttttcgtacagacatgtagagaagagcacaagaagaagcacccagacgctagcgtcaattttagcgagttctctaaaaaatgctccgagagatggaaaactatgtctgcaaaggagaagggtaaatttgaggacatggccaaggccgataaagccagatacgaaagggagatgaaaacctacatcccccccaagggcgaaactaagaagaaatttaaggatccaaacgctccgaagcgtccccccagcgccttcttcctgttttgcagtgagtacagacccaaaatcaaaggcgagcaccccggactgagtataggggacgttgccaaaaaattgggtgaaatgtggaacaacacggctgcagatgacaagcagccctatgaaaagatactgctacacatcgaactgaaggaatcgctgatgcagcaaaaaagatag

SEQ ID NO: 280006 - DNA, 821 bp, Artificial Sequence
  derived and/or modified sequence
gtaatgttacagagcggagagagtgaggaggctgcgtctggctcccgctctcacagccattgcagtacattgagctccatagagacagcaccggggcaagtgagagccggacgggcactgggcgactctgtgcctcgctgaggaaaaataactaaacatgggcaaaggagatcctaagaagccgagaggcaaaatgtcatcatatgcattttttgtgcaaacttgtcgggaggagcataagaagaagcacccagatgcttcagtcaacttctcagagttttctaagaagtgctcagagaggtggaagaccatgtctgctaaagagaaaggaaaatttgaagatatggcaaaagcggacaaggcccgttatgaaagagaaatgaaaacctatatccctcccaaaggggagacaaaaaagaagttcaaggatcccaatgcacccaagaggcctccttcggccttcttcctcttctgctctgagtatcgcccaaaaatcaaaggagaacatcctggcctgtccattggtgatgttgcgaagaaactgggagagatgtggaataacactgctgcagatgacaagcagccttatgaaaagaaggctgcgaagctgaaggaaaaatatgaaaagttctagttatttctggagttgctgtggatctacagatacgtgatattttggtataactagaatcttgatttctttcataaagttctgccatgttctatttctttccttaatgtttttttcttccctactgttttatcctccctttgctttggaaggatattgctgcatatcgagctaaaggaaagcctgatgc

SEQ ID NO: 280007 - DNA, 455 bp, Artificial Sequence
  derived and/or modified sequence
agaagccctgcctttccagagacctaaagtgtaacgcaatcagagacctttgaggggctcgaggctcggcggcttccgcccctcagcaccagcagagaccccagttttcaggggacatgatcccatagtgtcgccctcacttttgaaggaaaaataactaaacatgggcaaaggagatcctaagaagccgagaggcaaaatgtcatcatatgcattttttgtgcaaacttgtcgggaggagcataagaagaagcacccagatgcttcagtcaacttctcagagttttctaagaagtgctcagagaggtggaagaccatgtctgctaaagagaaaggaaaatttgaagatatggcaaaagcggacaaggcccgttatgaaagagaaatgaaaacctatatccctcccaaaggggagacaaaaaagaagttcaaggatcccaatgcacccaagaggc

SEQ ID NO: 280008 - DNA, 1727 bp, Artificial Sequence
  derived and/or modified sequence
ggttccgagcaccggagctggctgctgctccctctttggagcaaagttttatgcaaagagggtgttttttgaaactttcggtgcacggtgattttttttttttaaggtcccataattaggaagagtcgactcgcttaggcccttgtttattccctatctagtgcaaagccacgaattggcagcatgttttctgacctttggtttggttggtttaaaatggtgttctagattttaaaatcgtttaagtgaccagttagatactcattcagagcagactcgggcggatagatagggaatactgtatgggtatatctttgtgtctagactttttgagatcgccctgaaggactgtttttgttttgttttgtttgcttggcatagccccttcaaggaatttaatctctcggccatattcttgtctgattttacggaggttgatgtcgctactgtgttaaataaccagtactttggttttcattcccttactaagtactttaaggtcttatatgtcataattttattgctaacatcaaatatttattttattttttagaaaaataactaaacatgggcaaaggagatcctaagaagccgagaggcaaaatgtcatcatatgcattttttgtgcaaacttgtcgggaggagcataagaagaagcacccagatgcttcagtcaacttctcagagttttctaagaagtgctcagagaggtggaagaccatgtctgctaaagagaaaggaaaatttgaagatatggcaaaagcggacaaggcccgttatgaaagagaaatgaaaacctatatccctcccaaaggggagacaaaaaagaagttcaaggatcccaatgcacccaagaggcctccttcggccttcttcctcttctgctctgagtatcgcccaaaaatcaaaggagaacatcctggcctgtccattggtgatgttgcgaagaaactgggagagatgtggaataacactgctgcagatgacaagcagccttatgaaaagaaggctgcgaagctgaaggaaaaatatgaaaagttctagttatttctggagttgctgtggatctacagatacgtgatattttggatattgctgcatatcgagctaaaggaaagcctgatgcagcaaaaaagggagttgtcaaggctgaaaaaagcaagaaaaagaaggaagaggaggaagatgaggaagatgaagaggatgaggaggaggaggaagatgaagaagatgaagatgaagaagaagatgatgatgatgaataagttggttctagcgcagttttttttttcttgtctataaagcatttaacccccctgtacacaactcactccttttaaagaaaaaaattgaaatgtaaggctgtgtaagatttgtttttaaactgtacagtgtctttttttgtatagttaacacactaccgaatgtgtctttagatagccctgtcctggtggtattttcaatagccactaaccttgcctggtacagtatgggggttgtaaattggcatggaaatttaaagcaggttcttgttggtgcacagcacaaattagttatatatggggatggtagttttttcatcttcagttgtctctgatgcagcttatacgaaataattgttgttctgttaactgaataccactctgtaattgcaaaaaaaaaaaaaaagttgcagctgttttgttgacattctgaatgcttctaagtaaatacaattttttttatta

SEQ ID NO: 280009 - DNA, 644 bp, Artificial Sequence
  derived and/or modified sequence
atctcagggccaaaccgataggaaacgaggctgcctcgcggtggcaccgccaccccccaaccgggttccgagcaccggagctggctgctgctccctctttggagcaaagttttatgcaaagagggtgttttttgaaactttcgaaaaataactaaacatgggcaaaggagatcctaagaagccgagaggcaaaatgtcatcatatgcattttttgtgcaaacttgtcgggaggagcataagaagaagcacccagatgcttcagtcaacttctcagagttttctaagaagtgctcagagaggtggaagaccatgtctgctaaagagaaaggaaaatttgaagatatggcaaaagcggacaaggcccgttatgaaagagaaatgaaaacctatatccctcccaaaggggagacaaaaaagaagttcaaggatcccaatgcacccaagaggcctccttcggccttcttcctcttctgctctgagtatcgcccaaaaatcaaaggagaacatcctggcctgtccattggtgatgttgcgaagaaactgggagagatgtggaataacactgctgcagatgacaagcagccttatgaaaagatattgctgcatatcgagctaaaggaaagcctgatgcagcaaaaaaggg

SEQ ID NO: 280010 - DNA, 477 bp, Artificial Sequence
  derived and/or modified sequence
atgggcaaaggagaccccaagaagccccggggcaagatgagcagctatgccttctttgtgcagacctgccgggaggagcacaagaagaagcacccagatgcctctgtgaacttcagcgagttcagcaagaagtgcagcgagcgctggaagaccatgtctgccaaggagaagggcaagtttgaggacatggccaaggctgacaaggcccgctatgagcgggagatgaagacctacatcccccccaagggggagaccaagaagaagttcaaggaccccaatgcccccaagaggcctcccagcgccttcttcctgttctgcagcgagtaccggcccaagatcaagggggagcaccctggcctgagcattggagatgtggccaagaagctgggggagatgtggaacaacacagctgctgatgacaagcagccctatgagaagaaggccgccaagctgaaggagaagtatgagaagttctag

SEQ ID NO: 280011 - DNA, 294 bp, Artificial Sequence
  derived and/or modified sequence
atgggcaaaggagaccccaagaagccccggggcaagatgagcagctatgccttctttgtgcagacctgccgggaggagcacaagaagaagcacccagatgcctctgtgaacttcagcgagttcagcaagaagtgcagcgagcgctggaagaccatgtctgccaaggagaagggcaagtttgaggacatggccaaggctgacaaggcccgctatgagcgggagatgaagacctacatcccccccaagggggagaccaagaagaagttcaaggaccccaatgcccccaagaggtag

SEQ ID NO: 280012 - DNA, 489 bp, Artificial Sequence
  derived and/or modified sequence
atgggcaaaggagaccccaagaagccccggggcaagatgagcagctatgccttctttgtgcagacctgccgggaggagcacaagaagaagcacccagatgcctctgtgaacttcagcgagttcagcaagaagtgcagcgagcgctggaagaccatgtctgccaaggagaagggcaagtttgaggacatggccaaggctgacaaggcccgctatgagcgggagatgaagacctacatcccccccaagggggagaccaagaagaagttcaaggaccccaatgcccccaagaggcctcccagcgccttcttcctgttctgcagcgagtaccggcccaagatcaagggggagcaccctggcctgagcattggagatgtggccaagaagctgggggagatgtggaacaacacagctgctgatgacaagcagccctatgagaagatcctgctgcacatcgagctgaaggagagcctgatgcagcagaagaggtag

SEQ ID NO: 280013 - DNA, 477 bp, Artificial Sequence
  derived and/or modified sequence
atgggcaagggcgaccccaagaagccccggggcaagatgagcagctatgcattcttcgtacagacctgtcgggaggaacacaagaaaaaacatcctgacgccagcgttaacttcagcgagttttcaaagaaatgttcagaacgctggaagacaatgagcgctaaggagaagggaaagtttgaggatatggccaaagctgacaaagcccgttacgaacgggaaatgaagacctacatccccccaaagggcgagactaaaaaaaagttcaaggatccaaacgcccccaagcggcctccttcagctttctttctcttctgctctgagtataggcctaagattaagggggagcaccctgggttaagcatcggagacgtggctaagaaactgggagagatgtggaataacactgctgccgacgataagcagccctatgaaaagaaagccgccaagctcaaagagaaatacgagaagttctag

SEQ ID NO: 280014 - DNA, 294 bp, Artificial Sequence
  derived and/or modified sequence
atgggcaagggcgaccccaagaagccccggggcaagatgagcagctacgcattcttcgtccaaacctgcagggaagagcacaaaaaaaagcacccagacgcttccgtcaatttttctgagttttcaaaaaaatgcagcgagcggtggaagaccatgagcgccaaggaaaaaggtaaattcgaagacatggcaaaagccgacaaggccagatatgagcgggaaatgaaaacctacatccctccgaaaggagagaccaaaaagaaattcaaagaccccaacgccccaaagcggtag

SEQ ID NO: 280015 - DNA, 477 bp, Artificial Sequence
  derived and/or modified sequence
atgggcaagggcgaccccaagaagccccggggcaagatgagcagctatgccttctttgtgcagacatgtagggaggagcacaaaaagaaacatcccgacgccagcgtcaatttcagcgagttttccaagaaatgcagcgagcgctggaagacaatgtcagcaaaggagaaggggaagtttgaggacatggcaaaagctgataaagcaaggtatgagcgggaaatgaaaacttatatcccgcctaaaggcgaaaccaaaaagaaatttaaggaccctaatgcacctaaaaggcccccatcggccttcttccttttctgtagcgagtatcggccaaagattaagggagagcatcccgggttgagcataggtgacgtggctaagaagttgggtgaaatgtggaacaataccgccgctgacgataaacagccctatgagaaaaaagcagctaagcttaaggagaaatacgagaagttctag

SEQ ID NO: 280016 - DNA, 489 bp, Artificial Sequence
  derived and/or modified sequence
atgggcaagggcgaccccaagaagccccggggcaagatgagcagctacgcatttttcgttcagacctgccgcgaagaacacaagaaaaagcaccctgatgctagcgtgaacttttccgaattctcaaaaaagtgctccgaacgatggaagacaatgtccgccaaagaaaaagggaagtttgaggacatggccaaggccgacaaggctcggtatgagcgggaaatgaagacttacataccaccaaaaggtgaaactaagaagaaatttaaagaccctaatgcccccaaaagaccaccttccgcattttttctcttttgttccgagtatcggcctaaaatcaagggcgaacaccccgggttgtcaataggtgacgtcgctaagaagcttggtgaaatgtggaacaacacagcagctgacgacaagcaaccatacgaaaagatcctcctgcacatagagctgaaagaatcattaatgcagcagaagcggtag

SEQ ID NO: 280017 - DNA, 477 bp, Artificial Sequence
  derived and/or modified sequence
atgggcaagggtgatcctaaaaaacccaggggtaagatgtccagttatgcattttttgtgcagacctgcagggaggagcataaaaagaagcaccctgatgcctcggtgaattttagcgagttctcaaagaagtgctcagaacgatggaaaacaatgagcgcaaaagaaaagggcaaatttgaagacatggccaaggctgacaaggcccgttatgaaagggaaatgaagacctatattccgcctaaaggcgaaacaaagaaaaaattcaaggaccctaatgccccaaagagaccgccttcagcgttttttcttttctgttcagaataccggcctaagattaagggcgagcacccaggcctgagcatcggggacgtggcgaaaaagctcggggagatgtggaacaataccgccgctgacgacaagcagccgtatgaaaaaaaagccgctaagcttaaggaaaagtacgagaagttttag

SEQ ID NO: 280018 - DNA, 294 bp, Artificial Sequence
  derived and/or modified sequence
atgggaaagggcgatcctaaaaagcccagggggaagatgagcagctacgcatttttcgtacagacctgccgtgaggaacataaaaagaagcacccggatgcctccgttaatttctccgaattttcaaaaaaatgtagcgagagatggaaaaccatgtcagcaaaagagaagggtaagtttgaagacatggccaaggccgataaagcaagatatgaacgtgagatgaaaacatacatcccccctaaaggtgagaccaagaaaaagtttaaagatcccaacgccccaaaacgatag

SEQ ID NO: 280019 - DNA, 477 bp, Artificial Sequence
  derived and/or modified sequence
atgggcaagggcgaccctaagaaacccaggggaaagatgagtagctacgctttttttgtgcaaacctgtagggaggagcacaagaagaagcaccctgacgcctcagtcaacttttcagaattcagcaagaaatgctccgaaagatggaaaaccatgagcgcaaaggaaaagggcaagtttgaggacatggccaaggcggataaagccaggtatgaaagggagatgaaaacctatatccctccgaagggggaaactaagaagaaatttaaggatccaaatgccccaaagagaccaccaagcgccttctttcttttttgttcggaataccgcccaaaaatcaaaggagagcacccagggttaagcattggtgatgtcgctaagaaactcggcgaaatgtggaacaacacagctgctgacgacaaacagccctatgaaaagaaagctgccaagctgaaagaaaagtatgaaaagttttag

SEQ ID NO: 280020 - DNA, 489 bp, Artificial Sequence
  derived and/or modified sequence
atgggcaagggcgaccctaaaaaacccagaggaaaaatgagcagctatgcctttttcgtccagacatgtcgtgaggagcataaaaagaaacatcctgatgccagcgtaaatttcagcgaattcagcaaaaagtgttccgaacggtggaaaacgatgagcgctaaggagaagggcaagtttgaagacatggcaaaagctgataaagctcgctatgagcgggagatgaagacttacattccccctaaaggcgaaacaaaaaaaaagtttaaggatccaaatgcaccaaagaggcctccctccgcattttttttgttctgctccgaataccgccctaagataaagggggagcaccccggtttgagcatcggcgatgtcgctaagaagctcggagagatgtggaacaacactgctgcagacgataagcaaccttatgagaaaattctcctccacatagaactgaaggaaagcctgatgcagcagaagcggtag

SEQ ID NO: 280021 - DNA, 477 bp, Artificial Sequence
  derived and/or modified sequence
atgggtaagggcgatccaaaaaagccacgggggaagatgtcgtcctacgcattttttgttcaaacatgccgcgaagagcacaaaaagaagcacccagacgcctccgtgaatttctctgagttcagcaaaaagtgtagtgaaagatggaagacaatgagtgcaaaagagaaagggaagtttgaggatatggccaaggctgacaaggctagatacgagcgcgagatgaaaacatatattcctccaaaaggcgagactaagaaaaagttcaaagatccaaacgcaccaaaaagacccccgtctgcttttttcttgttttgcagtgagtacagaccaaaaatcaagggtgagcatcccggactgtccataggagacgtggcgaaaaagctgggcgaaatgtggaacaatacggccgccgacgacaaacagccctatgagaaaaaagccgccaagctgaaggagaagtacgaaaagttctag

SEQ ID NO: 280022 - DNA, 294 bp, Artificial Sequence
  derived and/or modified sequence
atgggcaaaggagatcccaaaaagccccgcggtaaaatgtctagctatgcgttctttgttcagacctgtagagaggagcataagaagaagcaccctgacgcgagtgtgaacttttctgagtttagcaaaaaatgttccgagcgttggaagaccatgagcgctaaggaaaaggggaagttcgaagacatggccaaagctgacaaggctcgttatgagagagagatgaagacctatataccaccaaaaggagaaacaaagaagaaatttaaggaccctaatgcaccaaaacgatag

SEQ ID NO: 280023 - DNA, 477 bp, Artificial Sequence
  derived and/or modified sequence
atgggtaaaggcgatcctaaaaaaccacgcggaaagatgagtagctatgccttctttgtgcagacatgccgggaggaacataaaaagaagcatccagacgcaagcgtgaatttttcagagttctccaagaaatgctccgagcgctggaagactatgtcagctaaggagaaaggaaagtttgaagatatggcaaaggccgataaggcgagatatgaacgtgagatgaagacatacatcccacctaagggcgaaacaaaaaagaaattcaaggaccccaatgctccaaagagacccccgagcgccttctttcttttttgctcagaatacagacctaaaataaaaggtgagcaccccggtcttagcatcggtgacgtggccaaaaagctaggcgaaatgtggaataataccgccgcggatgataaacaaccatatgaaaagaaagcggcgaaactcaaagagaaatacgaaaagttctag

SEQ ID NO: 280024 - DNA, 489 bp, Artificial Sequence
  derived and/or modified sequence
atgggtaaaggtgatcccaaaaagccccgaggaaagatgtcaagttacgctttttttgtgcaaacctgcagagaagaacacaagaaaaagcaccccgacgcctcggtgaatttcagcgagttttcaaaaaagtgctctgaacggtggaagacaatgagcgccaaggagaaagggaagtttgaggatatggctaaagccgataaagcgcgctacgaacgagagatgaagacttacatcccccctaagggagagaccaagaagaagttcaaggaccccaatgcccctaaacgtccaccttctgctttcttcctattttgcagtgaatacagaccgaagataaagggcgagcatcctgggctatctatcggagacgtggcaaagaaacttggggaaatgtggaacaacacagctgcagacgacaagcaaccctatgagaagatcttactgcacatagaactaaaagagtcgctgatgcagcagaagcgatag

SEQ ID NO: 280025 - DNA, 477 bp, Artificial Sequence
  derived and/or modified sequence
atgggaaagggcgatccgaaaaaacctcgcggaaagatgtcaagctacgcgttctttgtgcagacctgtagggaagagcataaaaaaaaacaccccgacgccagtgtgaacttcagcgaattcagcaaaaagtgctctgaacgttggaaaactatgagtgctaaagaaaaggggaagtttgaagacatggcaaaggccgacaaagcaagatatgaaagagagatgaagacctacattccacccaagggagagacaaaaaaaaaattcaaggaccccaatgctcctaagagaccgccaagtgcattcttcctattctgctcggaatatcgacccaaaatcaaaggagaacaccctggtttaagcatcggggatgtggcgaagaagctaggtgagatgtggaacaatacagctgcagatgacaaacagccctacgaaaagaaggccgctaaactcaaagagaaatacgaaaagttctag

SEQ ID NO: 280026 - DNA, 477 bp, Artificial Sequence
  derived and/or modified sequence
atgggtaaaggcgatcctaaaaaaccacgcggaaagatgagtagctatgccttctttgtgcagacatgccgggaggaacataaaaagaagcatccagacgcaagcgtgaatttttcagagttctccaagaaatgctccgagcgctggaagactatgtcagctaaggagaaaggaaagtttgaagatatggcaaaggccgataaggcgagatatgaacgtgagatgaagacatacatcccacctaagggcgaaacaaaaaagaaattcaaggaccccaatgctccaaagagacccccgagcgcattttttcttttctgttccgaatatagaccaaaaatcaagggagaacatccagggttatctatcggggacgtcgcgaagaagctgggggaaatgtggaacaacaccgccgcggacgataaacaaccctatgagaagaaagccgccaagttgaaagaaaagtacgaaaaattttag

SEQ ID NO: 280027 - DNA, 489 bp, Artificial Sequence
  derived and/or modified sequence
atggggaaaggagatccaaagaagccgcgcggaaagatgagctcgtacgcctttttcgtccagacctgtagagaagaacataaaaaaaagcatcccgacgcttccgtgaatttctctgagttctctaaaaagtgttcggagcggtggaagaccatgtcagctaaggagaagggcaagttcgaggatatggctaaggcggacaaagcaaggtacgagagggaaatgaagacctatattcccccaaaaggagaaaccaagaagaagtttaaagaccctaatgcacctaaacgtccacccagcgcgttttttttattctgctcagagtaccggccgaaaattaagggcgaacatccgggcttgagcatcggcgatgtcgctaagaaattgggagaaatgtggaacaacactgccgctgacgacaaacaaccttatgaaaagattctcctccacatcgaacttaaagagtcccttatgcaacagaaaagatag

SEQ ID NO: 280028 - DNA, 477 bp, Artificial Sequence
  derived and/or modified sequence
atgggcaagggcgaccccaagaagcccagaggcaagatgagcagctacgccttcttcgtgcagacctgcagagaggagcacaagaagaagcaccccgacgccagcgtgaacttcagcgagttcagcaagaagtgcagcgagagatggaagaccatgagcgccaaggagaagggcaagttcgaggacatggccaaggccgacaaggccagatacgagagagagatgaagacctacatcccccccaagggcgagaccaagaagaagttcaaggaccccaacgcccccaagagaccccccagcgccttcttcctgttctgcagcgagtacagacccaagatcaagggcgagcaccccggcctgagcatcggcgacgtggccaagaagctgggcgagatgtggaacaacaccgccgccgacgacaagcagccctacgagaagaaggccgccaagctgaaggagaagtacgagaagttctag

SEQ ID NO: 280029 - DNA, 294 bp, Artificial Sequence
  derived and/or modified sequence
atgggcaagggcgaccccaagaagcccagaggcaagatgagcagctacgccttcttcgtgcagacctgcagagaggagcacaagaagaagcaccccgacgccagcgtgaacttcagcgagttcagcaagaagtgcagcgagagatggaagaccatgagcgccaaggagaagggcaagttcgaggacatggccaaggccgacaaggccagatacgagagagagatgaagacctacatcccccccaagggcgagaccaagaagaagttcaaggaccccaacgcccccaagagatag

SEQ ID NO: 280030 - DNA, 489 bp, Artificial Sequence
  derived and/or modified sequence
atgggcaagggcgaccccaagaagcccagaggcaagatgagcagctacgccttcttcgtgcagacctgcagagaggagcacaagaagaagcaccccgacgccagcgtgaacttcagcgagttcagcaagaagtgcagcgagagatggaagaccatgagcgccaaggagaagggcaagttcgaggacatggccaaggccgacaaggccagatacgagagagagatgaagacctacatcccccccaagggcgagaccaagaagaagttcaaggaccccaacgcccccaagagaccccccagcgccttcttcctgttctgcagcgagtacagacccaagatcaagggcgagcaccccggcctgagcatcggcgacgtggccaagaagctgggcgagatgtggaacaacaccgccgccgacgacaagcagccctacgagaagatcctgctgcacatcgagctgaaggagagcctgatgcagcagaagagatag

SEQ ID NO: 280031 - RNA, 477 nt, Artificial Sequence
  derived and/or modified sequence
auggguaagggcgauccaaaaaagccacgggggaagaugucguccuacgcauuuuuuguucaaacaugccgcgaagagcacaaaaagaagcacccagacgccuccgugaauuucucugaguucagcaaaaaguguagugaaagauggaagacaaugagugcaaaagagaaagggaaguuugaggauauggccaaggcugacaaggcuagauacgagcgcgagaugaaaacauauauuccuccaaaaggcgagacuaagaaaaaguucaaagauccaaacgcaccaaaaagacccccgucugcuuuuuucuuguuuugcagugaguacagaccaaaaaucaagggugagcaucccggacuguccauaggagacguggcgaaaaagcugggcgaaauguggaacaauacggccgccgacgacaaacagcccuaugagaaaaaagccgccaagcugaaggagaaguacgaaaaguucuag

SEQ ID NO: 280032 - RNA, 294 nt, Artificial Sequence
  derived and/or modified sequence
augggcaaaggagaucccaaaaagccccgcgguaaaaugucuagcuaugcguucuuuguucagaccuguagagaggagcauaagaagaagcacccugacgcgagugugaacuuuucugaguuuagcaaaaaauguuccgagcguuggaagaccaugagcgcuaaggaaaaggggaaguucgaagacauggccaaagcugacaaggcucguuaugagagagagaugaagaccuauauaccaccaaaaggagaaacaaagaagaaauuuaaggacccuaaugcaccaaaacgauag

SEQ ID NO: 280033 - RNA, 477 nt, Artificial Sequence
  derived and/or modified sequence
auggguaaaggcgauccuaaaaaaccacgcggaaagaugaguagcuaugccuucuuugugcagacaugccgggaggaacauaaaaagaagcauccagacgcaagcgugaauuuuucagaguucuccaagaaaugcuccgagcgcuggaagacuaugucagcuaaggagaaaggaaaguuugaagauauggcaaaggccgauaaggcgagauaugaacgugagaugaagacauacaucccaccuaagggcgaaacaaaaaagaaauucaaggaccccaaugcuccaaagagacccccgagcgccuucuuucuuuuuugcucagaauacagaccuaaaauaaaaggugagcaccccggucuuagcaucggugacguggccaaaaagcuaggcgaaauguggaauaauaccgccgcggaugauaaacaaccauaugaaaagaaagcggcgaaacucaaagagaaauacgaaaaguucuag

SEQ ID NO: 280034 - RNA, 489 nt, Artificial Sequence
  derived and/or modified sequence
auggguaaaggugaucccaaaaagccccgaggaaagaugucaaguuacgcuuuuuuugugcaaaccugcagagaagaacacaagaaaaagcaccccgacgccucggugaauuucagcgaguuuucaaaaaagugcucugaacgguggaagacaaugagcgccaaggagaaagggaaguuugaggauauggcuaaagccgauaaagcgcgcuacgaacgagagaugaagacuuacauccccccuaagggagagaccaagaagaaguucaaggaccccaaugccccuaaacguccaccuucugcuuucuuccuauuuugcagugaauacagaccgaagauaaagggcgagcauccugggcuaucuaucggagacguggcaaagaaacuuggggaaauguggaacaacacagcugcagacgacaagcaacccuaugagaagaucuuacugcacauagaacuaaaagagucgcugaugcagcagaagcgauag

SEQ ID NO: 280035 - RNA, 477 nt, Artificial Sequence
  derived and/or modified sequence
augggaaagggcgauccgaaaaaaccucgcggaaagaugucaagcuacgcguucuuugugcagaccuguagggaagagcauaaaaaaaaacaccccgacgccagugugaacuucagcgaauucagcaaaaagugcucugaacguuggaaaacuaugagugcuaaagaaaaggggaaguuugaagacauggcaaaggccgacaaagcaagauaugaaagagagaugaagaccuacauuccacccaagggagagacaaaaaaaaaauucaaggaccccaaugcuccuaagagaccgccaagugcauucuuccuauucugcucggaauaucgacccaaaaucaaaggagaacacccugguuuaagcaucggggauguggcgaagaagcuaggugagauguggaacaauacagcugcagaugacaaacagcccuacgaaaagaaggccgcuaaacucaaagagaaauacgaaaaguucuag

SEQ ID NO: 280036 - RNA, 477 nt, Artificial Sequence
  derived and/or modified sequence
auggguaaaggcgauccuaaaaaaccacgcggaaagaugaguagcuaugccuucuuugugcagacaugccgggaggaacauaaaaagaagcauccagacgcaagcgugaauuuuucagaguucuccaagaaaugcuccgagcgcuggaagacuaugucagcuaaggagaaaggaaaguuugaagauauggcaaaggccgauaaggcgagauaugaacgugagaugaagacauacaucccaccuaagggcgaaacaaaaaagaaauucaaggaccccaaugcuccaaagagacccccgagcgcauuuuuucuuuucuguuccgaauauagaccaaaaaucaagggagaacauccaggguuaucuaucggggacgucgcgaagaagcugggggaaauguggaacaacaccgccgcggacgauaaacaacccuaugagaagaaagccgccaaguugaaagaaaaguacgaaaaauuuuag

SEQ ID NO: 280037 - RNA, 489 nt, Artificial Sequence
  derived and/or modified sequence
auggggaaaggagauccaaagaagccgcgcggaaagaugagcucguacgccuuuuucguccagaccuguagagaagaacauaaaaaaaagcaucccgacgcuuccgugaauuucucugaguucucuaaaaaguguucggagcgguggaagaccaugucagcuaaggagaagggcaaguucgaggauauggcuaaggcggacaaagcaagguacgagagggaaaugaagaccuauauucccccaaaaggagaaaccaagaagaaguuuaaagacccuaaugcaccuaaacguccacccagcgcguuuuuuuuauucugcucagaguaccggccgaaaauuaagggcgaacauccgggcuugagcaucggcgaugucgcuaagaaauugggagaaauguggaacaacacugccgcugacgacaaacaaccuuaugaaaagauucuccuccacaucgaacuuaaagagucccuuaugcaacagaaaagauag

SEQ ID NO: 280038 - protein, 627 aa, Artificial Sequence
  derived and/or modified sequence
MARGSVSDEEMMELREAFAKVDTDGNGYISFNELNDLFKAACLPLPGYRVREITENLMATGDLDQDGRISFDEFIKIFHGLKSTDVAKTFRKAINKKEGICAIGGTSEQSSVGTQHSYSEEEKYAFVNWINKALENDPDCRHVIPMNPNTNDLFNAVGDGIVLCKMINLSVPDTIDERTINKKKLTPFTIQENLNLALNSASAIGCHVVNIGAEDLKEGKPYLVLGLLWQVIKIGLFADIELSRNEALIALLREGESLEDLMKLSPEELLLRWANYHLENAGCNKIGNFSTDIKDSKAYYHLLEQVAPKGDEEGVPAVVIDMSGLREKDDIQRAECMLQQAERLGCRQFVTATDVVRGNPKLNLAFIANLFNRYPALHKPENQDIDWGALEGETREERTFRNWMNSLGVNPRVNHLYSDLSDALVIFQLYEKIKVPVDWNRVNKPPYPKLGGNMKKLENCNYAVELGKNQAKFSLVGIGGQDLNEGNRTLTLALIWQLMRRYTLNILEEIGGGQKVNDDIIVNWVNETLREAKKSSSISSFKDPKISTSLPVLDLIDAIQPGSINYDLLKTENLNDDEKLNNAKYAISMARKIGARVYALPEDLVEVNPKMVMTVFACLMGKGMKRV

SEQ ID NO: 280039 - protein, 246 aa, Artificial Sequence
  derived and/or modified sequence
MARGSVSDEEMMELREAFAKVDTDGNGYISFNELNDLFKAACLPLPGYRVREITENLMATGDLDQDGRISFDEFIKIFHGLKSTDVAKTFRKAINKKEGICAIGGTSEQSSVGTQHSYSEEEKYAFVNWINKALENDPDCRHVIPMNPNTNDLFNAVGDGIVLCKMINLSVPDTIDERTINKKKLTPFTIQENLNLALNSASAIGCHVVNIGAEDLKEGKPYLVLGLLWQVIKIGLFADIELSRNE

SEQ ID NO: 280040 - protein, 196 aa, Artificial Sequence
  derived and/or modified sequence
MCAEDGDSKFSMSISMNSPFLEILHLENCNYAVELGKNQAKFSLVGIGGQDLNEGNRTLTLALIWQLMRRYTLNILEEIGGGQKVNDDIIVNWVNETLREAKKSSSISSFKDPKISTSLPVLDLIDAIQPGSINYDLLKTENLNDDEKLNNAKYAISMARKIGARVYALPEDLVEVNPKMVMTVFACLMGKGMKRV

SEQ ID NO: 280041 - protein, 66 aa, Artificial Sequence
  derived and/or modified sequence
MARGSVSDEEMMELREAFAKVDTDGNGYISFNELNDLFKAACLPLPGYRVREITENLMATGDLDQD

SEQ ID NO: 280042 - DNA, 1884 bp, Artificial Sequence
  derived and/or modified sequence
atggcgagagggtcagtgtctgatgaagaaatgatggagcttcgagaggcattcgctaaagtagataccgacggtaacggctacattagcttcaacgaactgaacgatctctttaaagctgcatgtctcccattgccaggttacagggtccgcgagattacggaaaatctaatggccacaggagatctggaccaggatggaagaatcagcttcgatgagtttatcaagatctttcatgggctgaaatctaccgatgttgctaaaactttccggaaagccattaataaaaaggaaggtatatgtgccatcgggggtaccagtgagcagtcaagtgtcggaacacagcattcttatagcgaagaggagaaatacgcatttgtgaattggataaacaaagcactggagaacgaccccgattgtcggcacgttatccccatgaaccctaatactaatgacctgttcaatgccgtgggcgatggaatagtgctgtgtaagatgatcaacctgagtgtcccagataccatcgacgaaagaacaattaacaagaaaaaacttaccccttttactatacaggaaaatctgaacctcgcactaaactctgcctccgctattggatgtcacgtagtaaacataggagccgaggatcttaaagaaggcaagccctatctagtccttgggctcctgtggcaggtgattaagatcggcttattcgccgatatcgaactgtcaaggaatgaagcactcattgccctgctgcgagaaggcgaatcacttgaagaccttatgaaactttcccccgaggagctccttcttagatgggctaactaccatctggagaacgcaggctgtaacaagataggaaatttttcaaccgacattaaggacagtaaggcctattaccacctactcgaacaggtggcaccaaagggcgacgaggaaggtgtgcctgccgttgtaattgacatgtctggacttcgagagaaggacgacatacagagggccgagtgtatgctacagcaggctgaacggctcggatgccggcagttcgtgactgccaccgacgtagttagaggcaaccctaaactgaatctggcgttcatcgcaaatttatttaatcgataccccgccctccataaaccagagaaccaggacattgactggggggccttggagggggaaacccgcgaagagcgcacattcagaaattggatgaatagcctgggcgtgaacccacgcgtgaaccatctgtattctgatctttctgatgcattagttatcttccaattgtatgagaagatcaaagtcccggtggactggaatcgggtgaataagcccccctatcccaagctgggaggaaacatgaagaaactcgaaaactgcaactatgctgtggaactaggaaagaaccaagcaaagttcagtcttgtcggaatcggaggccaggatttgaacgagggtaatcgaaccctgacactcgcgctgatatggcaactgatgcgaagatacacactcaatatccttgaagagatcgggggcgggcagaaggtaaacgacgatatcatagtgaactgggtgaatgaaactctcagagaggctaaaaaatcttcttctattagtagtttcaaggaccctaaaatctccacgtcgctccctgtactcgaccttatcgacgcaatccagcctggttctataaactacgacctactcaagacagagaacctgaatgacgatgagaaacttaacaatgccaaatatgcgatctcaatggctcggaaaataggagctcgtgtgtatgccttaccggaagacctggtagaggtgaaccccaagatggtcatgaccgtgttcgcttgcttgatgggaaaaggaatgaagcgggtgtag

SEQ ID NO: 280043 - DNA, 1884 bp, Artificial Sequence
  derived and/or modified sequence
atggctcgaggttccgtatctgacgaagaaatgatggaacttagagaagcgttcgccaaagtggatacggatggaaacggatacatatcttttaatgaactgaatgacctatttaaagccgcctgcctgccgcttcccggctaccgggttagagaaattactgaaaacctaatggccacaggcgaccttgaccaggatggccgcataagctttgacgagtttatcaaaatattccatggcttaaagagtacagatgtggcgaagactttccgcaaggcaattaacaaaaaagagggaatttgcgctatcggcggaacatctgaacaatcatccgtgggtacacagcattcctattccgaagaggagaaatacgcttttgttaattggatcaataaagccttggagaatgaccccgattgcaggcacgtaattcccatgaacccaaacacaaatgacttattcaacgctgtcggcgacggcattgttctgtgtaaaatgatcaatcttagtgtccccgatactatcgacgaaaggacaattaataaaaagaaactcactccctttactatccaggagaatctgaacctagctttaaatagcgcgtctgctatcggatgtcacgtagtaaacatcggggcggaagacttgaaagagggaaaaccgtatcttgtgctgggactgctgtggcaggtgatcaaaataggtctgttcgcagatattgagttgtccagaaatgaggcgctgattgcactgctgagagagggggaaagcctcgaggatctcatgaagttgtctccggaggagctcctgctgcggtgggcaaattaccatctggagaatgctggatgtaataagattggaaatttcagtacggacattaaggatagcaaagcgtattaccacctactcgaacaagtcgctccgaaaggggacgaggagggagtgccagccgtcgttatcgatatgagtggccttagagaaaaggacgatattcaaagggccgaatgtatgctgcagcaggcagaacgcttgggatgtaggcaattcgtgactgccaccgatgtggtgaggggcaaccccaaactcaacctggcctttatcgcgaacctgttcaacaggtacccagccctacataagcctgagaatcaagatattgattggggtgccctagaaggggagacccgtgaagaacgaacgtttaggaactggatgaacagcctgggcgttaacccaagagtgaatcatctgtactccgatctgtctgacgcgctggttatcttccagctctatgagaagatcaaagtcccggtagattggaatcgggtcaacaagcccccctatcccaagttgggagggaacatgaaaaagttggagaactgtaattacgccgttgaactgggcaaaaatcaggctaagttcagcctggtcgggatcggcggccaagacctgaacgaagggaatcggactctcaccttagcccttatctggcagcttatgaggagatatactctcaacattctggaagagattggtggcggccagaaggtgaatgatgacattatcgtcaactgggtcaatgagacattgagagaggccaaaaagagctcgagtatcagctcttttaaagacccgaaaatctctacaagtctgccagtgctggaccttattgacgcaatacaacccggctccattaactacgacctgcttaagacggagaacctgaacgacgacgaaaaacttaataacgcaaaatatgctataagcatggctcgcaagattggcgcaagagtgtatgcgcttccagaggatctcgtcgaagttaatccgaagatggtgatgacagtgtttgcctgcctgatgggtaaggggatgaaacgagtttag

SEQ ID NO: 280044 - DNA, 741 bp, Artificial Sequence
  derived and/or modified sequence
atggcccgcggctctgtgtcggacgaggagatgatggagttgagggaagccttcgctaaggtggacacagacggaaacggatacatctccttcaatgagttgaacgacctattcaaggctgcctgtctcccccttcccggttaccgcgtccgcgagattacagagaacctgatggcaacaggagatctggatcaggacgggcgcatctctttcgatgagttcattaagattttccacggcttgaagagcacagacgttgctaagacctttagaaaggccattaacaaaaaggaaggaatctgcgctatcggaggcacgtctgaacaatcatccgtgggcacccagcatagctatagcgaggaggaaaagtacgcatttgtgaactggatcaacaaagctctcgaaaatgatccagattgtcgacacgtgatccctatgaatcctaatacgaatgatctgtttaacgcggtcggcgatggcatagttctgtgtaagatgatcaatctgagcgtcccggataccattgatgagaggacaattaataaaaaaaagctcacaccgttcactatccaggagaacctgaatctcgccctgaattctgctagcgccattggatgccacgtcgtgaatatcggggccgaagatctgaaagaggggaaaccttatctggtccttggactactgtggcaagttattaagattggactcttcgccgacattgaactgtctaggaatgagtag

SEQ ID NO: 280045 - DNA, 591 bp, Artificial Sequence
  derived and/or modified sequence
atgtgtgctgaagacggggatagtaagttctcaatgagtatttcgatgaactctcccttcctcgagattctacatctggagaattgcaattatgcagtcgaactgggcaagaaccaggccaagtttagccttgttggtattggcggccaagacctcaatgaaggcaatcggacgttaactctggcactaatctggcaacttatgaggcgctacacactcaatatcctggaggagataggaggcgggcagaaggtgaacgacgatataatcgtgaactgggtgaacgagactctccgcgaagccaaaaagagcagctccataagcagtttcaaggaccctaaaatctctactagtctccccgtgctggatctcatcgacgccatccagccgggatccatcaactatgatctgttgaaaactgaaaatctgaatgatgatgagaaactgaataacgcaaaatatgcaatcagcatggccagaaagattggcgctagggtgtacgctctacctgaagacttggtggaggtgaaccccaagatggtgatgacagtattcgcatgtctgatgggcaagggcatgaaacgggtgtag

SEQ ID NO: 280046 - DNA, 201 bp, Artificial Sequence
  derived and/or modified sequence
atggccagaggctccgtaagcgacgaagaaatgatggagctgagagaggccttcgcgaaggtagacactgatggcaacggctatatcagcttcaacgaactcaatgacctcttcaaggccgcatgtttaccccttcctggctatcgggtcagggagataactgagaacctgatggccacgggggatttggatcaagactag

SEQ ID NO: 280047 - DNA, 1884 bp, Artificial Sequence
  derived and/or modified sequence
atggcccggggctctgtgtctgatgaggagatgatggagctgcgggaggcctttgccaaggtggacacagatggaaatggctacatctccttcaatgagctgaatgacctcttcaaggccgcctgcctgcccctgcccggctacagagtgcgggagatcacagagaacctgatggccaccggggacctggaccaggacggccgcatcagctttgatgagttcatcaagatcttccacggcctgaagagcacagatgtggccaagaccttcaggaaggccatcaacaagaaggagggcatctgtgccatcggcggcaccagcgagcagagctctgtgggcacccagcacagctacagcgaggaggagaagtatgcctttgtgaactggatcaacaaggccctggagaatgaccctgactgccgccacgtgatccccatgaaccccaacaccaatgacctcttcaatgctgtgggagatggcatcgtgctgtgcaagatgatcaacctgtctgtgcctgacaccattgatgagaggaccatcaacaagaagaagctgacccccttcaccatccaggagaacctgaacctggccctgaacagcgccagcgccatcggctgccacgtggtgaacattggagctgaggacctgaaggagggcaagccctacctggtgctgggcctgctgtggcaggtgatcaagattggcctgtttgctgacatcgagctgagcagaaatgaggccctgattgccctgctgcgggagggggagagcctggaggacctgatgaagctgagccctgaggagctgctgctgcgctgggccaactaccacctggagaatgccggctgcaacaagattggcaacttcagcacagacatcaaggacagcaaggcctactaccacctgctggagcaggtggcccccaagggagatgaggagggcgtgcctgctgtggtgattgacatgagcggcctgcgggagaaggatgacatccagagagctgagtgcatgctgcagcaggccgagcggctgggctgccggcagtttgtgacagccacagatgtggtgcggggcaaccccaagctgaacctggccttcatcgccaacctcttcaaccgctacccagccctgcacaagccagagaaccaggacatcgactggggcgccctggagggggagacccgggaggagaggaccttcaggaactggatgaacagcctgggcgtgaacccccgggtgaaccacctgtacagcgacctgagtgatgccctggtgatcttccagctgtatgagaagatcaaggtgcctgtggactggaacagagtgaacaagccaccctaccccaagctgggcggcaacatgaagaagctggagaactgcaactatgctgtggagctgggcaagaaccaggccaagttcagcctggtgggcatcggcggccaggacctgaatgaaggcaacagaaccctgaccctggccctgatctggcagctgatgaggcgctacaccctgaacatcctggaggagatcggcggcggccagaaggtgaatgatgacatcatcgtgaactgggtgaatgagaccctgcgggaggccaagaagagcagcagcatcagcagcttcaaggaccccaagatcagcaccagcctgcctgtgctggacctgattgatgccatccagcccggcagcatcaactatgacctgctgaagacagagaacctgaatgatgatgagaagctgaacaatgccaagtatgccatctccatggccaggaagattggagcccgggtgtatgccctgcctgaggacctggtggaggtgaaccccaagatggtgatgacagtgtttgcctgcctgatgggcaagggcatgaagagggtgtag

SEQ ID NO: 280048 - DNA, 741 bp, Artificial Sequence
  derived and/or modified sequence
atggcccggggctctgtgtctgatgaggagatgatggagctgcgggaggcctttgccaaggtggacacagatggaaatggctacatctccttcaatgagctgaatgacctcttcaaggccgcctgcctgcccctgcccggctacagagtgcgggagatcacagagaacctgatggccaccggggacctggaccaggacggccgcatcagctttgatgagttcatcaagatcttccacggcctgaagagcacagatgtggccaagaccttcaggaaggccatcaacaagaaggagggcatctgtgccatcggcggcaccagcgagcagagctctgtgggcacccagcacagctacagcgaggaggagaagtatgcctttgtgaactggatcaacaaggccctggagaatgaccctgactgccgccacgtgatccccatgaaccccaacaccaatgacctcttcaatgctgtgggagatggcatcgtgctgtgcaagatgatcaacctgtctgtgcctgacaccattgatgagaggaccatcaacaagaagaagctgacccccttcaccatccaggagaacctgaacctggccctgaacagcgccagcgccatcggctgccacgtggtgaacattggagctgaggacctgaaggagggcaagccctacctggtgctgggcctgctgtggcaggtgatcaagattggcctgtttgctgacatcgagctgagcagaaatgaatag

SEQ ID NO: 280049 - DNA, 591 bp, Artificial Sequence
  derived and/or modified sequence
atgtgtgccgaggatggagacagcaagttctccatgagcatctccatgaacagccccttcctggagatcctgcacctggagaactgcaactatgctgtggagctgggcaagaaccaggccaagttcagcctggtgggcattggaggccaggacctgaatgaaggcaacagaaccctgaccctggccctgatctggcagctgatgaggcgctacaccctgaacatcctggaggagattggaggcggccagaaggtgaatgatgacatcatcgtgaactgggtgaatgagaccctgcgggaggccaagaagagcagcagcatcagcagcttcaaggaccccaagatcagcaccagcctgcctgtgctggacctgattgatgccatccagcccggcagcatcaactatgacctgctgaagacagagaacctgaatgatgatgagaagctgaacaatgccaagtatgccatctccatggccaggaagatcggggcccgggtgtatgccctgcctgaggacctggtggaggtgaaccccaagatggtgatgacagtgtttgcctgcctgatgggcaagggcatgaagagggtgtag

SEQ ID NO: 280050 - DNA, 201 bp, Artificial Sequence
  derived and/or modified sequence
atggcccggggctctgtgtctgatgaggagatgatggagctgcgggaggcctttgccaaggtggacacagatggaaatggctacatctccttcaatgagctgaatgacctcttcaaggccgcctgcctgcccctgcccggctacagagtgcgggagatcacagagaacctgatggccaccggggacctggaccaggactag

SEQ ID NO: 280051 - DNA, 3787 bp, Artificial Sequence
  derived and/or modified sequence
caggtgatttttggtggggcggggacatgaaaaaaaagttaaaatgtccttataaagacaaaatctttttctttcctggctgatgatttgtcattctagtcacttcctgccttgtgaccacacacccaggcttgacaaagctgttctgcagatcagaaagaaggggttcctggtcatacaccagtactaccaaggacagcttttttcctgcaagatctgttacctaaagcaataaaaaatggccagaggatcagtgtccgatgaggaaatgatggagctcagagaagcttttgccaaagttgatactgatggcaatggatacatcagcttcaatgagttgaatgacttgttcaaggctgcttgcttgcctttgcctgggtatagagtacgagaaattacagaaaacctgatggctacaggtgatctggaccaagatggaaggatcagctttgatgagtttatcaagattttccatggcctaaaaagcacagatgttgccaagacctttagaaaagcaatcaataagaaggaagggatttgtgcaatcggtggtacttcagagcagtctagcgttggcacccaacactcctattcagaggaagaaaagtatgcctttgtcaactggataaacaaagccctggaaaatgatcctgattgtcggcatgtcatcccaatgaacccaaacacgaatgatctctttaatgctgttggagatggcattgtcctttgtaaaatgatcaacctgtcagtgccagacacaattgatgaaagaacaatcaacaaaaagaagctaacccctttcaccattcaggaaaatctgaacttggctctgaactctgcctcagccatcgggtgccatgtggtcaacataggggctgaggacctgaaggaggggaagccttatctggtcctgggacttctgtggcaagtcatcaagattgggttgtttgctgacattgaactcagcagaaatgaagctctgattgctcttttgagagaaggtgagagcctggaggatttgatgaaactctcccctgaagagctcttgctgaggtgggctaattaccacctggaaaatgcaggctgcaacaaaattggcaacttcagtactgacatcaaggactcaaaagcttattaccacctgcttgagcaggtggctccaaaaggagatgaagaaggtgttcctgctgttgttattgacatgtcaggactgcgggagaaggatgacatccagagggcagaatgcatgctgcagcaggcggagaggctgggctgccggcagtttgtcacagccacagatgttgtccgagggaaccccaagttgaacttggcttttattgccaacctctttaacagataccctgccctgcacaaaccagagaaccaggacattgactggggggctcttgaaggtgagacgagagaagagcggacatttaggaactggatgaactccctgggtgttaaccctcgagtcaatcatttgtacagtgacttatcagatgccctggtcatcttccagctctatgaaaagatcaaagttcctgttgactggaacagagtaaacaaaccgccataccccaaactgggaggcaatatgaagaagcttgagaattgtaactacgcggtagaattggggaagaatcaagcgaagttctccctggttggcatcggtggacaagatctcaatgaaggaaaccgcactctcacactggccttgatttggcagctaatgagaaggtatacactgaatatcctcgaagaaattggtggtggccagaaggtcaatgatgacattattgtcaactgggtgaatgaaacattgagggaagcaaagaaaagttcatccatctctagtttcaaggacccgaagattagtacaagtctgcctgttctggacctcatcgatgccatccaaccaggttccattaactatgaccttctgaagacagaaaatctgaatgatgatgagaaactcaacaatgcaaaatatgccatctctatggcccgaaaaattggagcaagagtgtatgccctgccagaagacctggttgaagtgaaccccaaaatggtcatgaccgtgtttgcctgcctcatggggaaaggaatgaagagggtgtgaggcccaatggggctgggtgggaggcggtgcactcactcctgactgcccggcacagatgctccagggatgattcaagccattccaaagttcaacttggtgacactctataagattccaaaaagcacatattagtgcagccaagtagcctctcctgtatttaacaaaaagtgcttcattctttgcaggaggcccaacctcctatatataggtttctattcttgatttatttgcttcttcgaaaatctagaggaaaagaaagaagttattttccaggtacccttctcgcttttgccattagccaaggatagaagctgcagtggtattaattttgatataatctttcaaaccagcttcatgtggcttcccttttctttgttcaagatgagggccaggaggggaaacatcacacctgccctaaaccctgttcctggaggtcagcatttgatctgttgcaagcccctctttctgtcccctcttcctaccctgcctcccttgactttgctcctcacacttttggaaccatgccttccgggggggcccatctcttctggccgtccttgtctctgggccacttggagtgtgtgataaatcagtcaagctgttgaagtctcaggagtctctggtagcctgcagaagtaagcctcatcatcagagcctttcctcaaaactggagtcccaaatgtcatcaggttttgttttttttcagccactaagaacccctctgcttttaactctagaatttgggcttggaccagatctaacatcttgaatactctgccctctagagccttcagccttaatggaaggttggatccaaggagggtgtaatggagcatcaagccactcggcggcagcatggagctataactaagcatcctttagggttctgcctctccaggcatttagccctcacattagatctagttactgtggtatggctaatacctgtcaacatttggaggcaatcctaccttgcttttgcttctagagcttagcatatctgattgttgtcaggccatattatcaatgtttacttttttggtactataaaagctttctgccacccctaaactccaggggggacaatatgtgccaatcaatagcacccctactcacatacacacacacctagccagctgtcaagggcagaatgaatctatgctggataagaaatggtggaactgcgttatgaagagctaatttactggacaaagaattccaaagcaaaaccagaacagtatgaatttgagcaggtctcataggttgagcaatttccccctaaaccaactgaaggctaaaaagcaacaggccattgtgaaccaatgcaagacgccctctatcatggtgaaaagctccatcaatgaggtatcttctttagtggtggtatgtaatggaacttagccatttttcaaagcaattgaaatgcattgctctggatctgttccttggcagtggactcagaaagccaacatgtggctcctcccagcccataaccagtatttttgctgcttctgaatacaaattggttggttttgacttcagattgaacttactgtagcctcagatgatttcccccctccgcctccaggaagaaagaatgttactgccttaataaaaaatgaaaagagaatgatgctcaaaatctttccaaataaaatgttccct

SEQ ID NO: 280052 - DNA, 3903 bp, Artificial Sequence
  derived and/or modified sequence
ggtgttgatgaacctgtgtgtgcagtcatagatacatcgtgtgtgtttgcaaaaatggcgaatgaggaaagatccagctctgacagaataatgagttgtgcaaagtgaaggccaaatgacatcaccggagatagcagtagttcaaagaaagcaaagcagaggaattgaactgctgcaaaatgcacgattcctccggcctcagatgaccaggcaccactagatacagaacactgtgctttccttctccaagtcacttcctgccttgtgaccacacacccaggcttgacaaagctgttctgcagatcagaaagaaggggttcctggtcatacaccagtactaccaaggacagcttttttcctgcaagatctgttacctaaagcaataaaaaatggccagaggatcagtgtccgatgaggaaatgatggagctcagagaagcttttgccaaagttgatactgatggcaatggatacatcagcttcaatgagttgaatgacttgttcaaggctgcttgcttgcctttgcctgggtatagagtacgagaaattacagaaaacctgatggctacaggtgatctggaccaagatggaaggatcagctttgatgagtttatcaagattttccatggcctaaaaagcacagatgttgccaagacctttagaaaagcaatcaataagaaggaagggatttgtgcaatcggtggtacttcagagcagtctagcgttggcacccaacactcctattcagaggaagaaaagtatgcctttgtcaactggataaacaaagccctggaaaatgatcctgattgtcggcatgtcatcccaatgaacccaaacacgaatgatctctttaatgctgttggagatggcattgtcctttgtaaaatgatcaacctgtcagtgccagacacaattgatgaaagaacaatcaacaaaaagaagctaacccctttcaccattcaggaaaatctgaacttggctctgaactctgcctcagccatcgggtgccatgtggtcaacataggggctgaggacctgaaggaggggaagccttatctggtcctgggacttctgtggcaagtcatcaagattgggttgtttgctgacattgaactcagcagaaatgaagctctgattgctcttttgagagaaggtgagagcctggaggatttgatgaaactctcccctgaagagctcttgctgaggtgggctaattaccacctggaaaatgcaggctgcaacaaaattggcaacttcagtactgacatcaaggactcaaaagcttattaccacctgcttgagcaggtggctccaaaaggagatgaagaaggtgttcctgctgttgttattgacatgtcaggactgcgggagaaggatgacatccagagggcagaatgcatgctgcagcaggcggagaggctgggctgccggcagtttgtcacagccacagatgttgtccgagggaaccccaagttgaacttggcttttattgccaacctctttaacagataccctgccctgcacaaaccagagaaccaggacattgactggggggctcttgaaggtgagacgagagaagagcggacatttaggaactggatgaactccctgggtgttaaccctcgagtcaatcatttgtacagtgacttatcagatgccctggtcatcttccagctctatgaaaagatcaaagttcctgttgactggaacagagtaaacaaaccgccataccccaaactgggaggcaatatgaagaagcttgagaattgtaactacgcggtagaattggggaagaatcaagcgaagttctccctggttggcatcggtggacaagatctcaatgaaggaaaccgcactctcacactggccttgatttggcagctaatgagaaggtatacactgaatatcctcgaagaaattggtggtggccagaaggtcaatgatgacattattgtcaactgggtgaatgaaacattgagggaagcaaagaaaagttcatccatctctagtttcaaggacccgaagattagtacaagtctgcctgttctggacctcatcgatgccatccaaccaggttccattaactatgaccttctgaagacagaaaatctgaatgatgatgagaaactcaacaatgcaaaatatgccatctctatggcccgaaaaattggagcaagagtgtatgccctgccagaagacctggttgaagtgaaccccaaaatggtcatgaccgtgtttgcctgcctcatggggaaaggaatgaagagggtgtgaggcccaatggggctgggtgggaggcggtgcactcactcctgactgcccggcacagatgctccagggatgattcaagccattccaaagttcaacttggtgacactctataagattccaaaaagcacatattagtgcagccaagtagcctctcctgtatttaacaaaaagtgcttcattctttgcaggaggcccaacctcctatatataggtttctattcttgatttatttgcttcttcgaaaatctagaggaaaagaaagaagttattttccaggtacccttctcgcttttgccattagccaaggatagaagctgcagtggtattaattttgatataatctttcaaaccagcttcatgtggcttcccttttctttgttcaagatgagggccaggaggggaaacatcacacctgccctaaaccctgttcctggaggtcagcatttgatctgttgcaagcccctctttctgtcccctcttcctaccctgcctcccttgactttgctcctcacacttttggaaccatgccttccgggggggcccatctcttctggccgtccttgtctctgggccacttggagtgtgtgataaatcagtcaagctgttgaagtctcaggagtctctggtagcctgcagaagtaagcctcatcatcagagcctttcctcaaaactggagtcccaaatgtcatcaggttttgttttttttcagccactaagaacccctctgcttttaactctagaatttgggcttggaccagatctaacatcttgaatactctgccctctagagccttcagccttaatggaaggttggatccaaggagggtgtaatggagcatcaagccactcggcggcagcatggagctataactaagcatcctttagggttctgcctctccaggcatttagccctcacattagatctagttactgtggtatggctaatacctgtcaacatttggaggcaatcctaccttgcttttgcttctagagcttagcatatctgattgttgtcaggccatattatcaatgtttacttttttggtactataaaagctttctgccacccctaaactccaggggggacaatatgtgccaatcaatagcacccctactcacatacacacacacctagccagctgtcaagggcagaatgaatctatgctggataagaaatggtggaactgcgttatgaagagctaatttactggacaaagaattccaaagcaaaaccagaacagtatgaatttgagcaggtctcataggttgagcaatttccccctaaaccaactgaaggctaaaaagcaacaggccattgtgaaccaatgcaagacgccctctatcatggtgaaaagctccatcaatgaggtatcttctttagtggtggtatgtaatggaacttagccatttttcaaagcaattgaaatgcattgctctggatctgttccttggcagtggactcagaaagccaacatgtggctcctcccagcccataaccagtatttttgctgcttctgaatacaaattggttggttttgacttcagattgaacttactgtagcctcagatgatttcccccctccgcctccaggaagaaagaatgttactgccttaataaaaaatgaaaagagaa

SEQ ID NO: 280053 - DNA, 819 bp, Artificial Sequence
  derived and/or modified sequence
atctgcctggggccagtgaggagaatgcatctagacagagcttttcgtgctgctgagatctgttacctaaagcaataaaaaatggccagaggatcagtgtccgatgaggaaatgatggagctcagagaagcttttgccaaagttgatactgatggcaatggatacatcagcttcaatgagttgaatgacttgttcaaggctgcttgcttgcctttgcctgggtatagagtacgagaaattacagaaaacctgatggctacaggtgatctggaccaagatggaaggatcagctttgatgagtttatcaagattttccatggcctaaaaagcacagatgttgccaagacctttagaaaagcaatcaataagaaggaagggatttgtgcaatcggtggtacttcagagcagtctagcgttggcacccaacactcctattcagaggaagaaaagtatgcctttgtcaactggataaacaaagccctggaaaatgatcctgattgtcggcatgtcatcccaatgaacccaaacacgaatgatctctttaatgctgttggagatggcattgtcctttgtaaaatgatcaacctgtcagtgccagacacaattgatgaaagaacaatcaacaaaaagaagctaacccctttcaccattcaggaaaatctgaacttggctctgaactctgcctcagccatcgggtgccatgtggtcaacataggggctgaggacctgaaggaggggaagccttatctggtcctgggacttctgtggcaagtcatcaagattgggttgtttgctgacattgaactcagcagaaatgaa

SEQ ID NO: 280054 - DNA, 1552 bp, Artificial Sequence
  derived and/or modified sequence
tttctcagcatttcttattgccgtgactgttaatgatccatgcgtagctacaggaatatctgttcacatgtccatttgctatgtgtgcagaggatggagactccaaattttccatgtcaatctccatgaattcaccttttttagaaatattacatcttgagaattgtaactacgcggtagaattggggaagaatcaagcgaagttctccctggttggcatcggtggacaagatctcaatgaaggaaaccgcactctcacactggccttgatttggcagctaatgagaaggtatacactgaatatcctcgaagaaattggtggtggccagaaggtcaatgatgacattattgtcaactgggtgaatgaaacattgagggaagcaaagaaaagttcatccatctctagtttcaaggacccgaagattagtacaagtctgcctgttctggacctcatcgatgccatccaaccaggttccattaactatgaccttctgaagacagaaaatctgaatgatgatgagaaactcaacaatgcaaaatatgccatctctatggcccgaaaaattggagcaagagtgtatgccctgccagaagacctggttgaagtgaaccccaaaatggtcatgaccgtgtttgcctgcctcatggggaaaggaatgaagagggtgtgaggcccaatggggctgggtgggaggcggtgcactcactcctgactgcccggcacagatgctccagggatgattcaagccattccaaagttcaacttggtgacactctataagattccaaaaagcacatattagtgcagccaagtagcctctcctgtatttaacaaaaagtgcttcattctttgcaggaggcccaacctcctatatataggtttctattcttgatttatttgcttcttcgaaaatctagaggaaaagaaagaagttattttccaggtacccttctcgcttttgccattagccaaggatagaagctgcagtggtattaattttgatataatctttcaaaccagcttcatgtggcttcccttttctttgttcaagatgagggccaggaggggaaacatcacacctgccctaaaccctgttcctggaggtcagcatttgatctgttgcaagcccctctttctgtcccctcttcctaccctgcctcccttgactttgctcctcacacttttggaaccatgccttccgggggggcccatctcttctggccgtccttgtctctgggccacttggagtgtgtgataaatcagtcaagctgttgaagtctcaggagtctctggtagcctgcagaagtaagcctcatcatcagagcctttcctcaaaactggagtcccaaatgtcatcaggttttgttttttttcagccactaagaacccctctgcttttaactctagaatttgggcttggaccagatctaacatcttgaatactctgccctctagagccttcagccttaatggaaggttggatccaaggagggtgtaatggagcatcaagccactcggcggcagcatggagctataactaagcatccttta

SEQ ID NO: 280055 - DNA, 753 bp, Artificial Sequence
  derived and/or modified sequence
ggcgggcgccgggaggggcaggcccagcccacggtgcagcgcgcgcggagccctcgccttcctccgacgcactgtggggctgcaggggaagctgcgggccgtgggggccggaggagaagccggctccacgcgcagctgctggcgaatgaggaaagatccagctctgacagaataatgagttgtgcaaagtgaaggccaaatgacatcaccggagatagcagtagttcaaagaaagcaaagcagaggaattgaactgctgcaaaatgcacgagtctcaaacattgtctcagcagcagcatcatatcttacaaaagttgaggaaatactgtatttccagcttaggaaactgaagattcctccggcctcagatgaccaggcaccactagatacagaacactgtgctttccttctccaagtcacttcctgccttgtgaccacacacccaggcttgacaaagctgttctgcagatcagaaagaaggggttcctggtcatacaccagtactaccaaggacagcttttttcctgcaagatctgttacctaaagcaataaaaaatggccagaggatcagtgtccgatgaggaaatgatggagctcagagaagcttttgccaaagttgatactgatggcaatggatacatcagcttcaatgagttgaatgacttgttcaaggctgcttgcttgcctttgcctgggtatagagtacgagaaattacagaaaacctgatggctacaggtgatctggaccaagat

SEQ ID NO: 280056 - DNA, 1884 bp, Artificial Sequence
  derived and/or modified sequence
atggcccggggcagcgtgagcgacgaggagatgatggagctgcgggaggcttttgccaaagttgatacggacggcaatgggtacatctctttcaatgagctgaacgacctgttcaaggccgcttgtctgccactacccggctaccgcgttagagaaatcacggagaatctcatggctaccggtgaccttgaccaggatgggagaatcagctttgatgagtttatcaaaatctttcacggactgaagagtaccgatgtggcaaagacttttaggaaagccatcaacaagaaggagggcatttgcgctatcgggggcacaagcgagcagtccagtgttggcacacagcactcctatagtgaggaggaaaagtatgccttcgtgaattggattaacaaagctctagaaaacgatcctgattgccgtcacgtcatccccatgaatcccaatacaaacgacctcttcaacgctgtgggcgatggcattgtgctatgtaaaatgatcaacctgtctgtgccggacactattgatgaacgcacaattaacaagaaaaagctgacacccttcactattcaggagaacctgaacctggcgctgaattctgcctcagcaatcggatgccacgtggtgaatattggagcagaggacctgaaggagggcaaaccctatttggtgttaggcctgctctggcaggtgatcaagatcggtttgttcgccgacatagagttgtccaggaacgaagctctcatcgccttattgcgggagggcgaatcactggaggatctgatgaagctgtcacccgaggagttgctcctgcgctgggccaattatcacctcgaaaatgcaggatgcaacaaaattgggaacttctctaccgatatcaaggactccaaagcatattatcacctgcttgagcaggtggctccgaagggtgacgaagagggcgtccccgctgtggttatagatatgtcaggcttgagagaaaaggacgacatccagagggccgagtgcatgttgcagcaggctgagcgcctgggctgccggcagttcgtgactgcaaccgatgtagttcgcggaaatccaaagctaaacctcgcgtttatcgcaaacctctttaatcgctaccctgccctccataaacccgagaaccaggacatcgactggggtgcccttgaaggcgaaacccgggaggagcggaccttcaggaattggatgaattcactgggtgtgaatccccgtgtaaatcacttgtacagcgatctgtctgatgctctcgtgattttccagttatacgagaagattaaagttcccgtagactggaatcgtgtcaataagcctccttatcctaagctgggtggtaacatgaagaagctggagaactgtaactatgcagtggagctcggcaaaaatcaagccaaatttagtctagtgggaattggtggacaggacttaaacgaaggaaaccgcacccttaccttggccttaatttggcagctcatgcgccggtatacattgaacattctggaagagatcggcgggggtcaaaaagtgaatgacgatatcattgtgaactgggtgaacgagaccctgagagaagccaagaaaagttcgagcatctcctcgtttaaagaccccaagatcagcacatccctccccgtgctggacctcattgacgccatccaaccggggtctatcaactatgatctgttaaagacagagaacctgaatgacgacgagaagctgaacaatgcgaagtacgctatcagcatggctcgaaagatcggggctagagtgtacgcgctgcccgaggatctagtggaagtgaatcctaagatggttatgacagtgtttgcttgtcttatgggaaagggtatgaaacgagtgtag

SEQ ID NO: 280057 - DNA, 1884 bp, Artificial Sequence
  derived and/or modified sequence
atggcccggggcagcgtgagcgacgaggagatgatggagctgcgggaggctttcgccaaggttgatactgacgggaatggatatatctcttttaacgagctcaatgatctttttaaggcagcctgcctccctctgcctggataccgggtaagggagatcactgagaacctgatggcaacgggcgacctggatcaggacggacgcataagctttgatgagttcattaaaatattccacggcttgaaaagcacggacgtagccaaaacattccggaaggccatcaataaaaaggaaggcatatgcgctatcggcggcacttcagagcaaagctcggttgggacccagcatagctattccgaggaggagaaatacgccttcgttaactggattaataaagcactagagaatgacccagactgccgacatgtcattccaatgaaccccaataccaatgatttgtttaatgcagtgggagatggtatcgtgctctgcaaaatgattaatctgtccgtgcccgacaccatcgacgagcgcacaatcaataagaaaaagttgactccttttacaattcaggaaaatctaaacctggccttgaacagtgccagcgccatcggctgtcacgtggtgaatatcggcgctgaagacctcaaagaggggaaaccttacttggtgctggggctgctctggcaggtcattaaaatcgggctctttgcggacatcgagctatcacggaacgaggccctaattgccctcctgcgcgagggcgagagcttggaagacctgatgaaattgagtcccgaagagctcttgctcaggtgggccaattatcatctggaaaacgcagggtgcaacaagattggcaatttcagtacagacatcaaggactctaaggcctattatcaccttctggaacaggtggcccctaaaggagacgaggaaggcgtgcctgcagtggtgatcgatatgagcggccttcgagagaaggatgacattcagagagcggaatgcatgctgcaacaggcagagcggctaggatgtaggcagttcgtaaccgccaccgacgtggttagaggcaatccgaagcttaacttggcatttatagccaacctattcaataggtatccggcactacacaaaccagagaaccaagatatcgactggggcgctttggagggggagacgcgtgaggaaagaacattcaggaattggatgaactctcttggggtcaacccgcgagtgaaccatctgtacagtgatttgtccgacgccctggtgatatttcagttgtacgagaagatcaaagtgccagtggactggaatcgcgttaacaaaccaccataccctaagctgggaggaaatatgaaaaagctggagaactgcaactacgcagtggaactgggtaaaaaccaagcaaagttttcactcgtggggatagggggccaggatctgaacgaaggtaaccgaaccctcaccctggccctgatttggcaactgatgcggcggtacactttaaatattcttgaagagatcggaggcggtcaaaaggtgaatgatgacattattgtaaactgggtgaacgaaacattaagggaagcaaaaaagtcctccagcattagtagcttcaaagaccccaagataagtaccagcctccctgtactggacctaatagatgcaattcagcccggtagcatcaattacgatcttctgaagaccgaaaatctaaatgacgacgagaagcttaacaacgctaaatatgctatctcaatggcccggaagattggcgcgcgagtctatgccctccccgaagatctggtggaggtgaaccctaaaatggtgatgaccgtcttcgcctgcttgatggggaaaggcatgaagcgagtctag

SEQ ID NO: 280058 - DNA, 741 bp, Artificial Sequence
  derived and/or modified sequence
atggcccggggcagcgtgagcgacgaggagatgatggagctgcgggaagccttcgccaaggttgatactgacggcaacggctacatttcattcaatgaactgaacgatttatttaaggcagcctgcctgccgcttccagggtacagagtcagggaaatcacagagaacctcatggccaccggcgatctagatcaggacgggcggatcagctttgacgagttcatcaaaatcttccatggactgaagagcaccgatgtggccaaaaccttccgtaaagcaatcaataagaaagagggtatttgcgcaatcggcggaacgagcgagcagtcatcagtaggaacacagcatagctatagcgaagaagaaaaatacgcttttgttaactggattaataaggctctggagaacgacccagactgccgccacgtcatccctatgaaccctaacaccaacgacctcttcaacgctgttggtgatggcatcgttctttgcaaaatgatcaacctttccgtaccagacacaattgacgaacgcacaattaataaaaagaagttgaccccctttactattcaggagaacctaaatttggcccttaacagtgcctcagccatcggttgccacgtcgttaatatcggagccgaagacctgaaagagggcaagccctaccttgtgctgggcctgctatggcaagttatcaagattggcctctttgcagatatagaactgtcccgtaacgagtag

SEQ ID NO: 280059 - DNA, 591 bp, Artificial Sequence
  derived and/or modified sequence
atgtgcgccgaggacggcgacagcaagttcagcatgagcatcagcatgaatagcccttttctggagattctgcatctcgagaactgcaactatgctgtggagctggggaaaaaccaagccaaattcagtctagtcgggattggcgggcaggacttaaacgaaggcaacagaaccctgaccctggcactgatttggcagctgatgaggcgctatactctgaacatcctcgaagagattggtggcggtcagaaggttaacgacgacatcatcgtgaattgggtcaacgaaacgctccgtgaggcgaagaaaagctcctcaatcagctccttcaaggatccaaagatcagtacaagcctcccagtcctcgatctgattgacgccattcagccgggaagtattaactatgatctcctcaagactgagaatctcaacgatgacgagaagctaaacaatgctaaatacgccatcagtatggccaggaaaatcggggcacgcgtgtatgcgttgcccgaagacctagttgaagttaaccccaagatggtgatgactgtctttgcctgcttgatggggaaaggaatgaagagggtctag

SEQ ID NO: 280060 - DNA, 201 bp, Artificial Sequence
  derived and/or modified sequence
atggcccggggcagcgtgagcgacgaggagatgatggagctgcgggaggcattcgccaaggtggatacagacggaaacggctacatctcttttaatgagctgaacgacctctttaaagctgcctgtcttccacttcccggctatagggtgcgagagataaccgagaacctgatggcgacgggtgatctagatcaagactag

SEQ ID NO: 280061 - DNA, 1884 bp, Artificial Sequence
  derived and/or modified sequence
atggcgagagggtccgtttccgacgaagagatgatggaactccgggaggccttcgcaaaagtggacacagatggcaacggctacattagcttcaatgagctgaatgatttgttcaaggcagcttgcctgcccctgccaggataccgggtaagggagattacggaaaatttgatggccacaggggacctggaccaggacggccgaataagcttcgatgaatttattaaaatcttccacggtctcaaatccactgatgtggcgaagacgtttcggaaagccattaataagaaagagggaatttgtgccattggcggaacgtctgagcaatctagtgttggaactcagcactcctattcagaagaggagaaatacgccttcgtcaactggatcaacaaggccctcgaaaacgaccctgactgtcgtcacgtgattcccatgaaccccaacacaaacgacctgtttaatgccgtgggagatggaattgtgctctgcaagatgatcaacctctccgtcccagacacaattgacgaaaggacaatcaataaaaagaaactgacccctttcacaattcaggagaatctgaatctagcactgaattcagcaagtgcaatcggctgtcacgtggttaatataggagcagaagatctcaaagaagggaaaccatacctggtcctggggcttctgtggcaggtgatcaagataggtctattcgccgacattgaattgagccgcaacgaagcccttatcgcattgttgagggaaggggagtcgctcgaggatttgatgaagctcagccccgaggaactgctcttgaggtgggcgaactaccatcttgaaaacgccggttgcaataaaatcggaaactttagtaccgatattaaagacagcaaggcctactaccacctgttggaacaagtggctcccaagggcgacgaagagggagtgcccgctgtcgttatcgatatgtcaggtctgagagagaaagacgacattcagagggccgagtgtatgctgcaacaggcggagaggttaggctgtagacagttcgttacagctacagatgttgttcggggtaatcccaagctgaacctggcctttatcgccaacctgtttaatcggtaccccgctctgcataaacccgaaaatcaagatatagattggggcgctctggaaggtgaaactcgggaggagcgcacatttcgcaattggatgaattcattgggcgtgaatccgcgagtgaaccatttgtacagtgacttatccgacgccctggtgatttttcagttatatgaaaaaatcaaggtccccgtggattggaacagggtgaacaaaccaccctaccccaaactgggtggtaacatgaagaagctggagaactgtaactacgccgtggagctaggaaagaaccaagcaaaattttccctggtgggtatcgggggtcaggacctcaatgagggtaaccggacactaacattggcactcatctggcaactgatgagacgatacaccttaaatatcctggaagagataggcggtggacagaaggtgaatgatgatattatcgtcaactgggtcaatgaaaccttacgagaggcaaaaaagagtagctctatcagcagcttcaaagaccctaagataagtacaagtctcccagttttagacttaattgacgccattcaaccgggtagtatcaattacgacctcttgaaaactgaaaacctcaatgacgacgaaaagctgaacaacgccaaatacgccatctccatggcacgaaaaatcggagcgcgtgtctatgctcttcccgaggatctagtagaagtcaacccgaaaatggtcatgaccgtgtttgcgtgccttatgggcaagggcatgaaaagagtgtag

SEQ ID NO: 280062 - DNA, 1884 bp, Artificial Sequence
  derived and/or modified sequence
atggccagaggaagcgtgtccgacgaagaaatgatggagctgcgcgaggccttcgcaaaagtggatactgacgggaatgggtacataagctttaacgagctcaacgatttattcaaagcagcctgcttacccttgcctggttatagagttcgggagatcaccgagaacctgatggccaccggcgacctggaccaggatgggaggatttcatttgatgagttcatcaaaatctttcacgggctcaaatctactgacgtggctaagacttttaggaaggcaattaataagaaggagggtatatgcgccatcggtgggacctccgaacaaagcagtgttggcacacagcattcctatagtgaggaggaaaaatatgctttcgtgaattggattaataaggccctggagaatgatccagattgtaggcacgttatacccatgaatccgaatacaaacgacctgttcaatgctgtaggggacgggatagtcctgtgcaagatgattaacctctccgtgccggatactatagacgaaagaacaataaataagaaaaagctgaccccattcaccatacaggagaatcttaacctggcccttaacagcgcgagcgccatagggtgccatgtggtgaatatcggggcagaagacttgaaggaagggaagccctacctcgtcctcggcctcctctggcaggtcattaagattgggcttttcgctgacatcgagctctccagaaatgaggcgctcatagctttgctgcgcgagggcgaaagcttagaggatttgatgaagctctctccagaggagcttttgcttagatgggccaattaccatctggaaaacgctgggtgtaacaagattgggaatttttctactgacattaaggactctaaagcctattatcatcttttggagcaagtggcccctaaaggggacgaagaaggagtgcccgctgttgtcatagacatgtcaggattaagggagaaagacgacatccaaagagcagagtgtatgctgcagcaggctgagaggctaggatgtcgacagtttgttacggcgaccgacgttgtgagaggaaacccgaagttaaacctggccttcatcgccaatttgttcaataggtaccctgcactccataagcctgaaaatcaggatatcgactggggtgctctggaaggagaaacccgtgaggagcggaccttcaggaattggatgaactctctgggcgtgaaccccagggtcaatcatttgtactcagatctaagcgatgccttagtgatcttccagttgtatgaaaaaatcaaagtacccgtggactggaatcgggtgaataaaccgccatacccgaagctagggggtaatatgaaaaagctggaaaactgcaactacgcggtcgagctcggcaagaatcaggccaagttctctctcgtgggaatcggcggtcaggatctcaacgagggaaaccgaacactcacactggccctcatctggcagctaatgcgaagatacaccctgaatatcctagaggaaatcggcggtggtcagaaggtcaacgacgatatcatcgtgaactgggtaaacgagaccttgcgagaagcaaagaaaagtagctcgatttcctcttttaaggatcccaaaatttctacgtctctccccgtgctcgacctgatcgacgccattcagccagggtccattaactatgacctcttgaagaccgagaatctgaacgacgacgagaaactgaacaacgcaaaatacgctatctctatggccagaaaaataggggctcgcgtgtacgctttaccagaggacttagtggaagtgaatcccaagatggtgatgactgtctttgcctgcctgatgggaaaaggcatgaagcgggtgtag

SEQ ID NO: 280063 - DNA, 741 bp, Artificial Sequence
  derived and/or modified sequence
atggccaggggttccgttagtgacgaggagatgatggagctgagggaagcctttgcaaaggtggatacagatgggaatgggtatatctccttcaacgagttgaatgatctctttaaagccgcatgcctgcctttgcccggttacagagttagagagataactgaaaacctcatggctaccggggatctcgaccaggacggcagaatcagttttgacgagtttattaagatcttccacggtctgaaaagcacggacgtggccaaaaccttccggaaggccattaataagaaagaaggaatctgtgccattggtggtacaagcgagcagtcctctgttggaacccagcactcctattctgaagaggagaagtatgctttcgttaactggatcaacaaagctctcgagaatgaccccgattgcaggcatgtgattcccatgaacccaaatacgaacgatcttttcaacgccgttggcgatggtatcgtgctgtgtaagatgataaatctgtcggtgcctgatacgatagacgagcgcactataaacaagaagaaactcactccttttacaatacaggagaatctgaatctagctctcaactcagcttcggcaatcgggtgtcacgtggtcaacatcggggcagaagaccttaaggaaggaaagccctatctggttctcgggctgctttggcaagtaatcaagataggattgttcgccgacatcgaattgtcgcggaatgagtag

SEQ ID NO: 280064 - DNA, 591 bp, Artificial Sequence
  derived and/or modified sequence
atgtgcgctgaagacggcgactccaagtttagcatgtctattagtatgaacagcccctttctcgagattctccatcttgaaaactgtaattacgccgttgagcttgggaaaaatcaggccaagttcagtttggtaggtatcgggggacaggacctgaatgaggggaacaggacacttaccctcgccttgatctggcagctgatgcggagatacaccctcaacatccttgaggaaattgggggaggacagaaggtgaatgatgacataatcgtgaattgggttaacgaaacactgcgtgaggctaagaagtcttcttctataagctccttcaaagatcctaaaatcagcacatccctgcccgtgttggacctcatcgatgctattcagccaggatcgatcaattacgacttgctgaagactgaaaacctgaacgatgatgaaaagctcaataacgctaaatacgccattagcatggcccgaaaaataggcgctcgcgtttatgccctgcctgaggatctggtagaggtcaatccaaagatggttatgaccgtgttcgcctgcttaatggggaagggcatgaagagggtgtag

SEQ ID NO: 280065 - DNA, 201 bp, Artificial Sequence
  derived and/or modified sequence
atggccagggggtctgtgtctgatgaggagatgatggaactgcgagaagctttcgccaaagtagacaccgacggcaacggttacatttcattcaatgaactgaacgatctgttcaaagccgcatgcctccctctccctggttatcgtgtacgcgagataaccgagaatctcatggcgacgggcgacctcgatcaggactag

SEQ ID NO: 280066 - DNA, 1884 bp, Artificial Sequence
  derived and/or modified sequence
atggccagaggcagcgtgagcgacgaggagatgatggagctgagagaggccttcgccaaggtggacaccgacggcaacggctacatcagcttcaacgagctgaacgacctgttcaaggccgcctgcctgcccctgcccggctacagagtgagagagatcaccgagaacctgatggccaccggcgacctggaccaggacggcagaatcagcttcgacgagttcatcaagatcttccacggcctgaagagcaccgacgtggccaagaccttcagaaaggccatcaacaagaaggagggcatctgcgccatcggcggcaccagcgagcagagcagcgtgggcacccagcacagctacagcgaggaggagaagtacgccttcgtgaactggatcaacaaggccctggagaacgaccccgactgcagacacgtgatccccatgaaccccaacaccaacgacctgttcaacgccgtgggcgacggcatcgtgctgtgcaagatgatcaacctgagcgtgcccgacaccatcgacgagagaaccatcaacaagaagaagctgacccccttcaccatccaggagaacctgaacctggccctgaacagcgccagcgccatcggctgccacgtggtgaacatcggcgccgaggacctgaaggagggcaagccctacctggtgctgggcctgctgtggcaggtgatcaagatcggcctgttcgccgacatcgagctgagcagaaacgaggccctgatcgccctgctgagagagggcgagagcctggaggacctgatgaagctgagccccgaggagctgctgctgagatgggccaactaccacctggagaacgccggctgcaacaagatcggcaacttcagcaccgacatcaaggacagcaaggcctactaccacctgctggagcaggtggcccccaagggcgacgaggagggcgtgcccgccgtggtgatcgacatgagcggcctgagagagaaggacgacatccagagagccgagtgcatgctgcagcaggccgagagactgggctgcagacagttcgtgaccgccaccgacgtggtgagaggcaaccccaagctgaacctggccttcatcgccaacctgttcaacagataccccgccctgcacaagcccgagaaccaggacatcgactggggcgccctggagggcgagaccagagaggagagaaccttcagaaactggatgaacagcctgggcgtgaaccccagagtgaaccacctgtacagcgacctgagcgacgccctggtgatcttccagctgtacgagaagatcaaggtgcccgtggactggaacagagtgaacaagcccccctaccccaagctgggcggcaacatgaagaagctggagaactgcaactacgccgtggagctgggcaagaaccaggccaagttcagcctggtgggcatcggcggccaggacctgaacgagggcaacagaaccctgaccctggccctgatctggcagctgatgagaagatacaccctgaacatcctggaggagatcggcggcggccagaaggtgaacgacgacatcatcgtgaactgggtgaacgagaccctgagagaggccaagaagagcagcagcatcagcagcttcaaggaccccaagatcagcaccagcctgcccgtgctggacctgatcgacgccatccagcccggcagcatcaactacgacctgctgaagaccgagaacctgaacgacgacgagaagctgaacaacgccaagtacgccatcagcatggccagaaagatcggcgccagagtgtacgccctgcccgaggacctggtggaggtgaaccccaagatggtgatgaccgtgttcgcctgcctgatgggcaagggcatgaagagagtgtag

SEQ ID NO: 280067 - DNA, 741 bp, Artificial Sequence
  derived and/or modified sequence
atggccagaggcagcgtgagcgacgaggagatgatggagctgagagaggccttcgccaaggtggacaccgacggcaacggctacatcagcttcaacgagctgaacgacctgttcaaggccgcctgcctgcccctgcccggctacagagtgagagagatcaccgagaacctgatggccaccggcgacctggaccaggacggcagaatcagcttcgacgagttcatcaagatcttccacggcctgaagagcaccgacgtggccaagaccttcagaaaggccatcaacaagaaggagggcatctgcgccatcggcggcaccagcgagcagagcagcgtgggcacccagcacagctacagcgaggaggagaagtacgccttcgtgaactggatcaacaaggccctggagaacgaccccgactgcagacacgtgatccccatgaaccccaacaccaacgacctgttcaacgccgtgggcgacggcatcgtgctgtgcaagatgatcaacctgagcgtgcccgacaccatcgacgagagaaccatcaacaagaagaagctgacccccttcaccatccaggagaacctgaacctggccctgaacagcgccagcgccatcggctgccacgtggtgaacatcggcgccgaggacctgaaggagggcaagccctacctggtgctgggcctgctgtggcaggtgatcaagatcggcctgttcgccgacatcgagctgagcagaaacgagtag

SEQ ID NO: 280068 - DNA, 591 bp, Artificial Sequence
  derived and/or modified sequence
atgtgcgccgaggacggcgacagcaagttcagcatgagcatcagcatgaacagccccttcctggagatcctgcacctggagaactgcaactacgccgtggagctgggcaagaaccaggccaagttcagcctggtgggcatcggcggccaggacctgaacgagggcaacagaaccctgaccctggccctgatctggcagctgatgagaagatacaccctgaacatcctggaggagatcggcggcggccagaaggtgaacgacgacatcatcgtgaactgggtgaacgagaccctgagagaggccaagaagagcagcagcatcagcagcttcaaggaccccaagatcagcaccagcctgcccgtgctggacctgatcgacgccatccagcccggcagcatcaactacgacctgctgaagaccgagaacctgaacgacgacgagaagctgaacaacgccaagtacgccatcagcatggccagaaagatcggcgccagagtgtacgccctgcccgaggacctggtggaggtgaaccccaagatggtgatgaccgtgttcgcctgcctgatgggcaagggcatgaagagagtgtag

SEQ ID NO: 280069 - DNA, 201 bp, Artificial Sequence
  derived and/or modified sequence
atggccagaggcagcgtgagcgacgaggagatgatggagctgagagaggccttcgccaaggtggacaccgacggcaacggctacatcagcttcaacgagctgaacgacctgttcaaggccgcctgcctgcccctgcccggctacagagtgagagagatcaccgagaacctgatggccaccggcgacctggaccaggactag

SEQ ID NO: 280070 - protein, 1387 aa, Artificial Sequence
  derived and/or modified sequence
MPEQERQITAREGASRKILSKLSLPTRAWEPAMKKSFAFDNVGYEGGLDGLGPSSQVATSTVRILGMTCQSCVKSIEDRISNLKGIISMKVSLEQGSATVKYVPSVVCLQQVCHQIGDMGFEASIAEGKAASWPSRSLPAQEAVVKLRVEGMTCQSCVSSIEGKVRKLQGVVRVKVSLSNQEAVITYQPYLIQPEDLRDHVNDMGFEAAIKSKVAPLSLGPIDIERLQSTNPKRPLSSANQNFNNSETLGHQGSHVVTLQLRIDGMHCKSCVLNIEENIGQLLGVQSIQVSLENKTAQVKYDPSCTSPVALQRAIEALPPGNFKVSLPDGAEGSGTDHRSSSSHSPGSPPRNQVQGTCSTTLIAIAGMTCASCVHSIEGMISQLEGVQQISVSLAEGTATVLYNPSVISPEELRAAIEDMGFEASVVSESCSTNPLGNHSAGNSMVQTTDGTPTSVQEVAPHTGRLPANHAPDILAKSPQSTRAVAPQKCFLQIKGMTCASCVSNIERNLQKEAGVLSVLVALMAGKAEIKYDPEVIQPLEIAQFIQDLGFEAAVMEDYAGSDGNIELTITGMTCASCVHNIESKLTRTNGITYASVALATSKALVKFDPEIIGPRDIIKIIEEIGFHASLAQRNPNAHHLDHKMEIKQWKKSFLCSLVFGIPVMALMIYMLIPSNEPHQSMVLDHNIIPGLSILNLIFFILCTFVQSKTSEALAKLMSLQATEATVVTLGEDNLIIREEQVPMELVQRGDIVKVVPGGKFPVDGKVLEGNTMADESLITGEAMPVTKKPGSTVIAGSINAHGSVLIKATHVGNDTTLAQIVKLVEEAQMSKAPIQQLADRFSGYFVPFIIIMSTLTLVVWIVIGFIDFGVVQRYFPNPNKHISQTEVIIRFAFQTSITVLCIACPCSLGLATPTAVMVGTGVAAQNGILIKGGKPLEMAHKIKTVMFDKTGTITHGVPRVMRVLLLGDVATLPLRKVLAVVGTAEASSEHPLGVAVTKYCKEELGTETLGYCTDFQAVPGCGIGCKVSNVEGILAHSERPLSAPASHLNEAGSLPAEKDAVPQTFSVLIGNREWLRRNGLTISSDVSDAMTDHEMKGQTAILVAIDGVLCGMIAIADAVKQEAALAVHTLQSMGVDVVLITGDNRKTARAIATQVGINKVFAEVLPSHKVAKVQELQNKGKKVAMVGDGVNDSPALAQADMGVAIGTGTDVAIEAADVVLIRNDLLDVVASIHLSKRTVRRIRINLVLALIYNLVGIPIAAGVFMPIGIVLQPWMGSAAMAASSVSVVLSSLQLKCYKKPDLERYEAQAHGHMKPLTASQVSVHIGMDDRWRDSPRATPWDQVSYVSQVSLSSLTSDKPSRHSAAADDDGDKWSLLLNGRDEEQYI

SEQ ID NO: 280071 - DNA, 4164 bp, Artificial Sequence
  derived and/or modified sequence
atgcccgagcaggagagacagatcaccgccagagagggcgccagcagaaagatcctgagcaagctgagcctgcccaccagagcctgggagcccgccatgaagaagagcttcgccttcgacaacgtgggctacgagggcggcctggacggcctgggccccagcagccaggtggccaccagcaccgtgagaatcctgggcatgacctgccagagctgcgtgaagagcatcgaggacagaatcagcaacctgaagggcatcatcagcatgaaggtgagcctggagcagggcagcgccaccgtgaagtacgtgcccagcgtggtgtgcctgcagcaggtgtgccaccagatcggcgacatgggcttcgaggccagcatcgccgagggcaaggccgccagctggcccagcagaagcctgcccgcccaggaggccgtggtgaagctgagagtggagggcatgacctgccagagctgcgtgagcagcatcgagggcaaggtgagaaagctgcagggcgtggtgagagtgaaggtgagcctgagcaaccaggaggccgtgatcacctaccagccctacctgatccagcccgaggacctgagagaccacgtgaacgacatgggcttcgaggccgccatcaagagcaaggtggcccccctgagcctgggccccatcgacatcgagagactgcagagcaccaaccccaagagacccctgagcagcgccaaccagaacttcaacaacagcgagaccctgggccaccagggcagccacgtggtgaccctgcagctgagaatcgacggcatgcactgcaagagctgcgtgctgaacatcgaggagaacatcggccagctgctgggcgtgcagagcatccaggtgagcctggagaacaagaccgcccaggtgaagtacgaccccagctgcaccagccccgtggccctgcagagagccatcgaggccctgccccccggcaacttcaaggtgagcctgcccgacggcgccgagggcagcggcaccgaccacagaagcagcagcagccacagccccggcagcccccccagaaaccaggtgcagggcacctgcagcaccaccctgatcgccatcgccggcatgacctgcgccagctgcgtgcacagcatcgagggcatgatcagccagctggagggcgtgcagcagatcagcgtgagcctggccgagggcaccgccaccgtgctgtacaaccccagcgtgatcagccccgaggagctgagagccgccatcgaggacatgggcttcgaggccagcgtggtgagcgagagctgcagcaccaaccccctgggcaaccacagcgccggcaacagcatggtgcagaccaccgacggcacccccaccagcgtgcaggaggtggccccccacaccggcagactgcccgccaaccacgcccccgacatcctggccaagagcccccagagcaccagagccgtggccccccagaagtgcttcctgcagatcaagggcatgacctgcgccagctgcgtgagcaacatcgagagaaacctgcagaaggaggccggcgtgctgagcgtgctggtggccctgatggccggcaaggccgagatcaagtacgaccccgaggtgatccagcccctggagatcgcccagttcatccaggacctgggcttcgaggccgccgtgatggaggactacgccggcagcgacggcaacatcgagctgaccatcaccggcatgacctgcgccagctgcgtgcacaacatcgagagcaagctgaccagaaccaacggcatcacctacgccagcgtggccctggccaccagcaaggccctggtgaagttcgaccccgagatcatcggccccagagacatcatcaagatcatcgaggagatcggcttccacgccagcctggcccagagaaaccccaacgcccaccacctggaccacaagatggagatcaagcagtggaagaagagcttcctgtgcagcctggtgttcggcatccccgtgatggccctgatgatctacatgctgatccccagcaacgagccccaccagagcatggtgctggaccacaacatcatccccggcctgagcatcctgaacctgatcttcttcatcctgtgcaccttcgtgcagagcaagaccagcgaggccctggccaagctgatgagcctgcaggccaccgaggccaccgtggtgaccctgggcgaggacaacctgatcatcagagaggagcaggtgcccatggagctggtgcagagaggcgacatcgtgaaggtggtgcccggcggcaagttccccgtggacggcaaggtgctggagggcaacaccatggccgacgagagcctgatcaccggcgaggccatgcccgtgaccaagaagcccggcagcaccgtgatcgccggcagcatcaacgcccacggcagcgtgctgatcaaggccacccacgtgggcaacgacaccaccctggcccagatcgtgaagctggtggaggaggcccagatgagcaaggcccccatccagcagctggccgacagattcagcggctacttcgtgcccttcatcatcatcatgagcaccctgaccctggtggtgtggatcgtgatcggcttcatcgacttcggcgtggtgcagagatacttccccaaccccaacaagcacatcagccagaccgaggtgatcatcagattcgccttccagaccagcatcaccgtgctgtgcatcgcctgcccctgcagcctgggcctggccacccccaccgccgtgatggtgggcaccggcgtggccgcccagaacggcatcctgatcaagggcggcaagcccctggagatggcccacaagatcaagaccgtgatgttcgacaagaccggcaccatcacccacggcgtgcccagagtgatgagagtgctgctgctgggcgacgtggccaccctgcccctgagaaaggtgctggccgtggtgggcaccgccgaggccagcagcgagcaccccctgggcgtggccgtgaccaagtactgcaaggaggagctgggcaccgagaccctgggctactgcaccgacttccaggccgtgcccggctgcggcatcggctgcaaggtgagcaacgtggagggcatcctggcccacagcgagagacccctgagcgcccccgccagccacctgaacgaggccggcagcctgcccgccgagaaggacgccgtgccccagaccttcagcgtgctgatcggcaacagagagtggctgagaagaaacggcctgaccatcagcagcgacgtgagcgacgccatgaccgaccacgagatgaagggccagaccgccatcctggtggccatcgacggcgtgctgtgcggcatgatcgccatcgccgacgccgtgaagcaggaggccgccctggccgtgcacaccctgcagagcatgggcgtggacgtggtgctgatcaccggcgacaacagaaagaccgccagagccatcgccacccaggtgggcatcaacaaggtgttcgccgaggtgctgcccagccacaaggtggccaaggtgcaggagctgcagaacaagggcaagaaggtggccatggtgggcgacggcgtgaacgacagccccgccctggcccaggccgacatgggcgtggccatcggcaccggcaccgacgtggccatcgaggccgccgacgtggtgctgatcagaaacgacctgctggacgtggtggccagcatccacctgagcaagagaaccgtgagaagaatcagaatcaacctggtgctggccctgatctacaacctggtgggcatccccatcgccgccggcgtgttcatgcccatcggcatcgtgctgcagccctggatgggcagcgccgccatggccgccagcagcgtgagcgtggtgctgagcagcctgcagctgaagtgctacaagaagcccgacctggagagatacgaggcccaggcccacggccacatgaagcccctgaccgccagccaggtgagcgtgcacatcggcatggacgacagatggagagacagccccagagccaccccctgggaccaggtgagctacgtgagccaggtgagcctgagcagcctgaccagcgacaagcccagcagacacagcgccgccgccgacgacgacggcgacaagtggagcctgctgctgaacggcagagacgaggagcagtacatctag

SEQ ID NO: 280072 - DNA, 4164 bp, Artificial Sequence
  derived and/or modified sequence
atgcccgaacaggagagacagataacggctcgagaaggggcttccagaaaaatcctgtctaagctcagtcttcctacgagggcctgggagccagctatgaaaaagtcttttgccttcgacaatgtgggctatgagggtgggctggacgggcttgggcccagcagccaggtggcaacgtccaccgtaaggatcttgggaatgacctgccagtcatgcgtgaagtccatcgaggatcgaatctctaacctcaaaggcattatctctatgaaggtgtccctggagcagggatccgctacagtgaagtatgttccttccgtggtctgtctccagcaggtgtgccaccaaatcggagacatgggattcgaggcttctatcgccgagggaaaggccgcttcctggcccagtcgctcactccccgcccaagaagccgtcgtcaaattgagagtcgagggaatgacttgccagtcctgcgtgtcctccatcgagggaaaagtgcgaaagctccagggtgttgttcgggtgaaagtgagtttgtcgaatcaggaagcagttatcacctaccaaccgtatttgattcagcctgaagacttacgcgaccatgttaacgatatgggttttgaggcagctatcaagagcaaagtggcacctctgtccttgggaccaattgatatcgaacgcctgcaatccacgaaccccaaacgacccctgtcctccgcaaatcagaatttcaataattccgaaacgctgggccatcaaggtagtcatgttgtgaccctccagctcaggattgatggcatgcattgtaagagctgtgtcctcaacattgaggagaatatcggacagttgctgggggttcagtcgattcaagtgagtctggaaaacaagacagcacaagttaagtacgatccatcatgcacaagcccggtggccctgcagagagcaattgaggcactgcccccagggaacttcaaggtgagcttgccggacggcgctgagggatcagggaccgatcacaggagctcaagtagccatagcccaggtagcccgccgaggaaccaggtgcaagggacctgctcgactacgctgatcgccatcgctggaatgacatgtgccagctgcgtccattctatcgaagggatgatttcccagctagaaggggtgcagcaaatttccgtgagcctggctgagggtactgcgactgtgttgtacaatccctccgtcatcagtccagaggaactgagggcagctattgaagacatgggttttgaggcgtctgtagtttctgagagctgctctactaaccccctgggtaatcattctgccggcaatagcatggtacagaccacagacggaactcctacctctgtccaggaagttgctccacatacagggcgcctgccagcaaatcatgcccccgatatcctggccaaatcaccccagtcaactagggcggttgcaccgcagaaatgcttcttgcagatcaaggggatgacatgcgcctcctgcgtgtcgaacatagaacgtaatctgcaaaaggaagctggagtcctgtccgtgttggtagcgttgatggccggtaaggctgaaataaaatacgatcccgaggtgatccagccccttgagatcgcccagttcatccaggatctaggtttcgaagcagcagtgatggaagattatgcaggcagcgacgggaacatagaactcactatcaccggtatgacatgcgcaagctgtgtgcacaatatagagagcaagctgaccaggaccaacggcattacatacgcttcagtcgctctggctacaagcaaggccctagtcaaattcgatccagaaataattggccctcgagacattatcaaaatcattgaggagattggattccatgctagcctggcccagcggaaccctaatgcccaccacctggaccacaagatggagattaagcagtggaagaagtccttcctgtgttctctggtcttcggcatacctgtgatggcgctgatgatatatatgctgattccatccaacgaaccacaccaatccatggtgctcgatcataacatcatccctggcctatccatcctgaacctaatattcttcatcctctgcacatttgttcagtccaaaacgagcgaggcactagctaagctgatgagcttacaggccacagaggcaactgtggtcactctcggcgaggacaaccttatcattagagaggagcaagtgcccatggaactcgtccaacggggtgatattgtgaaggttgtgcctggcggaaagttccctgtcgatggaaaggtactggaagggaataccatggctgacgagagcttgatcacgggagaagcgatgcctgtgactaagaagcccggctccacagtgatcgcaggatccatcaatgcacatggaagtgtgctgattaaggccacacacgtgggcaatgatactaccctagctcagattgtgaagctggtggaggaagcacaaatgtctaaggctccaatccaacagctggccgatagattttcggggtactttgtacctttcatcattatcatgtctaccctgacactggttgtttggatcgtgataggattcatcgacttcggagtagtccagcggtacttcccaaacccaaacaaacacattagccaaaccgaggtgataatccgcttcgcttttcaaacgtcaatcaccgtactgtgcatcgcatgtccatgctcactgggtctcgcaactcctacagccgtgatggtgggtaccggggtcgctgctcagaacgggattctgattaagggcggaaagccgctggagatggcacacaagatcaagaccgtgatgtttgataaaacgggcactattacacatggagtgcctagagtcatgagggttctgttactgggtgatgtggccactctcccactgcgaaaggtgctggcggtggtcggtactgcggaagcatcctcggagcacccgctgggcgtggcagtgaccaaatattgcaaggaggagctcggaaccgagactcttggatactgcacagacttccaagccgtacctggctgtgggatcggatgcaaagtatctaatgtcgaggggatcttggctcactccgagcgccccctgtcagcacccgcctcccacctcaacgaagcaggctctcttcctgccgaaaaggatgctgtgcctcagaccttttcagttcttattggcaatcgcgaatggctgcgccgcaacgggctgactatatccagcgatgtgtctgacgctatgaccgatcacgaaatgaagggacagacagcgattctggtggcgatcgatggtgtcctgtgcggcatgatagccattgcggatgccgtgaaacaagaagcagctctcgccgttcacactttacagagtatgggtgtcgacgtcgtgctgatcacaggggataacagaaagactgctagagcaatagctactcaagtagggattaataaagttttcgcagaggtgctcccgagtcataaggtggccaaagttcaggagttacagaataagggcaagaaggtcgcaatggtgggcgacggcgtgaacgactcacctgcccttgctcaagccgacatgggagtggccatcggcaccggcaccgacgttgcaatagaggccgctgatgtggtgctgataagaaatgacctgttggacgtggtcgcaagcatccacctctctaaaagaaccgttcggcggatccgcattaacctggtgttggccctcatatacaatctggtgggaatccctatcgccgcaggcgtctttatgcccattggaatcgtgctgcagccttggatggggtcagctgccatggcggctagctctgtctccgtggtactgagtagcctgcaacttaaatgttacaaaaagccggatcttgagcgttacgaggcccaggcacatgggcacatgaagccactgacggcatcccaggtgtccgttcatatcggaatggacgatagatggcgtgatagccctagggccacgccttgggaccaggtcagttatgtgagccaagtgtcactctcgagcctgaccagtgataaaccttcccgtcattctgccgccgccgacgatgatggcgacaaatggagcctccttctgaatggcagagatgaggaacaatatatctag

SEQ ID NO: 280073 - DNA, 4308 bp, Artificial Sequence
  derived and/or modified sequence
cgctctcctccaccgaccaggtgaccttttgctctgagccagatcagagaagaattcggtgtccgtgcgggacgatgcctgagcaggagagacagatcacagccagagaaggggccagtcggaaaatcttatctaagctttctttgcctacccgtgcctgggaaccagcaatgaagaagagttttgcttttgacaatgttggctatgaaggtggtctggatggcctgggcccttcttctcaggtggccaccagcacagtcaggatcttgggcatgacttgccagtcatgtgtgaagtccattgaggacaggatttccaatttgaaaggcatcatcagcatgaaggtttccctggaacaaggcagtgccactgtgaaatatgtgccatcggttgtgtgcctgcaacaggtttgccatcaaattggggacatgggcttcgaggccagcattgcagaaggaaaggcagcctcctggccctcaaggtccttgcctgcccaggaggctgtggtcaagctccgggtggagggcatgacctgccagtcctgtgtcagctccattgaaggcaaggtccggaaactgcaaggagtagtgagagtcaaagtctcactcagcaaccaagaggccgtcatcacttatcagccttatctcattcagcccgaagacctcagggaccatgtaaatgacatgggatttgaagctgccatcaagagcaaagtggctcccttaagcctgggaccaattgatattgagcggttacaaagcactaacccaaagagacctttatcttctgctaaccagaattttaataattctgagaccttggggcaccaaggaagccatgtggtcaccctccaactgagaatagatggaatgcattgtaagtcttgcgtcttgaatattgaagaaaatattggccagctcctaggggttcaaagtattcaagtgtccttggagaacaaaactgcccaagtaaagtatgacccttcttgtaccagcccagtggctctgcagagggctatcgaggcacttccacctgggaattttaaagtttctcttcctgatggagccgaagggagtgggacagatcacaggtcttccagttctcattcccctggctccccaccgagaaaccaggtccagggcacatgcagtaccactctgattgccattgccggcatgacctgtgcatcctgtgtccattccattgaaggcatgatctcccaactggaaggggtgcagcaaatatcggtgtctttggccgaagggactgcaacagttctttataatccctctgtaattagcccagaagaactcagagctgctatagaagacatgggatttgaggcttcagtcgtttctgaaagctgttctactaaccctcttggaaaccacagtgctgggaattccatggtgcaaactacagatggtacacctacatctgtgcaggaagtggctccccacactgggaggctccctgcaaaccatgccccggacatcttggcaaagtccccacaatcaaccagagcagtggcaccgcagaagtgcttcttacagatcaaaggcatgacctgtgcatcctgtgtgtctaacatagaaaggaatctgcagaaagaagctggtgttctctccgtgttggttgccttgatggcaggaaaggcagagatcaagtatgacccagaggtcatccagcccctcgagatagctcagttcatccaggacctgggttttgaggcagcagtcatggaggactacgcaggctccgatggcaacattgagctgacaatcacagggatgacctgcgcgtcctgtgtccacaacatagagtccaaactcacgaggacaaatggcatcacttatgcctccgttgcccttgccaccagcaaagcccttgttaagtttgacccggaaattatcggtccacgggatattatcaaaattattgaggaaattggctttcatgcttccctggcccagagaaaccccaacgctcatcacttggaccacaagatggaaataaagcagtggaagaagtctttcctgtgcagcctggtgtttggcatccctgtcatggccttaatgatctatatgctgatacccagcaacgagccccaccagtccatggtcctggaccacaacatcattccaggactgtccattctaaatctcatcttctttatcttgtgtacctttgtccagagcaaaacctcagaagccctggctaaactcatgtctctccaagccacagaagccaccgttgtgacccttggtgaggacaatttaatcatcagggaggagcaagtccccatggagctggtgcagcggggcgatatcgtcaaggtggtccctgggggaaagtttccagtggatgggaaagtcctggaaggcaataccatggctgatgagtccctcatcacaggagaagccatgccagtcactaagaaacccggaagcactgtaattgcggggtctataaatgcacatggctctgtgctcattaaagctacccacgtgggcaatgacaccactttggctcagattgtgaaactggtggaagaggctcagatgtcaaaggcacccattcagcagctggctgaccggtttagtggatattttgtcccatttatcatcatcatgtcaactttgacgttggtggtatggattgtaatcggttttatcgattttggtgttgttcagagatactttcctaaccccaacaagcacatctcccagacagaggtgatcatccggtttgctttccagacgtccatcacggtgctgtgcattgcctgcccctgctccctggggctggccacgcccacggctgtcatggtgggcaccggggtggccgcgcagaacggcatcctcatcaagggaggcaagcccctggagatggcgcacaagataaagactgtgatgtttgacaagactggcaccattacccatggcgtccccagggtcatgcgggtgctcctgctgggggatgtggccacactgcccctcaggaaggttctggctgtggtggggactgcggaggccagcagtgaacaccccttgggcgtggcagtcaccaaatactgtaaagaggaacttggaacagagaccttgggatactgcacggacttccaggcagtgccaggctgtggaattgggtgcaaagtcagcaacgtggaaggcatcctggcccacagtgagcgccctttgagtgcaccggccagtcacctgaatgaggctggcagccttcccgcagaaaaagatgcagtcccccagaccttctctgtgctgattggaaaccgtgagtggctgaggcgcaacggtttaaccatttctagcgatgtcagtgacgctatgacagaccacgagatgaaaggacagacagccatcctggtggctattgacggtgtgctctgtgggatgatcgcaatcgcagacgctgtcaagcaggaggctgccctggctgtgcacacgctgcagagcatgggtgtggacgtggttctgatcacgggggacaaccggaagacagccagagctattgccacccaggttggcatcaacaaagtctttgcagaggtgctgccttcgcacaaggtggccaaggtccaggagctccagaataaagggaagaaagtcgccatggtgggggatggggtcaatgactccccggccttggcccaggcagacatgggtgtggccattggcaccggcacggatgtggccatcgaggcagccgacgtcgtccttatcagaaatgatttgctggatgtggtggctagcattcacctttccaagaggactgtccgaaggatacgcatcaacctggtcctggcactgatttataacctggttgggatacccattgcagcaggtgtcttcatgcccatcggcattgtgctgcagccctggatgggctcagcggccatggcagcctcctctgtgtctgtggtgctctcatccctgcagctcaagtgctataagaagcctgacctggagaggtatgaggcacaggcgcatggccacatgaagcccctgacggcatcccaggtcagtgtgcacataggcatggatgacaggtggcgggactcccccagggccacaccatgggaccaggtcagctatgtcagccaggtgtcgctgtcctccctgacgtccgacaagccatctcggcacagcgctgcagcagacgatgatggggacaagtggtctctgctcctgaatggcagggatgaggagcagtacatctgatgacttcaggcaggcgggccggggcagggacttgcctccactcaccacaagctgagcaggacagccagca

SEQ ID NO: 280074 - DNA, 4164 bp, Artificial Sequence
  derived and/or modified sequence
atgcctgagcaggagcggcagatcacagcccgggagggcgccagcaggaagatcctgagcaagctgagcctgcccacccgggcctgggagcccgccatgaagaagagctttgcctttgacaacgtgggctatgagggcggcctggatggcctgggccccagcagccaggtggccaccagcacagtgcgcatcctgggcatgacctgccagagctgtgtgaagagcattgaagatcgcatcagcaacctgaagggcatcatctccatgaaggtgtccctggagcagggcagcgccaccgtgaagtatgtgcccagcgtggtgtgcctgcagcaggtgtgccaccagatcggggacatgggctttgaggccagcattgctgagggcaaggccgcctcctggcccagccgcagcctgcctgcccaggaggccgtggtgaagctgcgggtggagggcatgacctgccagagctgtgtgagcagcattgagggcaaggtgaggaagctgcagggcgtggtgcgggtgaaggtgtccctgagcaaccaggaggccgtcatcacctaccagccctacctgatccagcctgaggacctgcgggaccacgtgaatgacatgggctttgaggccgccatcaagagcaaggtggcccccctgagcctgggccccatcgacatcgagcggctgcagagcaccaaccccaagaggcccctgagcagcgccaaccagaacttcaacaacagcgagaccctgggccaccagggcagccacgtggtgaccctgcagctgagaattgatggcatgcactgcaagagctgtgtgctgaacattgaagaaaatattggccagctgctgggcgtgcagagcatccaggtgtccctggagaacaagacagcccaggtgaagtatgaccccagctgcaccagccctgtggccctgcagagggccatcgaggccctgcccccaggcaacttcaaggtgtccctgcctgatggagctgagggcagcggcacagaccacaggagcagcagcagccacagccctggcagccccccaagaaaccaggtgcagggcacctgcagcaccaccctgattgccatcgccggcatgacctgtgccagctgtgtgcacagcattgagggcatgatcagccagctggagggcgtgcagcagatctctgtgtccctggccgagggcacagccaccgtgctgtacaaccccagcgtcatcagccctgaggagctgcgggccgccatcgaggacatgggctttgaggcctctgtggtgtctgagagctgcagcaccaaccccctgggcaaccacagcgctggcaacagcatggtgcagaccacagatggcacccccacctctgtgcaggaggtggccccccacacaggccgcctgcctgccaaccacgccccagacatcctggccaagagcccccagagcaccagggctgtggccccccagaagtgcttcctgcagatcaagggcatgacctgtgccagctgtgtgagcaacatcgagaggaacctgcagaaggaggccggcgtgctgtctgtgctggtggccctgatggccggcaaggccgagatcaagtatgaccctgaggtgatccagcccctggagatcgcccagttcatccaggacctgggctttgaagctgctgtgatggaggactatgccggcagtgatggcaacatcgagctgaccatcaccggcatgacctgtgccagctgtgtgcacaacatcgagagcaagctgaccaggaccaacggcatcacctacgcctctgtggccctggccaccagcaaggccctggtgaagtttgatcctgagatcatcggcccccgggacatcatcaagatcatcgaggagatcggcttccacgccagcctggcccagaggaaccccaatgcccaccacctggaccacaagatggagatcaagcagtggaagaagagcttcctgtgcagcctggtgtttggcatccctgtgatggccctgatgatctacatgctgatccccagcaatgagccccaccagagcatggtgctggaccacaacatcatccctggcctgagcatcctgaacctgatcttcttcatcctgtgcacctttgtgcagagcaagaccagcgaggccctggccaagctgatgagcctgcaggccacagaggccaccgtggtgaccctgggggaggacaacctgatcatccgggaggagcaggtgcccatggagctggtgcagagaggagacatcgtgaaggtggtgcctgggggcaagtttcctgtggatggcaaggtgctggagggcaacaccatggctgatgagagcctcatcaccggggaggccatgcctgtgaccaagaagccaggcagcacagtgattgctggcagcatcaatgcccacggctctgtgctgatcaaggccacccacgtgggcaatgacaccaccctggcccagatcgtgaagctggtggaggaggcccagatgagcaaggcccccatccagcagctggccgaccgcttcagcggctactttgtgcccttcatcatcatcatgagcaccctgaccctggtggtgtggatcgtcatcggcttcatcgactttggagtggtgcagcgctacttccccaaccccaacaagcacatcagccagacagaggtgatcatccgctttgccttccagaccagcatcaccgtgctgtgcatcgcctgcccctgcagcctgggcctggccacccccacagctgtgatggtgggcactggagtggccgcccagaatggcatcctgatcaagggcggcaagcccctggagatggcccacaagatcaagacagtgatgtttgacaagacaggcaccatcacccacggcgtgccccgggtgatgagggtgctgctgctgggagatgtggccaccctgcccctgaggaaggtgctggccgtggtgggcacagctgaggccagcagcgagcaccccctgggcgtggccgtgaccaagtactgcaaggaggagctgggcacagagaccctgggctactgcacagacttccaggccgtgcccggctgcggcatcggctgcaaggtgtccaatgtggagggcatcctggcccacagcgagcggcccctgagcgccccagccagccacctgaatgaggccggcagcctgcctgctgagaaggatgctgtgccccagaccttctctgtgctgattggcaaccgggagtggctgcggagaaatggcctgaccatcagcagtgatgtgtctgatgccatgacagaccacgagatgaagggccagacagccatcctggtggccattgatggagtgctgtgtggcatgattgccatcgcagatgctgtgaagcaggaggccgccctggccgtgcacaccctgcagagcatgggcgtggatgtggtgctgatcaccggggacaacaggaagacagcccgggccatcgccacccaggtgggcatcaacaaggtgtttgctgaggtgctgcccagccacaaggtggccaaggtgcaggagctgcagaacaagggcaagaaggtggccatggtgggagatggagtgaatgacagccctgccctggcccaggccgacatgggcgtggccatcggcaccggcacagatgtggccatcgaggccgcagatgtggtgctgatcagaaatgacctgctggatgtggtggccagcatccacctgagcaagaggacagtgcggcgcatccgcatcaacctggtgctggccctgatctacaacctggtgggcatccccatcgccgccggggtcttcatgcccatcggcatcgtgctgcagccctggatgggcagcgctgccatggccgccagctctgtgtctgtggtgctgagcagcctgcagctgaagtgctacaagaagccagacctggagagatatgaggcccaggcccacggccacatgaagcccctgacagccagccaggtgtctgtgcacatcggcatggatgaccgctggagggacagcccccgggccaccccctgggaccaggtgtcctatgtgtcccaggtgtccctgagcagcctgaccagtgacaagcccagccgccacagcgctgctgctgatgatgatggagacaagtggagcctgctgctgaatggaagagatgaggagcagtacatctag

SEQ ID NO: 280075 - DNA, 4164 bp, Artificial Sequence
  derived and/or modified sequence
atgcccgagcaggagcggcagatcaccgcccgggagggcgccagcaggaaaattctctcgaaactttccctgccgactcgggcttgggaacccgccatgaagaagtctttcgcctttgataacgttggttatgaaggaggactggatggcctgggcccaagcagccaggtggcaaccagcacagtcaggattttgggcatgacttgccaatcatgcgtgaagagcattgaggatcggatttcaaatctgaagggcatcattagcatgaaggtaagcctggagcaaggctcggccaccgtgaaatacgtgccctcggtagtgtgtctgcagcaggtgtgtcatcagattggcgacatggggttcgaggcttccattgccgagggcaaggccgctagttggccctctaggtcacttccagcccaagaggccgtagtgaagctgcgcgttgaagggatgacttgccaatcttgcgtgtccagcatcgagggaaaggtcaggaaactccagggcgtggtgcgcgtgaaagtttcgctgagcaatcaagaagctgtaatcacctaccagccgtacctgatccagccagaggacctgcgtgatcacgtcaacgatatgggctttgaggccgctatcaaaagcaaggtggctcctctttcactaggccctattgacatcgaaagactgcagagcaccaatcctaaaaggccattgagcagtgcgaatcaaaattttaacaactctgagacgcttgggcaccagggatcacacgtagtgacgctgcagcttcgaatagacgggatgcattgcaaatcttgtgtcctgaacattgaagagaacatcggccaactgcttggggtgcagtcgatccaggtcagccttgaaaataaaaccgcccaagtgaaatacgaccccagctgcacttcacccgtggccttacagagagctatcgaagctctgccgcctggtaacttcaaggtgagcctacccgacggagctgagggatcaggcacagatcaccgtagcagcagctctcatagtcctggtagcccaccccgaaaccaggttcaaggcacctgctcaaccacactgattgctattgcaggcatgacctgtgctagctgcgtccacagcatagaggggatgatcagccagttagaaggtgtccagcagataagtgtttctctcgccgaaggaaccgccaccgttctctacaacccaagcgtaatttcgcccgaagagctgcgggcggcaatcgaagacatggggtttgaagcctccgttgttagtgagtcttgttctaccaatccattaggtaaccacagcgcaggcaactcaatggttcaaaccaccgacgggacccctacttccgtacaggaggtcgccccccacaccggccgtctgccagctaatcatgcgcccgatatcctggcaaaatcgccccagtctacacgtgcggtagcaccacagaagtgcttcttgcagatcaaagggatgacctgtgcttcttgtgtcagtaacatcgaacgaaacctgcaaaaagaggcaggcgtgctgtctgtactggtggccctgatggccggcaaagccgagatcaaatacgaccccgaggtcatccagccgctagagattgcccagttcatccaggacctgggttttgaggctgccgtcatggaggactatgccggttctgacggtaacatcgaactgacaatcacggggatgacctgtgcctcatgtgtgcacaatattgaatccaagctcacgcggactaacggcataacttatgcttctgttgccttggcgactagcaaggccttggtgaagttcgaccctgagattatcggtcccagggacatcatcaagatcattgaagaaatcggattccacgctagtctggctcagcgcaaccccaatgcccaccaccttgaccataaaatggagatcaagcagtggaaaaaatctttcctttgcagccttgtcttcggaatacccgttatggcccttatgatttacatgctcattccgagcaatgaaccccaccaatcaatggtgttagaccacaatatcatccccggactcagtatccttaatctgatcttctttatcctctgtacatttgtgcagagcaaaactagtgaggccctcgcaaaactgatgtccctacaggctaccgaggcaaccgttgtcactctgggcgaggataatctcatcatccgcgaagagcaggtgcctatggagctcgttcaaagaggcgacatcgtgaaggtcgttccagggggcaagttcccagtcgacggcaaggtgcttgaggggaacacaatggctgatgaatcccttatcacaggtgaggctatgccagtaacaaaaaagcccggttctaccgttattgcaggatccatcaacgcccacgggtctgttctcatcaaagccactcacgtggggaacgataccaccctggcgcagatcgtgaaattagtcgaggaagctcagatgtcaaaagctccaattcagcagttagctgaccgcttctccggctacttcgttccatttattattattatgtccacactaacattagtcgtttggatagtaatcgggtttatagatttcggggtcgtgcagaggtatttccccaaccctaacaaacatataagccaaactgaggtaatcatccggtttgccttccagacaagcatcactgtcctctgcatagcatgcccatgttccctgggattggctacccccactgcagtcatggttggcaccggcgtggcggcccagaacggcatacttatcaaagggggaaaaccactggagatggctcataagatcaagactgtgatgttcgataaaactgggactattacccacggggtgcccagagttatgcgagtgctgctgttaggtgacgtggccaccctgcctctgcgtaaggtgctggccgtcgttggaacagccgaagcctctagcgaacacccgctgggcgttgccgtaacgaagtattgtaaggaagaactcggaaccgagacgctgggctattgtaccgactttcaagcagtgcccggctgcggaatcggctgtaaagtgtccaatgttgaaggcattctggctcacagtgaaagacccctcagtgcccctgcatcacatttaaacgaggcaggaagcctgcctgccgagaaggacgctgtgccgcagacatttagcgtcctgattggcaatcgagaatggctgagaagaaatggccttacgatctctagtgatgttagcgacgctatgaccgatcacgaaatgaagggacagacagccattctcgttgctattgacggggtgctctgcggcatgattgcaatcgcagacgctgttaaacaggaggctgcactcgcagtgcacacattgcagtccatgggagttgacgtggtgctaatcactggcgataaccggaagaccgctagggcgattgccacgcaggtgggaattaataaggtgtttgccgaagttttaccctcccacaaagtagccaaagtacaggagctgcagaataaaggcaagaaagtcgcgatggttggggatggtgtaaatgatagtcctgccctcgcacaagcggatatgggagttgcaatcgggacggggactgacgtggccatcgaagccgctgacgtggttctcattaggaacgatctgctcgatgtggtcgcctccattcacctatctaagcgcaccgtccgaaggatcaggatcaacctggttctggctctcatctacaacttagtcggcatcccaattgccgctggcgtgttcatgccaatcggtattgtactgcaaccttggatgggctccgccgccatggccgcttcatcagtgtctgtggttctaagttctctgcagttgaagtgttataagaagcccgacctcgaaaggtatgaagcccaagcgcatgggcatatgaaacctctgactgctagccaggtttctgtccatatcggcatggatgacaggtggcgcgattcaccaagagccacgccatgggaccaagtgtcctacgtgtctcaggtgtccctcagcagtcttacgtccgacaaaccttcaagacacagcgcagctgcagacgatgacggcgacaagtggtccctcctgcttaatggaagagacgaggagcaatatatttag

SEQ ID NO: 280076 - DNA, 4164 bp, Artificial Sequence
  derived and/or modified sequence
atgcccgaacaagagagacagataacagcaagggaaggcgcatccagaaagatcctgtcaaaactgagcttgcccactcgcgcatgggaaccggcaatgaaaaaatcttttgcattcgataatgttggctatgagggtggactcgacgggctcggaccaagctcacaagtcgctaccagtacagtgcggatcctgggcatgacttgtcagtcctgtgtcaaaagcatagaggaccgcatcagcaacctgaaaggaatcatttccatgaaagtgtcacttgagcaggggtcagctacggtgaaatacgttccctctgtggtctgtcttcagcaagtctgccatcagatcggtgacatgggctttgaggcaagcatcgcggagggcaaagctgcctcttggcccagtcgctcactccccgcacaggaagccgtggtgaagttgagggtagagggcatgacctgccaaagctgtgtgtcttccatcgagggcaaagttcgcaaactgcagggggtggtaagagttaaagttagtctttccaaccaagaggctgtgattacttatcagccctacctgattcaaccggaggatttacgggaccatgttaatgacatgggctttgaggcagcaattaagtccaaggtagcaccactgagtcttggcccaatcgatattgagagactgcagagcacaaatcccaagcgacccctgagctctgccaatcaaaattttaataactctgaaacccttgggcatcaagggagtcatgtagttacattacaactgagaattgatggaatgcactgcaaatcctgtgtactcaatatcgaggaaaacattgggcagctactaggcgtgcagagcatccaggtcagtctggaaaacaagacggcccaggtaaagtacgatcccagttgtacgtccccagtcgccctccaaagagctattgaagccctgccacctggcaactttaaggtgtccttgccagacggggcagagggcagcgggacggaccataggtcctcatcaagtcactcccccggatcgccccctaggaatcaagtgcaggggacctgtagcacgacattaatcgcgatcgctgggatgacatgtgcttcatgtgtgcattcaatagaaggcatgatctctcaactcgagggcgtccaacagatcagtgtgagtcttgccgagggcacagccacagtcctctacaatccttccgtgatttcacctgaggaacttcgggcagctattgaggacatggggttcgaggctagcgtggtcagcgaaagctgttcgactaacccactggggaatcatagcgcagggaactctatggtccagaccacggacggtactcctacatcagtgcaagaagtggctccccatacagggagactgcctgctaaccacgctccagacatcctggccaaaagtcctcagtcaacccgggcagttgcccctcagaaatgctttctgcagatcaaggggatgacctgcgcgtcctgcgtgtctaacatcgagagaaatctgcagaaagaggcaggcgtcttatcggtcctcgtggccctcatggccggaaaggccgaaataaaatacgatcccgaggtgatacagcccttagagattgctcagtttatacaggacctgggattcgaagctgcggttatggaggattatgccggaagcgatgggaacattgagttaacgatcactggcatgacatgcgcctcgtgcgttcataacatagaatctaaattgacccgcactaatggcatcacgtacgcatccgtcgcgcttgctacatcaaaggcactggtaaagtttgaccctgaaatcatcggacctcgggacattatcaagattatcgaagagataggctttcatgcctcattggcccagcgtaaccccaacgcccatcacctggaccacaaaatggaaatcaaacaatggaaaaagtcattcctctgctcactagtcttcggtattcctgtgatggcgttaatgatttatatgctcatcccgtcaaacgagccgcaccagtcaatggtgttggatcataacatcatcccaggtctttctatccttaatcttatttttttcattctctgtaccttcgtacagagtaaaacttccgaggccctggctaagctcatgagcctccaggcaacagaggccacggtcgtgactttgggggaggacaatttaattatcagggaggagcaggtacccatggagctggtgcagcggggagacattgttaaagttgtgcctggtggcaagttccccgtcgatgggaaggtcctggagggcaacaccatggctgatgaatctctcatcacaggggaagccatgcctgtgactaagaagccgggatccaccgtgatcgctgggtctataaacgctcatggctcagtcctgatcaaagctacacatgtcggcaacgacaccacgcttgcccaaatcgtcaagctggtggaggaagcacagatgtctaaggcccctattcagcagctcgctgacaggttctcgggatactttgttccattcattatcatcatgtccacgctcacactggtggtatggatcgttataggctttatagactttggtgttgtccaacgctacttccctaaccccaacaaacatatttcacagacagaggtgatcatcaggttcgccttccaaacttctattacggtgctgtgtatcgcctgcccttgttcgctgggactggcgacacccaccgccgttatggttgggacaggtgtggccgcacaaaacggcatccttatcaagggtgggaaacctcttgagatggcccacaagataaagacggtgatgttcgataagactgggactattacccacggggtgccccgtgtgatgcgagtcctgctgctcggggatgtcgctacactgcctcttcgaaaggtcttggctgttgttgggactgccgaagcatctagcgaacacccactcggagtggcagttacgaagtactgtaaggaggagctggggactgaaactctgggatactgcaccgactttcaagctgtgcccggttgcggcatcggatgcaaggtctctaatgtggaaggcatcctggcccatagcgagcgtcccttgtccgctcctgccagtcacttgaacgaggccggatccctgccagcggaaaaggacgccgtgcctcaaacattcagtgttcttatcggtaatcgcgagtggctgcgcaggaacggccttactattagcagcgatgtttcagatgccatgactgatcatgagatgaagggccagacagccatcctcgtggccatcgacggtgtgctttgtggcatgattgcgattgccgacgctgtcaaacaggaggctgctttagctgtgcataccctgcagtcaatgggtgtggatgtggtcctgataactggggataatagaaaaacggccagggccatcgccacccaggtgggcattaataaggtcttcgcagaggttttgccaagccacaaggtggcgaaagtgcaggaactccaaaataagggtaaaaaggtggcgatggtcggcgacggagtaaacgactctccagcgctcgcgcaggccgacatgggagtcgccatcggtaccggtacagacgtcgccattgaggcagccgacgtggtgttgattagaaacgacctgctggatgtggtggcttccattcacctgagcaaacgaactgtcagaagaatccgcattaatcttgtgctagcattaatctacaatctggtcggcatcccgatagctgcaggcgtgttcatgccaatagggatcgtacttcagccttggatgggatctgcagcaatggcagcatcttctgtctccgtggtgctgtcttccttgcagctgaagtgttataagaaaccggacctggaacgctatgaggcacaggcacacgggcacatgaaaccacttaccgcgtctcaagtatccgtacatatcggcatggacgataggtggagagactcacctcgcgcaactccttgggatcaagtgtcgtacgttagtcaggtttctctgagtagcttaacaagcgacaagccgagccgccattctgctgctgcagatgatgatggagacaaatggtctctgctcctgaacggaagggatgaggagcagtatatttag

SEQ ID NO: 280077 - DNA, 4164 bp, Artificial Sequence
  derived and/or modified sequence
atgccggaacaggaaagacaaatcactgctagggaaggagccagtcggaagatcctctccaaactttcactacccaccagagcttgggagcccgcgatgaagaagtccttcgctttcgataatgtcgggtacgagggtggactggatgggcttggaccaagctcccaggtagccacgagcacagtgaggattcttggtatgacttgccagagctgcgtcaaatccatcgaggaccggattagcaacctgaagggcatcatttcaatgaaagtctccctggagcaaggtagcgccacagtgaagtatgtgccctccgtcgtatgccttcagcaggtttgtcatcagatcggagacatgggattcgaagcttcaattgctgaaggtaaggcagcctcctggccttcacggagcttacctgctcaagaggccgtagttaagcttcgcgttgagggcatgacctgccagtcgtgcgtaagtagcatcgaggggaaagtccggaagttgcaaggggttgtgcgagtgaaagttagtctctccaaccaagaggccgtgattacctaccagccttatctgattcagccagaggatttgcgcgaccacgtgaacgatatgggcttcgaagcagcaatcaaatcaaaggtggcgccactatctctgggacccatcgacatagaaaggcttcaatcaacaaacccaaagagacctttatcgagtgcaaatcagaattttaacaactccgagacactaggccaccaggggagccatgtggtgactctacaattgcggatcgacggcatgcactgcaaaagttgtgtgttgaatatcgaagagaacatcggccagctgcttggagttcagtctattcaagtgagcctcgaaaataaaacagcccaggtcaaatacgatccttcatgtacttcacccgtagctctccaaagagctattgaagcccttccacccggaaactttaaagtctcgctgcccgacggggccgaaggctcaggcacggatcacaggagttctagcagtcattcaccgggttctccgccgaggaatcaagtccagggaacctgttctacgaccttgattgcaatagctggaatgacgtgcgcatcttgcgtgcattccattgaaggtatgatttcacagctggaaggagtgcaacaaatatcggtgtctctcgccgaaggaaccgctactgtgttgtacaatcctagtgtcatcagccccgaggagcttcgggctgctatagaagatatgggcttcgaagcttcagttgtctccgagtcttgctcgactaacccccttggaaatcattccgccggtaactccatggtgcaaacaaccgacggcaccccaacatccgtacaggaggttgcaccgcatactggtaggcttccagcgaatcatgctcctgatattcttgccaagagcccacagtccaccagggccgtagcgccccagaagtgcttcctccagatcaaaggtatgacctgtgcaagctgcgtaagtaacattgaacgcaacctccagaaggaggcgggcgttctgtccgtgttggttgccctgatggctggcaaagcggaaatcaagtatgaccccgaggtcattcagcccctggagatcgcccagtttattcaagacctgggattcgaggctgccgtgatggaggactacgcagggtcagacggaaatatagagctgacgatcaccggcatgacctgtgcttcctgcgtgcataatattgagagtaagctcactagaaccaatgggatcacgtatgccagtgtcgctctagcaactagtaaggccctcgtcaagttcgaccctgagatcatcggacccagagatattatcaagataatcgaagaaatcgggtttcacgcctctttggcacagcgtaatcccaatgcacatcacctggaccataagatggaaataaagcagtggaagaagagttttctatgctcactcgtatttggcatccctgtcatggccctgatgatatatatgctgataccatctaacgagccccatcaaagtatggttcttgaccacaatatcataccagggctatctatactcaaccttattttcttcatactgtgcacatttgtgcagagcaagacgtcggaagcacttgcgaagttgatgagcctacaagcgacagaagcaaccgtggtgactttgggagaagataacttgatcatcagagaggagcaggtcccaatggaactagtgcagcggggagacatcgttaaggtagttccggggggtaaatttcctgtcgatggcaaagtgctcgagggaaacacgatggccgacgagtcattaataacaggcgaggccatgcccgtaacgaagaaaccggggagcactgtgatcgctggctcaattaatgcgcacgggtcagtactaattaaagctacccatgttggaaatgataccaccctcgcgcaaatagtgaaactagttgaggaagcacaaatgtccaaggctcctatccagcagctggccgacagattctctggatattttgttccatttatcataattatgtcaactcttactctcgtggtgtggatcgtgattggattcatcgactttggagtagttcaacgatactttccaaacccgaataaacatatatcacagaccgaggtgattatacgcttcgcgtttcagacatccattactgtgttgtgtatagcctgcccgtgcagtctgggactggccactcctaccgcagtcatggtcggtaccggcgttgcagcacaaaacggtatacttattaagggtggtaagcctcttgagatggcacacaagattaaaacggttatgttcgacaaaacaggaacaattacgcacggcgtgcctcgagttatgcgggtgttactgttgggagacgtggccacacttccacttcgaaaagtccttgctgtggtgggcacagcagaggcgtcatccgaacaccctttgggcgtcgctgtgacaaaatattgtaaggaggaactcggaaccgaaacccttggttactgcactgattttcaggccgtacccggctgcggaatcggttgtaaagtttcaaacgttgagggaatactagcccattccgaacgaccgcttagcgctcctgcgagtcacttgaatgaggctggttctctcccagccgagaaggacgctgtcccccagacatttagtgtattgataggcaaccgagaatggctgcgccgaaatggcctgactatatcttcggacgtttcggacgcgatgacggatcacgaaatgaaaggccagactgcaattcttgtggccattgatggcgtcctgtgtggcatgatcgccattgccgatgccgtcaagcaagaggccgccctagctgtgcacactctgcaaagcatgggcgtggacgtagtgttaataaccggcgacaaccggaagaccgctagagcgattgccacacaggtcggcatcaacaaggtttttgctgaggtgttgccctcccataaagttgccaaagtccaagagctgcagaacaaggggaaaaaggttgctatggtcggggacggggtgaatgactccccggccctggcacaggccgacatgggtgtggcgatcggaaccggaacagatgttgccatcgaagcagctgacgttgtcctcatacgcaatgaccttcttgatgtggttgcctccatacatctgtccaagaggacagtcaggagaattcgcattaatctggtgctggcgctgatctataacttggtgggtattccaatagcggccggtgtctttatgccaatcggaattgtgcttcaaccatggatggggtccgccgcaatggccgcatcttcagtatctgtggtcctctcctcactgcagttgaagtgttacaaaaagcccgacctcgaaagatatgaggctcaggcccatggccatatgaaacctctcactgccagccaggttagcgttcatattgggatggacgacagatggcgggacagcccccgtgctaccccttgggatcaggtgagctacgtctcccaggtcagcctgtcatcactgacgtctgataagccctctcgacactccgccgctgccgatgacgatggtgacaaatggtctctacttctgaatgggagagatgaggagcagtacatttag

SEQ ID NO: 280078 - DNA, 4164 bp, Artificial Sequence
  derived and/or modified sequence
atgcctgaacaagaacggcaaatcaccgcgcgcgaaggcgcaagccgtaaaattctgtcaaaactgtcactcccaacaagagcctgggaaccggccatgaaaaagtcttttgcgttcgataacgttggatatgagggggggctggacgggctcggcccttcaagccaggttgcaactagcacagtccgcattctgggcatgacatgtcaatcctgcgtaaaatcgatagaggatcgaattagcaatctcaaaggtatcatatctatgaaggtttcactggagcaaggatccgccaccgttaaatatgttccatcggtggtatgtctgcaacaggtttgtcaccagattggggacatggggtttgaagcaagcattgctgaaggcaaggctgcgtcctggccaagccgatccttgccggcccaagaagccgtcgtgaaactccgagtagaggggatgacttgtcagtcctgtgtcagttctattgaaggtaaggtccggaaattgcagggtgtcgttcgcgtcaaagtttccctgagtaaccaagaagctgtgatcacttaccaaccttacctgatacagcccgaggacctgcgggaccatgtcaacgacatgggctttgaggctgccatcaaaagcaaagtagccccactgtcactaggtcccatcgatattgagcgtttgcaatcgactaaccctaagcgacctcttagctcagccaatcaaaatttcaataactcagaaacacttgggcaccagggatcccatgtggttacacttcagttacgcatcgatggcatgcattgtaaaagctgtgtcttaaacatagaggaaaatatcgggcagttgttaggcgtgcagagcattcaagttagccttgaaaacaagacagctcaggtcaaatatgacccttcctgtacttctcctgtggcgttacagagagccatagaagcacttccacccgggaatttcaaggtgagcctgccagacggtgctgaaggatccggcacagatcaccgatcctcgtcatcacactcccctggcagtcccccacggaaccaagtgcaagggacgtgctctacaacactcatcgcgatcgccggcatgacttgtgcttcatgtgtgcacagcatcgaagggatgatttcacaattagagggtgtccaacaaatttccgtatcactagccgaaggaacagccactgtgctttacaatccaagcgtcatatcccctgaggaactcagagctgctatcgaagacatgggttttgaggcgtcggtggtttccgaatcatgtagtactaatcccctggggaatcattcagctggaaactcgatggtgcagaccaccgacggtacccctacatctgtccaggaggttgccccccacaccggacggctccctgccaaccatgcccccgatatcctcgctaaatcccctcaatcaacacgtgctgtagccccacagaaatgtttcttgcagattaagggcatgacctgtgccagctgcgtatctaacattgaacggaatctacagaaagaagcaggagtactcagcgttttggtggcactcatggctggaaaggcagagatcaagtacgacccagaagtgattcaacctctagagatcgcccagtttatacaggatctgggatttgaagcagccgtcatggaagactatgccggcagtgatggcaacatcgagctaacaattactggcatgacttgtgcctcttgtgtgcacaatatcgagtcaaagcttacacgaacaaatggcatcacttacgcgtcggtcgccctcgccacatcaaaggctttagtaaaattcgatcccgaaattatcggccctcgcgatataattaaaatcatcgaggaaatcggcttccacgcttccctggcacaacggaacccaaatgctcatcacctcgaccacaaaatggaaataaagcaatggaagaagtcgttcctgtgttccttggtgttcggtatccccgtaatggcgctaatgatctacatgctaattccctccaacgaaccacaccagtcaatggtcctcgaccataatatcatcccagggctgagcatcttaaatctcatctttttcatcttatgtaccttcgtgcagagcaagacatccgaggccctcgctaagctgatgtcacttcaagctacagaagccaccgtcgttacactcggagaagataatctcattataagggaggagcaggtccctatggaactggtgcagagaggagatattgttaaagtggtccccggagggaaattccccgtcgacgggaaggtccttgaaggcaataccatggccgatgaaagcctcattaccggcgaagccatgcccgtcaccaaaaaacccggttcaacagtgatagcaggttcgatcaatgcccacggatcagtgctgatcaaagcgacccacgtggggaacgacacaacacttgctcaaatcgtcaaactcgttgaggaagcccagatgagtaaggctcccatccagcagctcgccgatcgctttagcggttactttgtcccctttatcatcattatgtctaccctgaccctcgtcgtgtggatcgttatcggatttatcgattttggcgtagtacagagatattttcccaaccccaataaacacatatcgcagacagaagtaattattcgctttgccttccagacctcaattacagtactttgtatcgcctgtccttgttcacttggtctagcaacccccacggccgtgatggtcggaacaggggtggcagcccaaaatggcatcctgatcaaaggagggaaacctttagaaatggcccacaagataaaaacggtgatgtttgacaagaccggtacaatcacccacggcgttccacgcgtaatgagagtgctcctccttggcgatgtagcaaccctccccctccgtaaagttctcgccgtcgtcgggaccgcagaggcaagctctgagcacccactaggggtagcagtcacgaaatattgtaaagaagaattgggtactgaaactttaggctactgtacagacttccaggcagtgcccggttgtggtattgggtgtaaagtgtcaaacgtggagggcattctggcacacagcgaacggcccctgagcgcacctgcctcccatctgaacgaggctggctcactgcccgccgaaaaggacgctgtccctcagaccttttccgtactaattggcaatagagagtggcttcgacgcaacggtcttactatctcgtccgacgtgtcagacgcaatgacagatcatgaaatgaagggccagacagccatcttagtggcgattgatggcgttctatgcgggatgatcgctatcgcagacgctgttaaacaggaagccgctctagccgtacacacactacaaagcatgggagttgatgtggttctaatcactggagataaccgcaaaacagccagagcaatagcgacgcaggtgggcattaacaaggtgttcgcagaggttctccccagccacaaggtcgccaaggtccaagaactgcagaacaaaggaaagaaagtcgcaatggtgggagatggcgtaaacgactccccggcacttgcacaggccgatatgggggtagcaatcggtacaggcactgacgtggccatcgaagccgccgatgtggttctcatacgaaacgacctattagacgttgttgcctcaatacatctctcgaaacgcacagtccgacgaatcaggattaacctagtgctggccctaatttacaacctcgtgggcataccaatcgctgctggagtgttcatgccaatcggtatcgtgctgcaaccttggatgggatccgccgctatggccgccagtagcgtgagcgtagtgttgtcatcattacagctgaagtgctataagaagcccgatctggagagatatgaggcccaggcacatggacatatgaaacccctgacagcatctcaggtctcagtgcacataggtatggacgatcggtggagagacagtccacgcgccaccccttgggaccaggttagttatgttagtcaggtgtccctatcctctctaacctccgacaaaccctcccgacattcagccgccgcagatgacgatggggacaagtggagtctgcttctgaacgggcgcgatgaagagcagtatatatag

SEQ ID NO: 280079 - RNA, 4164 nt, Artificial Sequence
  derived and/or modified sequence
augccggaacaggaaagacaaaucacugcuagggaaggagccagucggaagauccucuccaaacuuucacuacccaccagagcuugggagcccgcgaugaagaaguccuucgcuuucgauaaugucggguacgaggguggacuggaugggcuuggaccaagcucccagguagccacgagcacagugaggauucuugguaugacuugccagagcugcgucaaauccaucgaggaccggauuagcaaccugaagggcaucauuucaaugaaagucucccuggagcaagguagcgccacagugaaguaugugcccuccgucguaugccuucagcagguuugucaucagaucggagacaugggauucgaagcuucaauugcugaagguaaggcagccuccuggccuucacggagcuuaccugcucaagaggccguaguuaagcuucgcguugagggcaugaccugccagucgugcguaaguagcaucgaggggaaaguccggaaguugcaagggguugugcgagugaaaguuagucucuccaaccaagaggccgugauuaccuaccagccuuaucugauucagccagaggauuugcgcgaccacgugaacgauaugggcuucgaagcagcaaucaaaucaaagguggcgccacuaucucugggacccaucgacauagaaaggcuucaaucaacaaacccaaagagaccuuuaucgagugcaaaucagaauuuuaacaacuccgagacacuaggccaccaggggagccauguggugacucuacaauugcggaucgacggcaugcacugcaaaaguuguguguugaauaucgaagagaacaucggccagcugcuuggaguucagucuauucaagugagccucgaaaauaaaacagcccaggucaaauacgauccuucauguacuucacccguagcucuccaaagagcuauugaagcccuuccacccggaaacuuuaaagucucgcugcccgacggggccgaaggcucaggcacggaucacaggaguucuagcagucauucaccggguucuccgccgaggaaucaaguccagggaaccuguucuacgaccuugauugcaauagcuggaaugacgugcgcaucuugcgugcauuccauugaagguaugauuucacagcuggaaggagugcaacaaauaucggugucucucgccgaaggaaccgcuacuguguuguacaauccuagugucaucagccccgaggagcuucgggcugcuauagaagauaugggcuucgaagcuucaguugucuccgagucuugcucgacuaacccccuuggaaaucauuccgccgguaacuccauggugcaaacaaccgacggcaccccaacauccguacaggagguugcaccgcauacugguaggcuuccagcgaaucaugcuccugauauucuugccaagagcccacaguccaccagggccguagcgccccagaagugcuuccuccagaucaaagguaugaccugugcaagcugcguaaguaacauugaacgcaaccuccagaaggaggcgggcguucuguccguguugguugcccugauggcuggcaaagcggaaaucaaguaugaccccgaggucauucagccccuggagaucgcccaguuuauucaagaccugggauucgaggcugccgugauggaggacuacgcagggucagacggaaauauagagcugacgaucaccggcaugaccugugcuuccugcgugcauaauauugagaguaagcucacuagaaccaaugggaucacguaugccagugucgcucuagcaacuaguaaggcccucgucaaguucgacccugagaucaucggacccagagauauuaucaagauaaucgaagaaaucggguuucacgccucuuuggcacagcguaaucccaaugcacaucaccuggaccauaagauggaaauaaagcaguggaagaagaguuuucuaugcucacucguauuuggcaucccugucauggcccugaugauauauaugcugauaccaucuaacgagccccaucaaaguaugguucuugaccacaauaucauaccagggcuaucuauacucaaccuuauuuucuucauacugugcacauuugugcagagcaagacgucggaagcacuugcgaaguugaugagccuacaagcgacagaagcaaccguggugacuuugggagaagauaacuugaucaucagagaggagcaggucccaauggaacuagugcagcggggagacaucguuaagguaguuccgggggguaaauuuccugucgauggcaaagugcucgagggaaacacgauggccgacgagucauuaauaacaggcgaggccaugcccguaacgaagaaaccggggagcacugugaucgcuggcucaauuaaugcgcacgggucaguacuaauuaaagcuacccauguuggaaaugauaccacccucgcgcaaauagugaaacuaguugaggaagcacaaauguccaaggcuccuauccagcagcuggccgacagauucucuggauauuuuguuccauuuaucauaauuaugucaacucuuacucucgugguguggaucgugauuggauucaucgacuuuggaguaguucaacgauacuuuccaaacccgaauaaacauauaucacagaccgaggugauuauacgcuucgcguuucagacauccauuacuguguuguguauagccugcccgugcagucugggacuggccacuccuaccgcagucauggucgguaccggcguugcagcacaaaacgguauacuuauuaagggugguaagccucuugagauggcacacaagauuaaaacgguuauguucgacaaaacaggaacaauuacgcacggcgugccucgaguuaugcggguguuacuguugggagacguggccacacuuccacuucgaaaaguccuugcuguggugggcacagcagaggcgucauccgaacacccuuugggcgucgcugugacaaaauauuguaaggaggaacucggaaccgaaacccuugguuacugcacugauuuucaggccguacccggcugcggaaucgguuguaaaguuucaaacguugagggaauacuagcccauuccgaacgaccgcuuagcgcuccugcgagucacuugaaugaggcugguucucucccagccgagaaggacgcugucccccagacauuuaguguauugauaggcaaccgagaauggcugcgccgaaauggccugacuauaucuucggacguuucggacgcgaugacggaucacgaaaugaaaggccagacugcaauucuuguggccauugauggcguccuguguggcaugaucgccauugccgaugccgucaagcaagaggccgcccuagcugugcacacucugcaaagcaugggcguggacguaguguuaauaaccggcgacaaccggaagaccgcuagagcgauugccacacaggucggcaucaacaagguuuuugcugagguguugcccucccauaaaguugccaaaguccaagagcugcagaacaaggggaaaaagguugcuauggucggggacggggugaaugacuccccggcccuggcacaggccgacauggguguggcgaucggaaccggaacagauguugccaucgaagcagcugacguuguccucauacgcaaugaccuucuugaugugguugccuccauacaucuguccaagaggacagucaggagaauucgcauuaaucuggugcuggcgcugaucuauaacuugguggguauuccaauagcggccggugucuuuaugccaaucggaauugugcuucaaccauggaugggguccgccgcaauggccgcaucuucaguaucugugguccucuccucacugcaguugaaguguuacaaaaagcccgaccucgaaagauaugaggcucaggcccauggccauaugaaaccucucacugccagccagguuagcguucauauugggauggacgacagauggcgggacagcccccgugcuaccccuugggaucaggugagcuacgucucccaggucagccugucaucacugacgucugauaagcccucucgacacuccgccgcugccgaugacgauggugacaaauggucucuacuucugaaugggagagaugaggagcaguacauuuag

SEQ ID NO: 280080 - RNA, 4164 nt, Artificial Sequence
  derived and/or modified sequence
augccugaacaagaacggcaaaucaccgcgcgcgaaggcgcaagccguaaaauucugucaaaacugucacucccaacaagagccugggaaccggccaugaaaaagucuuuugcguucgauaacguuggauaugagggggggcuggacgggcucggcccuucaagccagguugcaacuagcacaguccgcauucugggcaugacaugucaauccugcguaaaaucgauagaggaucgaauuagcaaucucaaagguaucauaucuaugaagguuucacuggagcaaggauccgccaccguuaaauauguuccaucggugguaugucugcaacagguuugucaccagauuggggacaugggguuugaagcaagcauugcugaaggcaaggcugcguccuggccaagccgauccuugccggcccaagaagccgucgugaaacuccgaguagaggggaugacuugucaguccugugucaguucuauugaagguaagguccggaaauugcagggugucguucgcgucaaaguuucccugaguaaccaagaagcugugaucacuuaccaaccuuaccugauacagcccgaggaccugcgggaccaugucaacgacaugggcuuugaggcugccaucaaaagcaaaguagccccacugucacuaggucccaucgauauugagcguuugcaaucgacuaacccuaagcgaccucuuagcucagccaaucaaaauuucaauaacucagaaacacuugggcaccagggaucccaugugguuacacuucaguuacgcaucgauggcaugcauuguaaaagcugugucuuaaacauagaggaaaauaucgggcaguuguuaggcgugcagagcauucaaguuagccuugaaaacaagacagcucaggucaaauaugacccuuccuguacuucuccuguggcguuacagagagccauagaagcacuuccacccgggaauuucaaggugagccugccagacggugcugaaggauccggcacagaucaccgauccucgucaucacacuccccuggcagucccccacggaaccaagugcaagggacgugcucuacaacacucaucgcgaucgccggcaugacuugugcuucaugugugcacagcaucgaagggaugauuucacaauuagaggguguccaacaaauuuccguaucacuagccgaaggaacagccacugugcuuuacaauccaagcgucauauccccugaggaacucagagcugcuaucgaagacauggguuuugaggcgucggugguuuccgaaucauguaguacuaauccccuggggaaucauucagcuggaaacucgauggugcagaccaccgacgguaccccuacaucuguccaggagguugccccccacaccggacggcucccugccaaccaugcccccgauauccucgcuaaauccccucaaucaacacgugcuguagccccacagaaauguuucuugcagauuaagggcaugaccugugccagcugcguaucuaacauugaacggaaucuacagaaagaagcaggaguacucagcguuuugguggcacucauggcuggaaaggcagagaucaaguacgacccagaagugauucaaccucuagagaucgcccaguuuauacaggaucugggauuugaagcagccgucauggaagacuaugccggcagugauggcaacaucgagcuaacaauuacuggcaugacuugugccucuugugugcacaauaucgagucaaagcuuacacgaacaaauggcaucacuuacgcgucggucgcccucgccacaucaaaggcuuuaguaaaauucgaucccgaaauuaucggcccucgcgauauaauuaaaaucaucgaggaaaucggcuuccacgcuucccuggcacaacggaacccaaaugcucaucaccucgaccacaaaauggaaauaaagcaauggaagaagucguuccuguguuccuugguguucgguauccccguaauggcgcuaaugaucuacaugcuaauucccuccaacgaaccacaccagucaaugguccucgaccauaauaucaucccagggcugagcaucuuaaaucucaucuuuuucaucuuauguaccuucgugcagagcaagacauccgaggcccucgcuaagcugaugucacuucaagcuacagaagccaccgucguuacacucggagaagauaaucucauuauaagggaggagcaggucccuauggaacuggugcagagaggagauauuguuaaagugguccccggagggaaauuccccgucgacgggaagguccuugaaggcaauaccauggccgaugaaagccucauuaccggcgaagccaugcccgucaccaaaaaacccgguucaacagugauagcagguucgaucaaugcccacggaucagugcugaucaaagcgacccacguggggaacgacacaacacuugcucaaaucgucaaacucguugaggaagcccagaugaguaaggcucccauccagcagcucgccgaucgcuuuagcgguuacuuuguccccuuuaucaucauuaugucuacccugacccucgucguguggaucguuaucggauuuaucgauuuuggcguaguacagagauauuuucccaaccccaauaaacacauaucgcagacagaaguaauuauucgcuuugccuuccagaccucaauuacaguacuuuguaucgccuguccuuguucacuuggucuagcaacccccacggccgugauggucggaacagggguggcagcccaaaauggcauccugaucaaaggagggaaaccuuuagaaauggcccacaagauaaaaacggugauguuugacaagaccgguacaaucacccacggcguuccacgcguaaugagagugcuccuccuuggcgauguagcaacccucccccuccguaaaguucucgccgucgucgggaccgcagaggcaagcucugagcacccacuagggguagcagucacgaaauauuguaaagaagaauuggguacugaaacuuuaggcuacuguacagacuuccaggcagugcccgguugugguauuggguguaaagugucaaacguggagggcauucuggcacacagcgaacggccccugagcgcaccugccucccaucugaacgaggcuggcucacugcccgccgaaaaggacgcugucccucagaccuuuuccguacuaauuggcaauagagaguggcuucgacgcaacggucuuacuaucucguccgacgugucagacgcaaugacagaucaugaaaugaagggccagacagccaucuuaguggcgauugauggcguucuaugcgggaugaucgcuaucgcagacgcuguuaaacaggaagccgcucuagccguacacacacuacaaagcaugggaguugaugugguucuaaucacuggagauaaccgcaaaacagccagagcaauagcgacgcaggugggcauuaacaagguguucgcagagguucuccccagccacaaggucgccaagguccaagaacugcagaacaaaggaaagaaagucgcaauggugggagauggcguaaacgacuccccggcacuugcacaggccgauauggggguagcaaucgguacaggcacugacguggccaucgaagccgccgaugugguucucauacgaaacgaccuauuagacguuguugccucaauacaucucucgaaacgcacaguccgacgaaucaggauuaaccuagugcuggcccuaauuuacaaccucgugggcauaccaaucgcugcuggaguguucaugccaaucgguaucgugcugcaaccuuggaugggauccgccgcuauggccgccaguagcgugagcguaguguugucaucauuacagcugaagugcuauaagaagcccgaucuggagagauaugaggcccaggcacauggacauaugaaaccccugacagcaucucaggucucagugcacauagguauggacgaucgguggagagacaguccacgcgccaccccuugggaccagguuaguuauguuagucaggugucccuauccucucuaaccuccgacaaacccucccgacauucagccgccgcagaugacgauggggacaaguggagucugcuucugaacgggcgcgaugaagagcaguauauauag

SEQ ID NO: 280081 - protein, 528 aa, Artificial Sequence
  derived and/or modified sequence
MKKSFAFDNVGYEGGLDGLGPSSQVATSTVRILGMTCQSCVKSIEDRISNLKGIISMKVSLEQGSATVKYVPSVVCLQQVCHQIGDMGFEASIAEGKAASWPSRSLPAQEAVVKLRVEGMTCQSCVSSIEGKVRKLQGVVRVKVSLSNQEAVITYQPYLIQPEDLRDHVNDMGFEAAIKSKVAPLSLGPIDIERLQSTNPKRPLSSANQNFNNSETLGHQGSHVVTLQLRIDGMHCKSCVLNIEENIGQLLGVQSIQVSLENKTAQVKYDPSCTSPVALQRAIEALPPGNFKVSLPDGAEGSGTDHRSSSSHSPGSPPRNQVQGTCSTTLIAIAGMTCASCVHSIEGMISQLEGVQQISVSLAEGTATVLYNPSVISPEELRAAIEDMGFEASVVSESCSTNPLGNHSAGNSMVQTTDGTPTSVQEVAPHTGRLPANHAPDILAKSPQSTRAVAPQKCFLQIKGMTCASCVSNIERNLQKEAAPRWVVLLRSGLQISETQVSQHGRAHRPGHKHCLCLFSGHPGGCCG

SEQ ID NO: 280082 - protein, 1465 aa, Artificial Sequence
  derived and/or modified sequence
MPEQERQITAREGASRKILSKLSLPTRAWEPAMKKSFAFDNVGYEGGLDGLGPSSQVATSTVRILGMTCQSCVKSIEDRISNLKGIISMKVSLEQGSATVKYVPSVVCLQQVCHQIGDMGFEASIAEGKAASWPSRSLPAQEAVVKLRVEGMTCQSCVSSIEGKVRKLQGVVRVKVSLSNQEAVITYQPYLIQPEDLRDHVNDMGFEAAIKSKVAPLSLGPIDIERLQSTNPKRPLSSANQNFNNSETLGHQGSHVVTLQLRIDGMHCKSCVLNIEENIGQLLGVQSIQVSLENKTAQVKYDPSCTSPVALQRAIEALPPGNFKVSLPDGAEGSGTDHRSSSSHSPGSPPRNQVQGTCSTTLIAIAGMTCASCVHSIEGMISQLEGVQQISVSLAEGTATVLYNPSVISPEELRAAIEDMGFEASVVSESCSTNPLGNHSAGNSMVQTTDGTPTSVQEVAPHTGRLPANHAPDILAKSPQSTRAVAPQKCFLQIKGMTCASCVSNIERNLQKEAGVLSVLVALMAGKAEIKYDPEVIQPLEIAQFIQDLGFEAAVMEDYAGSDGNIELTITGMTCASCVHNIESKLTRTNGITYASVALATSKALVKFDPEIIGPRDIIKIIEEIGFHASLAQRNPNAHHLDHKMEIKQWKKSFLCSLVFGIPVMALMIYMLIPSNEPHQSMVLDHNIIPGLSILNLIFFILCTFVQLLGGWYFYVQAYKSLRHRSANMDVLIVLATSIAYVYSLVILVVAVAEKAERSPVTFFDTPPMLFVFIALGRWLEHLAKSKTSEALAKLMSLQATEATVVTLGEDNLIIREEQVPMELVQRGDIVKVVPGGKFPVDGKVLEGNTMADESLITGEAMPVTKKPGSTVIAGSINAHGSVLIKATHVGNDTTLAQIVKLVEEAQMSKAPIQQLADRFSGYFVPFIIIMSTLTLVVWIVIGFIDFGVVQRYFPNPNKHISQTEVIIRFAFQTSITVLCIACPCSLGLATPTAVMVGTGVAAQNGILIKGGKPLEMAHKIKTVMFDKTGTITHGVPRVMRVLLLGDVATLPLRKVLAVVGTAEASSEHPLGVAVTKYCKEELGTETLGYCTDFQAVPGCGIGCKVSNVEGILAHSERPLSAPASHLNEAGSLPAEKDAVPQTFSVLIGNREWLRRNGLTISSDVSDAMTDHEMKGQTAILVAIDGVLCGMIAIADAVKQEAALAVHTLQSMGVDVVLITGDNRKTARAIATQVGINKVFAEVLPSHKVAKVQELQNKGKKVAMVGDGVNDSPALAQADMGVAIGTGTDVAIEAADVVLIRNDLLDVVASIHLSKRTVRRIRINLVLALIYNLVGIPIAAGVFMPIGIVLQPWMGSAAMAASSVSVVLSSLQLKCYKKPDLERYEAQAHGHMKPLTASQVSVHIGMDDRWRDSPRATPWDQVSYVSQVSLSSLTSDKPSRHSAAADDDGDKWSLLLNGRDEEQYI

SEQ ID NO: 280083 - DNA, 4541 bp, Artificial Sequence
  derived and/or modified sequence
gggaaataagagagaaaagaagagtaagaagaaatataagagccaccatgccggagcaggagaggcagattacagcgagagagggcgcatcacggaagatcctgtcgaaactctcgctgcccacccgcgcatgggagcctgcgatgaaaaagtccttcgcgttcgataacgtgggatacgagggtgggctggatggactggggccatcgtcccaagtagcgacgagcacggtaagaatcttgggtatgacgtgccagtcatgtgtaaagtccattgaggaccgcatctcgaacttgaagggaattatctcgatgaaggtatcccttgagcagggatcggcgactgtcaagtatgtcccttcggtggtgtgccttcagcaggtctgtcaccagatcggggacatgggttttgaggcgtccatcgccgaaggaaaagccgcatcctggcccagccgatcccttcccgcacaagaagcggtggtaaagctccgcgtcgaagggatgacgtgtcaatcatgcgtgtcaagcattgaaggcaaagtgcggaaactgcagggtgtggtacgagtgaaagtgtccctgagcaaccaagaggcggtgatcacttatcagccatatctcatccagccagaggatctgcgggatcacgtcaatgatatggggtttgaggcagcgatcaaatcgaaagtagctcccctgtcgctggggcccattgatatcgagcggctgcagtcaacaaaccccaagaggccccttagctcggccaatcagaatttcaataacagcgaaacactcgggcatcaggggtcccatgtagtgacccttcagctccggattgatgggatgcattgcaaaagctgtgtcctcaacatcgaggagaatattggtcagttgcttggggtgcagtcgatccaagtgtcgcttgaaaacaagaccgcgcaggtgaagtatgatccttcatgcacatcaccggtggcgctgcagagggcgatcgaagcgttgcctccgggaaatttcaaagtcagcctgccggatggggcggaaggatcgggtacggaccaccggtcaagctccagccattcacccggctcgcccccaagaaaccaggtccaggggacgtgctccacgactctcatcgcaatcgccgggatgacatgtgcgtcatgcgtccacagcattgagggtatgatctcacagcttgagggagtgcagcagatcagcgtcagcctcgcggagggaacggccacagtcctctataaccctagcgtcatctcgcccgaagagctgagagcggctattgaggacatggggttcgaggcgtccgtggtgtcggagagctgttcgacgaacccactggggaatcactcggcgggaaattcgatggtccaaacgacagatggaacgcccacgtccgtgcaagaggtggcaccacatacgggaagattgcccgcgaatcacgcgcctgacattcttgcgaagtcgccccagtcaactcgcgccgtggcaccccaaaagtgcttcttgcagatcaagggaatgacgtgcgcaagctgcgtgagcaacattgagaggaaccttcaaaaagaagccggggtcctctcagtcctcgtggcgttgatggctggaaaggcggaaatcaaatacgacccagaggtaatccagcctcttgagatcgcgcagtttatccaagacctcggattcgaagctgcagtgatggaagattacgcggggtcagatgggaacatcgagctcactatcacgggcatgacctgcgcttcgtgtgtccacaatatcgagtccaagctgactaggacgaacggaattacatatgcgtcagtagctctggcgacgtccaaagccctcgtcaaattcgatcccgagatcattggaccgcgggacatcattaagattattgaagaaatcggatttcacgctagcctcgctcagagaaaccccaacgcccaccatttggaccacaagatggagattaagcagtggaagaaatcattcctttgttccctggtgtttggaatcccggtcatggcgcttatgatctacatgctcatcccttcaaacgaacctcaccaatcgatggtgctggatcacaacattattccggggttgtcaatcctcaacctcatcttctttatcctttgcacttttgtgcagctccttggcggatggtatttctatgtgcaggcgtacaaatccctgcgacacagatcagcaaatatggatgtactgattgtcctggcgacaagcattgcgtacgtatacagcttggtcattttggtagtggccgtagccgaaaaggcagaaagatcaccggtcactttcttcgacacaccgcctatgctttttgtgttcatcgctctcggacgctggctggaacacctggcaaagagcaagacatcggaagcattggccaaattgatgtcgctccaggccaccgaggcaactgtggtgacgttgggggaagataacctgattattcgggaagagcaggtacccatggaactcgtgcagagaggagatattgtgaaggtcgtaccgggtgggaagtttcccgtagacggaaaagtgttggaagggaataccatggcggatgagagcttgattacgggagaagcgatgcctgtgacgaagaagcctggatcgacagtcattgcgggatcgatcaacgcacatggttcggtacttatcaaagcaacgcacgtgggtaatgacactactctggcccagatcgtaaagctcgtggaagaagcacaaatgagcaaagccccgattcagcaactggccgatcggttcagcggttacttcgtgccctttatcattatcatgtcgacccttacactcgtagtgtggatcgtaattgggttcatcgactttggagtggtccagcggtactttccaaatcctaacaaacatatttcgcaaactgaagtgatcatccgctttgctttccaaacctcaattacagtactctgtatcgcgtgtccatgctcattgggcttggctacgcccacggccgtaatggtagggacgggagtcgcagcgcagaatggaatcctgatcaagggcgggaaaccccttgagatggcacacaaaatcaagacagtcatgttcgacaagacggggacaattactcacggtgtgccccgggtaatgcgcgtgttgttgctcggggacgtggcgacattgccgctgaggaaggtcttggcggtcgtgggcacagcggaagcctcgtcggagcacccgctgggagtggcggtaacgaagtattgcaaagaggaactcggcactgaaacgctgggctactgcacagattttcaagccgtgcccggttgcgggattggctgtaaagtgagcaatgtggaagggattctcgcgcactcagagcgaccactctcggcaccggcttcgcatctcaatgaggccggatccctgccagccgagaaggatgctgtcccgcagaccttttccgtgttgatcggcaaccgggagtggcttaggcgcaacgggttgacgatttcgtcggatgtgtcagacgccatgacagatcatgagatgaagggacagacagcgatcctggtcgcgattgacggagtgttgtgcggtatgattgccatcgccgatgcggtaaaacaggaagcggcgctcgctgtccacacgctccagtcaatgggggtagacgtagtgctgatcaccggggacaaccgaaagaccgctcgcgccatcgccacgcaagtcgggattaacaaggtgttcgccgaggtgctcccctcgcacaaggtagcaaaagtacaagaactgcaaaacaaagggaagaaggtagcgatggtgggggatggtgtgaacgactcgccggcactcgctcaggcggacatgggtgtagccatcggaacaggaactgacgtagctatcgaggcggccgacgtagtcctcattaggaatgacctcttggacgtcgtcgcatcgatccatctttcgaagcgcactgtcaggcgcatcaggattaatttggtgctggccctgatctacaacttggtgggaatccccatcgcagcgggagtgttcatgcccatcggtattgtactgcagccatggatggggtcggccgcaatggcagcgtcaagcgtatcggtagtattgagctccttgcagctcaagtgctacaagaaacctgacttggagcgctacgaggcacaggcgcacggccatatgaagccgcttacggcatcccaagtgtccgtccacattgggatggatgataggtggcgggattcacccagggcaacaccctgggaccaggtgtcatatgtatcgcaggtgtcgctctcgtcccttacatcggataagccctcaaggcacagcgcggctgcggacgacgatggtgataaatggtcactcctgctgaatggacgcgacgaagaacagtacatttgaagcgctgccttctgcggggcttgccttctggccatgcccttcttctctcccttgcacctgtacctcttggtctttgaataaagcctgagtaggaag

SEQ ID NO: 280084 - DNA, 4398 bp, Artificial Sequence
  derived and/or modified sequence
atgcccgagcaggagagacagatcaccgccagagagggcgccagcagaaagatcctgagcaagctgagcctgcccaccagagcctgggagcccgccatgaagaagagcttcgccttcgacaacgtgggctacgagggcggcctggacggcctgggccccagcagccaggtggccaccagcaccgtgagaatcctgggcatgacctgccagagctgcgtgaagagcatcgaggacagaatcagcaacctgaagggcatcatcagcatgaaggtgagcctggagcagggcagcgccaccgtgaagtacgtgcccagcgtggtgtgcctgcagcaggtgtgccaccagatcggcgacatgggcttcgaggccagcatcgccgagggcaaggccgccagctggcccagcagaagcctgcccgcccaggaggccgtggtgaagctgagagtggagggcatgacctgccagagctgcgtgagcagcatcgagggcaaggtgagaaagctgcagggcgtggtgagagtgaaggtgagcctgagcaaccaggaggccgtgatcacctaccagccctacctgatccagcccgaggacctgagagaccacgtgaacgacatgggcttcgaggccgccatcaagagcaaggtggcccccctgagcctgggccccatcgacatcgagagactgcagagcaccaaccccaagagacccctgagcagcgccaaccagaacttcaacaacagcgagaccctgggccaccagggcagccacgtggtgaccctgcagctgagaatcgacggcatgcactgcaagagctgcgtgctgaacatcgaggagaacatcggccagctgctgggcgtgcagagcatccaggtgagcctggagaacaagaccgcccaggtgaagtacgaccccagctgcaccagccccgtggccctgcagagagccatcgaggccctgccccccggcaacttcaaggtgagcctgcccgacggcgccgagggcagcggcaccgaccacagaagcagcagcagccacagccccggcagcccccccagaaaccaggtgcagggcacctgcagcaccaccctgatcgccatcgccggcatgacctgcgccagctgcgtgcacagcatcgagggcatgatcagccagctggagggcgtgcagcagatcagcgtgagcctggccgagggcaccgccaccgtgctgtacaaccccagcgtgatcagccccgaggagctgagagccgccatcgaggacatgggcttcgaggccagcgtggtgagcgagagctgcagcaccaaccccctgggcaaccacagcgccggcaacagcatggtgcagaccaccgacggcacccccaccagcgtgcaggaggtggccccccacaccggcagactgcccgccaaccacgcccccgacatcctggccaagagcccccagagcaccagagccgtggccccccagaagtgcttcctgcagatcaagggcatgacctgcgccagctgcgtgagcaacatcgagagaaacctgcagaaggaggccggcgtgctgagcgtgctggtggccctgatggccggcaaggccgagatcaagtacgaccccgaggtgatccagcccctggagatcgcccagttcatccaggacctgggcttcgaggccgccgtgatggaggactacgccggcagcgacggcaacatcgagctgaccatcaccggcatgacctgcgccagctgcgtgcacaacatcgagagcaagctgaccagaaccaacggcatcacctacgccagcgtggccctggccaccagcaaggccctggtgaagttcgaccccgagatcatcggccccagagacatcatcaagatcatcgaggagatcggcttccacgccagcctggcccagagaaaccccaacgcccaccacctggaccacaagatggagatcaagcagtggaagaagagcttcctgtgcagcctggtgttcggcatccccgtgatggccctgatgatctacatgctgatccccagcaacgagccccaccagagcatggtgctggaccacaacatcatccccggcctgagcatcctgaacctgatcttcttcatcctgtgcaccttcgtgcagctgctgggcggctggtacttctacgtgcaggcctacaagagcctgagacacagaagcgccaacatggacgtgctgatcgtgctggccaccagcatcgcctacgtgtacagcctggtgatcctggtggtggccgtggccgagaaggccgagagaagccccgtgaccttcttcgacaccccccccatgctgttcgtgttcatcgccctgggcagatggctggagcacctggccaagagcaagaccagcgaggccctggccaagctgatgagcctgcaggccaccgaggccaccgtggtgaccctgggcgaggacaacctgatcatcagagaggagcaggtgcccatggagctggtgcagagaggcgacatcgtgaaggtggtgcccggcggcaagttccccgtggacggcaaggtgctggagggcaacaccatggccgacgagagcctgatcaccggcgaggccatgcccgtgaccaagaagcccggcagcaccgtgatcgccggcagcatcaacgcccacggcagcgtgctgatcaaggccacccacgtgggcaacgacaccaccctggcccagatcgtgaagctggtggaggaggcccagatgagcaaggcccccatccagcagctggccgacagattcagcggctacttcgtgcccttcatcatcatcatgagcaccctgaccctggtggtgtggatcgtgatcggcttcatcgacttcggcgtggtgcagagatacttccccaaccccaacaagcacatcagccagaccgaggtgatcatcagattcgccttccagaccagcatcaccgtgctgtgcatcgcctgcccctgcagcctgggcctggccacccccaccgccgtgatggtgggcaccggcgtggccgcccagaacggcatcctgatcaagggcggcaagcccctggagatggcccacaagatcaagaccgtgatgttcgacaagaccggcaccatcacccacggcgtgcccagagtgatgagagtgctgctgctgggcgacgtggccaccctgcccctgagaaaggtgctggccgtggtgggcaccgccgaggccagcagcgagcaccccctgggcgtggccgtgaccaagtactgcaaggaggagctgggcaccgagaccctgggctactgcaccgacttccaggccgtgcccggctgcggcatcggctgcaaggtgagcaacgtggagggcatcctggcccacagcgagagacccctgagcgcccccgccagccacctgaacgaggccggcagcctgcccgccgagaaggacgccgtgccccagaccttcagcgtgctgatcggcaacagagagtggctgagaagaaacggcctgaccatcagcagcgacgtgagcgacgccatgaccgaccacgagatgaagggccagaccgccatcctggtggccatcgacggcgtgctgtgcggcatgatcgccatcgccgacgccgtgaagcaggaggccgccctggccgtgcacaccctgcagagcatgggcgtggacgtggtgctgatcaccggcgacaacagaaagaccgccagagccatcgccacccaggtgggcatcaacaaggtgttcgccgaggtgctgcccagccacaaggtggccaaggtgcaggagctgcagaacaagggcaagaaggtggccatggtgggcgacggcgtgaacgacagccccgccctggcccaggccgacatgggcgtggccatcggcaccggcaccgacgtggccatcgaggccgccgacgtggtgctgatcagaaacgacctgctggacgtggtggccagcatccacctgagcaagagaaccgtgagaagaatcagaatcaacctggtgctggccctgatctacaacctggtgggcatccccatcgccgccggcgtgttcatgcccatcggcatcgtgctgcagccctggatgggcagcgccgccatggccgccagcagcgtgagcgtggtgctgagcagcctgcagctgaagtgctacaagaagcccgacctggagagatacgaggcccaggcccacggccacatgaagcccctgaccgccagccaggtgagcgtgcacatcggcatggacgacagatggagagacagccccagagccaccccctgggaccaggtgagctacgtgagccaggtgagcctgagcagcctgaccagcgacaagcccagcagacacagcgccgccgccgacgacgacggcgacaagtggagcctgctgctgaacggcagagacgaggagcagtacatctag

SEQ ID NO: 280085 - DNA, 4398 bp, Artificial Sequence
  derived and/or modified sequence
atgccggaacaggaacgtcagatcaccgccagggaaggggccagtcgtaaaatactctccaagctctccttaccaaccagggcatgggagccagcaatgaagaaaagcttcgcttttgataacgtaggctacgagggcggccttgacggactgggtccttcctcccaggtggcaactagtacagttcggattttgggaatgacatgtcagagttgcgtgaagagtatcgaggataggatcagtaacctgaagggaatcattagcatgaaagtatccctggagcaggggtcagccacagtgaagtacgtgccgtctgtcgtctgcctgcagcaagtttgccaccagataggagacatgggtttcgaggctagtatcgcagagggcaaagccgcctcatggccctctcggtctctacctgcacaggaagcggtggttaagttgagggtcgagggaatgacatgccaatcgtgtgtgagtagtatagaaggtaaggtgaggaagctgcagggcgtggtgcgggtgaaagtgtcactgagcaaccaggaggcggtcatcacataccaaccttaccttattcagcccgaggatctacgagaccatgttaatgatatgggctttgaggcagccatcaaatccaaagtggcgccactgtccttgggacccattgatatcgaacgactccaaagcacaaaccccaaaaggccactgagcagtgccaatcagaacttcaacaattccgaaaccctgggtcatcaggggtctcacgtcgttacactgcagttgcgaattgatggaatgcactgcaagagctgtgtcttgaatatcgaagaaaatatcggacagctcctgggcgtgcagtctattcaggtgagtcttgagaataaaacagcccaggtaaagtatgacccaagctgtactagccctgttgccctgcagcgagccattgaagctttaccgccagggaactttaaggtcagccttccagacggcgcagagggttccggcactgaccaccgttcatcaagtagtcatagcccagggagtccaccacggaaccaggtgcaggggacatgctccaccacactcatcgcaattgccggtatgacatgcgcttcgtgtgtgcattctatcgaagggatgatctcacagctagaaggcgttcagcagatttctgtgtccctggctgaaggaaccgctactgtgctctacaatccttccgtaatctcccccgaggagctcagggccgcaatcgaagatatgggatttgaggcgtcagttgtgagtgaaagctgtagcactaaccctctgggcaaccactccgccgggaacagcatggttcaaactacggacggtacaccaacctcggttcaggaggtggctccacatactggccgtctgccagccaatcacgccccagatatcctggcaaagtcgccccagtcaaccagggctgtcgccccacagaagtgcttcttgcaaatcaaaggaatgacctgcgcttcttgtgtgtccaatatagaacgcaacctccaaaaagaagcgggagtgctcagcgtgttggtagccttaatggcagggaaggccgaaattaagtacgaccctgaagtgatccagccactggaaatcgcgcagtttatccaggacctcgggtttgaagcagctgtcatggaggattacgcaggctcagatggcaatatcgagctgacgataacaggaatgacatgcgcctcctgtgtgcataacatagaatctaaactcacccggaccaatggcatcacctatgcttccgtggctctcgctacttcgaaggccctggtgaagttcgaccctgaaattataggtccaagggatatcatcaaaatcatagaggagattgggtttcatgccagtctcgctcaacggaaccctaatgcacaccacctggaccacaagatggaaattaaacagtggaagaaaagcttcctttgtagtctggtgtttggaatccctgtcatggcgctgatgatttacatgctgatccccagcaacgagccccaccagtcaatggtgcttgatcacaacataatcccaggtctgagcatcctcaatttgatcttctttatcctgtgtaccttcgtgcaactgcttggcggctggtacttctacgttcaagcctataagtcgcttcggcatcgctctgctaatatggacgtgttgatagtgttggccaccagtattgcttacgtttactcccttgtcatcctagttgtggccgttgcggaaaaggctgagcgaagtcctgtgaccttcttcgatacacctccgatgctgtttgtctttattgccctggggaggtggctggagcacttagcaaagagcaagaccagcgaggccctggccaagctgatgtccctccaagcaactgaggcaaccgtggttaccctcggcgaagataatttgataattcgggaggaacaggtcccaatggaattggtacagaggggcgacatcgtgaaagtcgttcccggaggtaaatttcccgttgacggcaaggtcctggaggggaacaccatggcagacgagtctttaattaccggcgaagccatgccagtaactaagaagcccggctccaccgtgattgctggttctataaatgcccacggcagcgtactcataaaagctacccatgtcggaaacgacactacactagcccagatagttaagctcgtcgaggaggcgcagatgtctaaagcgcccatccagcagctcgccgaccggttttctggatacttcgtcccatttattattatcatgtccactctaaccctagtagtgtggatcgtgatcggctttatcgacttcggcgtagtccagcgttattttcccaaccccaacaagcacatttcccagacagaagtgattattcggttcgcatttcaaacctccatcactgtgctatgcatagcatgtccgtgtagtcttggcctggccactcccacagccgtgatggtgggcaccggtgtcgcagcccagaacggaatcctcattaagggcggaaagccattagagatggcccacaagatcaagacagtcatgtttgataaaacaggcaccatcacccatggtgtaccacgagtgatgcgagtgttactcttaggggatgtagcgacacttccactgcgtaaagtactagcggtggttggcactgccgaagccagcagcgaacacccactgggagtggcagtcacaaagtactgtaaggaagaacttgggaccgaaactctgggctattgcaccgatttccaagccgttccaggctgcgggattgggtgtaaagttagcaacgtggagggcattctggcccattccgagagaccgctgtcagctccagccagtcacctaaatgaagccggttcactgcctgcagagaaggacgcagtcccccaaaccttcagtgtgctgatcgggaaccgggagtggctacgccgcaatggtcttaccatcagtagtgacgtttccgatgctatgacagaccatgagatgaaaggacaaacagccatacttgtggccatcgatggggtgttgtgcggtatgatcgctattgccgacgctgtgaaacaggaagccgctctcgcagtccacactttgcagtcaatgggtgtggacgtggtcctgatcaccggagacaatagaaagactgcacgggcaatcgcaacgcaggtgggcattaacaaggtgtttgcggaagttcttcccagtcacaaggtggcaaaggttcaagaactacagaataaaggcaaaaaagttgctatggtaggagatggcgtaaatgactcacccgctttagctcaggccgatatgggcgtagcaatcggcaccgggacagatgtggctattgaggcagcagacgttgtcttgatcaggaatgacctgcttgacgttgttgctagtatccatttgagcaaaagaaccgtccgccgcatacgaatcaatttagtgctggccctcatctataacctggttggcattcccatcgctgctggagtgttcatgcctattggcatcgtcctgcagccgtggatgggcagcgctgcgatggctgcgtcatcagtaagcgtagtgttgagcagccttcaattaaaatgttataagaaacccgatctcgagcggtacgaggcacaggcccatggtcacatgaaaccactcactgctagccaggtctccgtccacatcgggatggacgatcggtggagggacagccctcgggctaccccttgggaccaggtctcctatgtcagccaggtgagtctttcaagcttaacttcggacaagccaagtcgacactctgctgctgccgatgacgacggtgataagtggtcgctcctgctgaatgggcgggacgaggaacagtacatctag

SEQ ID NO: 280086 - DNA, 6638 bp, Artificial Sequence
  derived and/or modified sequence
ttcccggacccctgtttgctttagagccgagccgcgccgatgccctcacactctgcgcctcctctcccgggactttaacaccccgctctcctccaccgaccaggtgaccttttgctctgagccagatcagagaagaattcggtgtccgtgcgggacgatgcctgagcaggagagacagatcacagccagagaaggggccagtcggaaaatcttatctaagctttctttgcctacccgtgcctgggaaccagcaatgaagaagagttttgcttttgacaatgttggctatgaaggtggtctggatggcctgggcccttcttctcaggtggccaccagcacagtcaggatcttgggcatgacttgccagtcatgtgtgaagtccattgaggacaggatttccaatttgaaaggcatcatcagcatgaaggtttccctggaacaaggcagtgccactgtgaaatatgtgccatcggttgtgtgcctgcaacaggtttgccatcaaattggggacatgggcttcgaggccagcattgcagaaggaaaggcagcctcctggccctcaaggtccttgcctgcccaggaggctgtggtcaagctccgggtggagggcatgacctgccagtcctgtgtcagctccattgaaggcaaggtccggaaactgcaaggagtagtgagagtcaaagtctcactcagcaaccaagaggccgtcatcacttatcagccttatctcattcagcccgaagacctcagggaccatgtaaatgacatgggatttgaagctgccatcaagagcaaagtggctcccttaagcctgggaccaattgatattgagcggttacaaagcactaacccaaagagacctttatcttctgctaaccagaattttaataattctgagaccttggggcaccaaggaagccatgtggtcaccctccaactgagaatagatggaatgcattgtaagtcttgcgtcttgaatattgaagaaaatattggccagctcctaggggttcaaagtattcaagtgtccttggagaacaaaactgcccaagtaaagtatgacccttcttgtaccagcccagtggctctgcagagggctatcgaggcacttccacctgggaattttaaagtttctcttcctgatggagccgaagggagtgggacagatcacaggtcttccagttctcattcccctggctccccaccgagaaaccaggtccagggcacatgcagtaccactctgattgccattgccggcatgacctgtgcatcctgtgtccattccattgaaggcatgatctcccaactggaaggggtgcagcaaatatcggtgtctttggccgaagggactgcaacagttctttataatccctctgtaattagcccagaagaactcagagctgctatagaagacatgggatttgaggcttcagtcgtttctgaaagctgttctactaaccctcttggaaaccacagtgctgggaattccatggtgcaaactacagatggtacacctacatctgtgcaggaagtggctccccacactgggaggctccctgcaaaccatgccccggacatcttggcaaagtccccacaatcaaccagagcagtggcaccgcagaagtgcttcttacagatcaaaggcatgacctgtgcatcctgtgtgtctaacatagaaaggaatctgcagaaagaagctggtgttctctccgtgttggttgccttgatggcaggaaaggcagagatcaagtatgacccagaggtcatccagcccctcgagatagctcagttcatccaggacctgggttttgaggcagcagtcatggaggactacgcaggctccgatggcaacattgagctgacaatcacagggatgacctgcgcgtcctgtgtccacaacatagagtccaaactcacgaggacaaatggcatcacttatgcctccgttgcccttgccaccagcaaagcccttgttaagtttgacccggaaattatcggtccacgggatattatcaaaattattgaggaaattggctttcatgcttccctggcccagagaaaccccaacgctcatcacttggaccacaagatggaaataaagcagtggaagaagtctttcctgtgcagcctggtgtttggcatccctgtcatggccttaatgatctatatgctgatacccagcaacgagccccaccagtccatggtcctggaccacaacatcattccaggactgtccattctaaatctcatcttctttatcttgtgtacctttgtccagctcctcggtgggtggtacttctacgttcaggcctacaaatctctgagacacaggtcagccaacatggacgtgctcatcgtcctggccacaagcattgcttatgtttattctctggtcatcctggtggttgctgtggctgagaaggcggagaggagccctgtgacattcttcgacacgccccccatgctctttgtgttcattgccctgggccggtggctggaacacttggcaaagagcaaaacctcagaagccctggctaaactcatgtctctccaagccacagaagccaccgttgtgacccttggtgaggacaatttaatcatcagggaggagcaagtccccatggagctggtgcagcggggcgatatcgtcaaggtggtccctgggggaaagtttccagtggatgggaaagtcctggaaggcaataccatggctgatgagtccctcatcacaggagaagccatgccagtcactaagaaacccggaagcactgtaattgcggggtctataaatgcacatggctctgtgctcattaaagctacccacgtgggcaatgacaccactttggctcagattgtgaaactggtggaagaggctcagatgtcaaaggcacccattcagcagctggctgaccggtttagtggatattttgtcccatttatcatcatcatgtcaactttgacgttggtggtatggattgtaatcggttttatcgattttggtgttgttcagagatactttcctaaccccaacaagcacatctcccagacagaggtgatcatccggtttgctttccagacgtccatcacggtgctgtgcattgcctgcccctgctccctggggctggccacgcccacggctgtcatggtgggcaccggggtggccgcgcagaacggcatcctcatcaagggaggcaagcccctggagatggcgcacaagataaagactgtgatgtttgacaagactggcaccattacccatggcgtccccagggtcatgcgggtgctcctgctgggggatgtggccacactgcccctcaggaaggttctggctgtggtggggactgcggaggccagcagtgaacaccccttgggcgtggcagtcaccaaatactgtaaagaggaacttggaacagagaccttgggatactgcacggacttccaggcagtgccaggctgtggaattgggtgcaaagtcagcaacgtggaaggcatcctggcccacagtgagcgccctttgagtgcaccggccagtcacctgaatgaggctggcagccttcccgcagaaaaagatgcagtcccccagaccttctctgtgctgattggaaaccgtgagtggctgaggcgcaacggtttaaccatttctagcgatgtcagtgacgctatgacagaccacgagatgaaaggacagacagccatcctggtggctattgacggtgtgctctgtgggatgatcgcaatcgcagacgctgtcaagcaggaggctgccctggctgtgcacacgctgcagagcatgggtgtggacgtggttctgatcacgggggacaaccggaagacagccagagctattgccacccaggttggcatcaacaaagtctttgcagaggtgctgccttcgcacaaggtggccaaggtccaggagctccagaataaagggaagaaagtcgccatggtgggggatggggtcaatgactccccggccttggcccaggcagacatgggtgtggccattggcaccggcacggatgtggccatcgaggcagccgacgtcgtccttatcagaaatgatttgctggatgtggtggctagcattcacctttccaagaggactgtccgaaggatacgcatcaacctggtcctggcactgatttataacctggttgggatacccattgcagcaggtgtcttcatgcccatcggcattgtgctgcagccctggatgggctcagcggccatggcagcctcctctgtgtctgtggtgctctcatccctgcagctcaagtgctataagaagcctgacctggagaggtatgaggcacaggcgcatggccacatgaagcccctgacggcatcccaggtcagtgtgcacataggcatggatgacaggtggcgggactcccccagggccacaccatgggaccaggtcagctatgtcagccaggtgtcgctgtcctccctgacgtccgacaagccatctcggcacagcgctgcagcagacgatgatggggacaagtggtctctgctcctgaatggcagggatgaggagcagtacatctgatgacttcaggcaggcgggccggggcagggacttgcctccactcaccacaagctgagcaggacagccagcagcaggatgggctgagctagcctccagctttggggacttccgctccctggatatgtccagtcatcctgccctgcagcacgcggccttgtctgggtgcagctgggcttggcctggagaggacggccctgcctgcctcttggcctcacgggaccgtcagcatgggctttgtcttggactctagtccttggctggactgtagaaggtgagaggcgagtcaccctcctcacagacctctgcttggagtatttaggatgactgctgtgaaatggagaacagtttcatcaggaccaaaaaacctcactgggcctttccagagaactgcagacctcactgtcagggtctttctgatgacgcctgtctgtgtgcatcatgtttctgagaccacagtttacctcaggtgtgcctgttgctttcttcctgcatagtctgttcctttcttcgtacatagtctgttccttttctctcctgtgtgcttgtcagtggggacccctcgcaaccctgcctgtcacctgggagggtgggaccaatgtccttgtggtctttgctgctgctctcaggcgcttctccaatgctctggagtgtgcatttcagcttgaacctgcttcctggctcacacatccccagccagggagcttgccacactcttcttcaagttgaggagagttcttttttgcttaaagcccccttctccatggagtgttggcttctcaatagagtgttgttgctgaccagctggagtgagggcctcagagcctgacctgagagtccgtactcggcttcctgtggggtgtaggttctcgcgattcaggacgtccttccatatccctgcccagcctgtggtgcttgaaacgtttgccccatgggaaacgtatgtgtgcaggagcctccctgcacggcccaaggggcttcgttttcagtcttctgactgtcacctcgtggggttcagtagagaattcatgtgactagcgcctggccttgtgtggcttggaggaaatggtactgcccaaataggaggaaaacacagcctccctgagcctgcattctgcacgctgcccaggggcttcagaaaaggagtggccacagcaccccgaagggagcatctgtttacctggcagtggctctcagagcagcagaacgggttcagttttagactctgaagttggttgtgattgacagaaccctttgggagcaaactagtagagttggattaaattctgggtgaaacccttttctcccacacaaaatagttttagtgatttttttcattgtccattacttgccaggggcagttttagcagcacttttgatagattacgtctaatcctcccaaccaaccagcagggtagctattactgtccacattttacaggcaaggaaacaggctccaagaggctgaggactttgcccaggatgacatagccaatggacaagcagtgtctgtcagctgtgaaggcttcactcttattgtccttctaccttgaatagaagttttcctgataagaataaacgaggaaaaggtccttgcctcctggaagaacaaatctaccaggtgatctattcattgtttcaactcagaatgcacttgattcaggaggtcatctgaccttcaccttggatggttagtttcactttttacatatagtttttgcagggttttattttataaaatccaagcgcgctgttgattgtgttttccttgttttcagcccccccactccagcccgcagcacatttccgctgtccgtcagtaattgtgtcctctctttatgcttgcttggggaatgttgttttctgactaggctgatcattatctaaagaatctaattctgttgatttttaaaacttttaggaccataaacgttgtgttcatatatggacatggaaatatttatataattttatagaaaataaccttttagatggtcaaagtgtaaggagtttttttgtcagataatcatttctacttcaaaaacatttcatgcaatattagaataaagttcctgtcattcctcta

SEQ ID NO: 280087 - DNA, 4398 bp, Artificial Sequence
  derived and/or modified sequence
atgcctgagcaggagcggcagatcacagcccgggagggcgccagcaggaagatcctgagcaagctgagcctgcccacccgggcctgggagcccgccatgaagaagagctttgcctttgacaacgtgggctatgagggcggcctggatggcctgggccccagcagccaggtggccaccagcacagtgcgcatcctgggcatgacctgccagagctgtgtgaagagcattgaagatcgcatcagcaacctgaagggcatcatctccatgaaggtgtccctggagcagggcagcgccaccgtgaagtatgtgcccagcgtggtgtgcctgcagcaggtgtgccaccagatcggggacatgggctttgaggccagcattgctgagggcaaggccgcctcctggcccagccgcagcctgcctgcccaggaggccgtggtgaagctgcgggtggagggcatgacctgccagagctgtgtgagcagcattgagggcaaggtgaggaagctgcagggcgtggtgcgggtgaaggtgtccctgagcaaccaggaggccgtcatcacctaccagccctacctgatccagcctgaggacctgcgggaccacgtgaatgacatgggctttgaggccgccatcaagagcaaggtggcccccctgagcctgggccccatcgacatcgagcggctgcagagcaccaaccccaagaggcccctgagcagcgccaaccagaacttcaacaacagcgagaccctgggccaccagggcagccacgtggtgaccctgcagctgagaattgatggcatgcactgcaagagctgtgtgctgaacattgaagaaaatattggccagctgctgggcgtgcagagcatccaggtgtccctggagaacaagacagcccaggtgaagtatgaccccagctgcaccagccctgtggccctgcagagggccatcgaggccctgcccccaggcaacttcaaggtgtccctgcctgatggagctgagggcagcggcacagaccacaggagcagcagcagccacagccctggcagccccccaagaaaccaggtgcagggcacctgcagcaccaccctgattgccatcgccggcatgacctgtgccagctgtgtgcacagcattgagggcatgatcagccagctggagggcgtgcagcagatctctgtgtccctggccgagggcacagccaccgtgctgtacaaccccagcgtcatcagccctgaggagctgcgggccgccatcgaggacatgggctttgaggcctctgtggtgtctgagagctgcagcaccaaccccctgggcaaccacagcgctggcaacagcatggtgcagaccacagatggcacccccacctctgtgcaggaggtggccccccacacaggccgcctgcctgccaaccacgccccagacatcctggccaagagcccccagagcaccagggctgtggccccccagaagtgcttcctgcagatcaagggcatgacctgtgccagctgtgtgagcaacatcgagaggaacctgcagaaggaggccggcgtgctgtctgtgctggtggccctgatggccggcaaggccgagatcaagtatgaccctgaggtgatccagcccctggagatcgcccagttcatccaggacctgggctttgaagctgctgtgatggaggactatgccggcagtgatggcaacatcgagctgaccatcaccggcatgacctgtgccagctgtgtgcacaacatcgagagcaagctgaccaggaccaacggcatcacctacgcctctgtggccctggccaccagcaaggccctggtgaagtttgatcctgagatcatcggcccccgggacatcatcaagatcatcgaggagatcggcttccacgccagcctggcccagaggaaccccaatgcccaccacctggaccacaagatggagatcaagcagtggaagaagagcttcctgtgcagcctggtgtttggcatccctgtgatggccctgatgatctacatgctgatccccagcaatgagccccaccagagcatggtgctggaccacaacatcatccctggcctgagcatcctgaacctgatcttcttcatcctgtgcacctttgtgcagctgctgggcggctggtacttctacgtgcaggcctacaagagcctgcggcacaggtctgccaacatggatgtgctgattgtgctggccaccagcatcgcctacgtgtacagcctggtgatcctggtggtggccgtggccgagaaggccgagaggagccctgtgaccttctttgacaccccacccatgctgtttgtgttcatcgccctgggccgctggctggagcacctggccaagagcaagaccagcgaggccctggccaagctgatgagcctgcaggccacagaggccaccgtggtgaccctgggggaggacaacctgatcatccgggaggagcaggtgcccatggagctggtgcagagaggagacatcgtgaaggtggtgcctgggggcaagtttcctgtggatggcaaggtgctggagggcaacaccatggctgatgagagcctcatcaccggggaggccatgcctgtgaccaagaagccaggcagcacagtgattgctggcagcatcaatgcccacggctctgtgctgatcaaggccacccacgtgggcaatgacaccaccctggcccagatcgtgaagctggtggaggaggcccagatgagcaaggcccccatccagcagctggccgaccgcttcagcggctactttgtgcccttcatcatcatcatgagcaccctgaccctggtggtgtggatcgtcatcggcttcatcgactttggagtggtgcagcgctacttccccaaccccaacaagcacatcagccagacagaggtgatcatccgctttgccttccagaccagcatcaccgtgctgtgcatcgcctgcccctgcagcctgggcctggccacccccacagctgtgatggtgggcactggagtggccgcccagaatggcatcctgatcaagggcggcaagcccctggagatggcccacaagatcaagacagtgatgtttgacaagacaggcaccatcacccacggcgtgccccgggtgatgagggtgctgctgctgggagatgtggccaccctgcccctgaggaaggtgctggccgtggtgggcacagctgaggccagcagcgagcaccccctgggcgtggccgtgaccaagtactgcaaggaggagctgggcacagagaccctgggctactgcacagacttccaggccgtgcccggctgcggcatcggctgcaaggtgtccaatgtggagggcatcctggcccacagcgagcggcccctgagcgccccagccagccacctgaatgaggccggcagcctgcctgctgagaaggatgctgtgccccagaccttctctgtgctgattggcaaccgggagtggctgcggagaaatggcctgaccatcagcagtgatgtgtctgatgccatgacagaccacgagatgaagggccagacagccatcctggtggccattgatggagtgctgtgtggcatgattgccatcgcagatgctgtgaagcaggaggccgccctggccgtgcacaccctgcagagcatgggcgtggatgtggtgctgatcaccggggacaacaggaagacagcccgggccatcgccacccaggtgggcatcaacaaggtgtttgctgaggtgctgcccagccacaaggtggccaaggtgcaggagctgcagaacaagggcaagaaggtggccatggtgggagatggagtgaatgacagccctgccctggcccaggccgacatgggcgtggccatcggcaccggcacagatgtggccatcgaggccgcagatgtggtgctgatcagaaatgacctgctggatgtggtggccagcatccacctgagcaagaggacagtgcggcgcatccgcatcaacctggtgctggccctgatctacaacctggtgggcatccccatcgccgccggggtcttcatgcccatcggcatcgtgctgcagccctggatgggcagcgctgccatggccgccagctctgtgtctgtggtgctgagcagcctgcagctgaagtgctacaagaagccagacctggagagatatgaggcccaggcccacggccacatgaagcccctgacagccagccaggtgtctgtgcacatcggcatggatgaccgctggagggacagcccccgggccaccccctgggaccaggtgtcctatgtgtcccaggtgtccctgagcagcctgaccagtgacaagcccagccgccacagcgctgctgctgatgatgatggagacaagtggagcctgctgctgaatggaagagatgaggagcagtacatctag

SEQ ID NO: 280088 - DNA, 4398 bp, Artificial Sequence
  derived and/or modified sequence
atgcccgagcaggagcggcagatcaccgcccgggagggcgccagcagaaaaatactgtctaaactcagtctgcctacgagagcatgggaacctgcgatgaagaagtctttcgcattcgacaacgtcgggtatgaaggcggcttagatgggctcggtccatctagccaggtcgcgacttcaaccgtgcgcattttgggtatgacctgccagtcttgcgtgaagtcaatcgaggaccgcatttctaacctcaaggggatcatcagcatgaaggtaagtctcgaacaagggtctgcaacagtgaagtacgttccctctgtagtctgcctgcagcaggtctgccatcaaataggtgatatgggctttgaggctagtatcgcagagggcaaggccgccagctggccatcccgctccctgcctgcccaagaagctgtcgtgaaactgagagtggaggggatgacttgtcagtcttgtgtctcaagtatagagggcaaagtgcgtaagctccagggggtagttcgagtcaaagtctcactgtccaaccaggaggccgtgattacttaccagccttatttaattcaacccgaagatctgcgggatcacgtcaatgacatggggttcgaggcggccattaagtctaaggttgcacctctgtcactggggcccatcgatatcgagcgcctgcaatcaaccaatcccaagagacctctctcttctgcaaaccagaactttaacaattccgagactctggggcatcaggggtcacacgtggttaccctgcagctgaggattgacggcatgcattgtaagtcctgtgttctgaacattgaggagaatatcgggcagcttttgggcgttcagagtattcaggtgagtctggagaacaagacagctcaggttaagtatgacccatcctgcacatctcccgtggctctgcaacgagccatcgaggcactgcctcctggcaattttaaggtgtccttgccagacggggcggagggttcaggcaccgatcatcggtccagtagctcccattctccagggtcaccaccccggaaccaagttcaaggtacgtgtagcacaactctcattgcaatcgctggcatgacttgtgcctcttgcgtacactctatcgaaggaatgatttctcaattggaaggcgtgcagcagatctccgtctcactggccgaaggcaccgcaaccgttctgtacaatccttcagtgatcagtcccgaagaactgagagccgcaattgaagatatgggctttgaagcctcagttgtgtccgagtcatgcagcaccaacccccttggaaatcacagtgctggcaacagtatggtgcagaccactgacggaacaccaaccagtgttcaagaggtagcacctcatacaggtcggcttcctgctaaccacgctcctgatatattagcaaagtctccccagtccacccgcgctgttgctccccagaaatgtttcctccagataaaagggatgacttgcgcaagctgcgtttccaatattgagagaaatctgcaaaaggaggcaggagtcctgagcgtactcgtggcactaatggccgggaaggcggaaattaagtatgatccagaagtgatccagccactggaaattgcccagtttatccaggatctgggctttgaggccgccgtgatggaagattacgcggggtccgacggcaatattgaactgacgatcaccgggatgacatgcgcaagctgtgtccacaacatcgaatccaagttaactcggacaaacgggatcacttacgcctccgttgcgcttgccactagcaaagctctggttaagtttgacccagagataattggcccaagagatattataaagatcatagaagaaatcggctttcacgcctcgttagcacaacgcaaccctaacgctcaccatctggaccacaaaatggaaattaaacagtggaagaaatcattcctctgttcccttgtcttcggtattcccgtgatggcgctaatgatatacatgttaatcccttctaatgagccacatcagtctatggttctggaccacaacattatcccaggactgtctattctgaatctgatctttttcatcctctgcacattcgttcagttgctcggggggtggtatttctacgtacaggcttataagtccctgcgacacaggagcgctaacatggacgttttaatcgtgcttgctacaagtatcgcttatgtctattctctagttatactcgtcgtggccgtggcagaaaaggctgagcgctctcccgtaaccttcttcgatacacccccaatgctgtttgtctttatcgcccttggccgttggctggagcatctggctaagtcgaaaacctccgaagccctcgccaaactgatgagcctacaggctactgaagccacagttgtgaccctcggtgaagacaatctcattattcgcgaagagcaggtgcccatggagttggtccagaggggggacatcgtcaaggttgtgcccggggggaagttccctgtggacggcaaagtgcttgagggtaacaccatggctgacgagtcccttataactggcgaggccatgcccgttactaagaagcccgggtctactgtgatagctggtagcattaatgcccacggctcagttttgataaaagcaacccacgttggcaacgataccactctggctcagatcgtgaagctagtcgaagaggctcagatgagcaaagcccccattcagcaactcgccgaccggtttagcggatatttcgtaccattcattatcattatgagtactctgactctcgtggtgtggattgtcataggtttcattgatttcggcgtcgtgcagagatacttcccaaatcccaacaagcacataagccagaccgaggtgatcatcagattcgcattccagacgtctatcacagtattatgcattgcttgtccttgcagtctgggactggcaacgcccaccgctgttatggtagggacgggcgtcgcagcacaaaatggtatactgataaaagggggcaagcctctagaaatggcccacaaaatcaaaacggtgatgttcgataagacaggaaccataactcacggggtccctagggtgatgcgagtactcctcctcggggatgttgcgactctgcccctgcgcaaagtgttagctgttgtggggaccgcagaggcatcctctgaacatccactgggagttgcagtcaccaaatattgcaaagaagaactcggaaccgagaccttggggtactgcactgatttccaggccgtgccaggctgcggaatcgggtgcaaggtatcaaacgtagagggcattttggcccattctgaacgacccctgtccgcccccgcaagtcacctaaatgaagcaggcagccttcccgcagagaaggacgccgtgcctcagactttctccgtcctcatcggtaatagggaatggctccgaagaaacggactcaccatatcatccgatgtgtccgacgctatgactgatcacgaaatgaaagggcagacagccatacttgtggctatcgatggagtgctctgcggcatgatcgccatagctgacgccgtgaagcaggaggccgccctagcagttcacacattacagagtatgggcgtcgatgttgtgctgatcaccggagataaccgaaagacggctagagcaatagcgacacaggtcgggattaataaagtcttcgccgaggtcctgccttcccataaggtcgctaaagttcaggagctccagaataagggcaaaaaagtggctatggtaggagatggggtaaacgactcccccgctctggctcaagccgatatgggtgtcgcaattggaacagggactgacgttgctatcgaggccgctgacgtggtccttatacgaaatgacttgctcgacgtagtggcaagcattcatctgtccaaacgaaccgtgcgcaggattcgaatcaacctggtccttgccctgatttataacctggtgggcatccccatcgccgcaggcgtctttatgcccataggtatcgttcttcaaccttggatgggctcagcagctatggcggcttcatcggtgagcgtagtcctctcaagtctacagcttaaatgttataagaaacctgatctggagcgatatgaggcgcaggcgcatggtcacatgaaacctttaacagccagtcaagtctccgtgcatattgggatggatgaccgctggcgcgacagtccacgtgcaacaccctgggaccaagtatcctatgtcagtcaggtaagcctttccagcctgaccagcgataaaccaagccgacatagtgccgcggctgatgatgacggagataagtggtcactactgcttaatggtagggatgaggagcagtatatctag

SEQ ID NO: 280089 - DNA, 4398 bp, Artificial Sequence
  derived and/or modified sequence
atgcccgaacaggagcgacagatcaccgcgcgagaaggggcatcacggaagattctctctaagctgagcctgcctacaagggcctgggaacctgctatgaagaaaagcttcgccttcgataatgttggatatgagggcggactcgatggcttggggccatcaagtcaggttgccactagcacggttaggatattaggaatgacttgccagtcttgtgttaaaagtattgaggaccggattagcaacttgaaaggaatcatctcaatgaaggtgtctctggaacagggttctgctaccgtaaagtatgtgccatcagtcgtctgtctacaacaggtctgccaccagattggggacatgggattcgaagcatctatagcagagggaaaagccgcatcctggcctagtagatcattgccagcccaggaggccgttgttaagttgagggtcgagggcatgacctgccagagctgtgtgtcctccatcgaaggcaaagtgcgcaagctccaaggagtggtaagagtcaaggtgtcactgtccaatcaggaggccgtgataacctaccagccctacctgatccagccagaagatctgcgagaccacgttaatgacatgggcttcgaggccgcaattaaaagtaaggtcgcccctttgtcgcttggtcctatcgacatagaaagactgcagtccacaaacccaaagcggcctctgtccagcgccaatcaaaacttcaacaacagtgaaactttgggccatcaggggtcacatgtggtaaccctgcagctgcgtattgatggaatgcattgcaagtcttgtgtgcttaacatagaggagaatatcgggcaactcctcggggtgcaaagcatccaggtcagtcttgagaataaaacggcacaagttaagtacgatccatcctgtacctctcccgtggccctccagagggctatagaagcattgccacccggaaactttaaggtgagtctgcctgacggcgcagagggtagcgggacagaccaccgtagctcatcgtcacactctccgggtagcccaccccgtaaccaggttcaggggacttgttcaacaaccctgattgccatcgcagggatgacctgcgctagctgtgtgcatagtatagaggggatgatttcacagttagagggggttcagcagatctccgtctcactggccgagggcacagcaaccgtgttatacaatccatccgtgattagtcccgaggagctccgggcagccatagaggacatgggatttgaggcgtccgtggtgtcagaatcatgtagcaccaatcccctgggaaaccacagcgccggtaatagtatggtccagacgaccgacggcacccccactagcgtgcaggaagtggcaccccacactggccgattgccagccaatcacgccccagacatattggctaagagcccccagtcgacaagagccgtggcgccacagaaatgcttcctgcaaatcaagggaatgacatgtgcatcctgcgtgtcaaacatcgagcggaacctccagaaggaggctggtgtcttgtcggtactggtggccttaatggcaggcaaagctgagatcaaatacgaccccgaggtcattcagcctttagagatagcccagttcatccaggacctgggattcgaagctgcggtgatggaagattacgccggtagtgatgggaacattgagttgactatcacaggaatgacctgtgcatcgtgcgtgcacaatatcgaaagcaagctgacccgaactaacgggataacttacgcaagtgttgctttagccacatcaaaggcactggtcaagttcgatcccgaaattattggcccacgtgatataattaagatcatcgaagaaatcggctttcatgccagcctggctcagcgcaaccctaatgcccatcacctggaccataaaatggaaattaagcagtggaaaaaatccttcctgtgtagtctcgtgttcgggatccccgtcatggccctgatgatctacatgttaatcccttccaacgaacctcaccaaagcatggtgctggaccacaatatcatccccggtctctcaatcttaaatctcatcttcttcatcctatgtactttcgtgcaactgttagggggatggtatttttatgtgcaggcatacaagtcgctaaggcatcgttcagcaaatatggatgtcctcattgttctagctacaagtattgcctatgtttacagcttggtgattctggtagtagctgttgcagagaaggcggagaggtcacctgtcacgttttttgatactcccccaatgctgtttgtgttcatcgctctcggacgctggctggagcacttggccaaatccaagaccagcgaagcccttgccaagctaatgagcctgcaggccacggaggccacagtggtcaccttgggagaggacaatctgatcatccgtgaggagcaggtgcctatggaactggtgcagaggggcgacatagtgaaggtggtcccgggaggcaaatttccagttgatggcaaggtcctggaaggtaacaccatggctgacgagagtctgatcacaggcgaagctatgcctgtgacaaaaaaaccagggagtaccgttatcgctggctccattaatgcccatgggtccgtgttgataaaagccacacatgtggggaatgacactacactggcccagattgtgaaacttgttgaagaggcacaaatgtcaaaggcacctatccagcaactcgccgaccgcttttctggatactttgtgcccttcattatcataatgtcgacgttaacgctcgtcgtgtggattgttataggtttcatcgactttggggtcgttcaaagatactttcccaaccccaacaagcacattagccagaccgaggttatcatcagatttgccttccagacaagcattacggtgctatgcatcgcctgtccttgctctctggggttagcaacccccaccgccgtcatggtgggaacaggagtcgccgcacagaatggcatactgattaagggtggaaagcctttagaaatggcccacaaaatcaaaacggtcatgtttgataaaaccggcactatcactcatggcgtgccgagggtgatgcgcgtgttgctgttgggagacgtggctactcttcctttacggaaagtcctcgcggtcgttggtactgccgaagcctcctcagagcacccactgggcgtggcggtgactaagtattgcaaggaagaactagggacggagaccctcgggtactgcacagattttcaggccgtgcccggatgtggaatcggatgtaaggtctcaaacgtggagggaatattggcccacagcgagcgaccactctcagcccctgccagccatctgaacgaagccggatccctgcctgccgaaaaagacgctgtgccccagacgttctccgtgctgattggaaaccgtgaatggctcagaaggaacggactcacaatcagttctgacgtctctgatgccatgaccgaccacgagatgaaggggcaaacagctatcttagtggctatcgatggcgttttatgtggcatgatcgcaatagcagacgccgtcaagcaagaggccgctctggccgtacacacacttcagtcaatgggcgtagacgttgtgctgatcaccggcgacaatcgcaaaacagcacgagctatagccacccaagttggaattaataaggtgttcgccgaggtactgccctctcacaaggttgcgaaagttcaggaactgcagaataagggcaagaaagtggcaatggtcggggacggggttaatgactcgccagcactcgcacaggccgatatgggggtagcaatcggtacaggaaccgacgtggcaatagaggctgctgatgtagtgttaattaggaacgacttgttagacgtggtggctagcattcatctgtctaaacgcacagtgagaaggatcaggatcaatctggtcctcgcactgatatacaatttagtgggcatccccatcgcagccggtgtattcatgccaataggaatcgttctccagccctggatgggcagtgccgcaatggcagcttctagtgtcagcgtggtgcttagtagcctgcaactgaagtgttataagaaacctgatctggagcgttacgaagcccaagcccacgggcacatgaaacctctgactgctagccaagtgagtgttcatattgggatggacgaccggtggagggattctcctcgcgcaacaccttgggatcaggtctcgtacgttagtcaagtgagcttgagttcactgacctcagataagccctctcggcattcagctgccgcagatgacgacggcgataagtggtccttactcttgaatgggagggatgaggagcagtacatctag

SEQ ID NO: 280090 - DNA, 4398 bp, Artificial Sequence
  derived and/or modified sequence
atgcccgagcaggaaagacagataaccgcacgggagggcgcctctaggaaaattcttagcaagctgtcactacctacaagggcttgggagcccgcaatgaagaagtcattcgcttttgacaacgtcggctacgaggggggactggatggtctcggtccaagcagccaagtcgcaaccagcaccgtgcgcatcctcggaatgacgtgtcagagctgtgtgaaaagcatcgaggaccgcatcagcaacttaaagggcattatttctatgaaggtgtctttagagcagggaagtgccactgttaaatacgtgcccagtgttgtgtgcctgcagcaagtgtgtcaccagatcggcgacatgggattcgaagcctcaatagccgagggtaaagccgcgtcctggccctccaggtccctcccagcccaggaagctgtcgtaaaactcagggtagaagggatgacttgccagagttgcgtctcatcgatcgaaggaaaagttcgcaaattgcaaggcgttgttcgggtcaaggtgagtctctccaatcaagaagctgtaattacgtaccaaccctaccttatccagccagaggacctcagggaccacgttaatgacatgggattcgaggcggccattaaatccaaggttgcgccgctgtctctgggccctatcgatatcgagcgcctccagagcacaaatccaaagagaccactgtccagcgctaatcagaatttcaataacagtgaaacactggggcaccagggctcacacgtggtaaccttacaactgcgtattgacggaatgcactgcaaaagctgcgtgttgaatatagaggagaatatcggacagttactgggtgtgcaatcaatccaagtgagcctggaaaacaaaactgcccaggtgaaatatgacccgtcttgcaccagccccgtcgccctgcaacgggcaatcgaggccctccctcctggaaattttaaggtttcactgcctgacggtgctgagggcagcggcacagatcaccggtcttcttctagccactcaccaggctcccccccaagaaatcaagtacagggaacttgctctaccacactaatcgcgatagccggcatgacctgcgcttcttgcgtccactcaattgagggtatgatcagtcagctcgaaggggttcagcagatcagcgtcagcttggcagagggcacagccaccgtgctttacaatccgtccgtcatctcgccagaagagctccgggctgcaattgaagacatggggtttgaagcctccgtcgtcagtgagagctgtagtactaaccctttggggaatcacagtgccgggaatagcatggttcagaccactgacgggacgccaacaagtgtgcaggaggttgccccccacactggaagactgccagcgaaccacgcacccgatattctcgcaaagagcccccaaagcacccgggctgtcgccccccaaaaatgcttcctccagataaaaggaatgacatgcgcatcatgcgtatcaaatatcgagagaaatctgcaaaaagaggccggggtgctgtcggtgttggtggccctcatggctgggaaggcagagatcaaatatgaccctgaagtgatccaaccgctggaaatcgctcagttcattcaggatttgggctttgaggccgctgtgatggaagactatgccggatctgatgggaatatcgagctgactatcactgggatgacctgcgctagctgcgtgcataacattgagagtaagttaacccgcactaacggcattacttatgcttcagttgccctggccacttccaaggcgttagtaaagttcgaccccgaaattattgggccccgagatatcatcaaaattatagaggaaattggattccacgcttcccttgctcagagaaatcctaatgcacatcacctggatcacaagatggaaattaaacaatggaaaaagagctttctgtgtagcttggtcttcggaataccagtgatggccctcatgatctacatgctcattccttctaatgagcctcaccagagtatggttctggatcacaatattattcccggattatcaattctcaatttgatcttttttattctttgtaccttcgtgcagctgctaggaggatggtatttctacgtccaagcctacaagtcacttcgacaccgcagcgcgaatatggacgttctgatcgtgctggctacttcaatcgcatacgtgtatagtctagtgatcctggttgttgctgtggccgagaaagcggagagatcccctgtcacgtttttcgatacacccccaatgttgtttgtcttcatcgcgctaggccgttggctcgaacaccttgcaaagtcaaagacctcggaggccctcgccaagttaatgtccctgcaggcaaccgaagcgaccgttgtgactttgggcgaagacaatcttatcataagagaggaacaagtcccaatggaactggtgcagcgcggggacatcgtcaaggtcgttccaggaggaaagtttcctgtggatggcaaggtcctagaggggaataccatggcagatgagtcccttatcaccggtgaggcaatgcccgtaactaagaaaccaggatccacagtaattgcaggtagcatcaatgcccatggctccgtcttaataaaggccacccatgtcggtaatgatactaccctcgctcagattgttaagctcgtggaagaagctcagatgtctaaagcccccattcagcagctagcggacaggttttccggctactttgtgccttttattattataatgagcacactcacactggtcgtgtggatcgtgataggtttcattgacttcggggtagttcagcggtattttccaaaccccaataagcatatcagccagacagaggtgatcatccggttcgcattccagacctccatcacagtgctctgtatcgcatgtccttgctcactgggactagctacccctacagctgtcatggtgggcacaggcgtggctgcgcagaacgggatcttgattaagggaggcaaaccactggagatggcccacaagattaagaccgtgatgtttgataagactgggacaatcacacacggcgtgcccagggtgatgcgagtactcttgctcggagacgtcgcgactcttcctctacgcaaggtactcgctgtagtgggcactgcggaagccagcagcgagcacccccttggagtggctgtgaccaaatattgcaaggaggagctgggaaccgagacgttaggctactgtacagactttcaggctgtaccaggttgtgggatcgggtgcaaggtgagtaacgtagagggaattctggcccactccgaaaggccgttgagtgcccccgcatcccaccttaatgaggcaggatcactacccgccgaaaaagatgccgtccctcaaacgtttagcgttcttataggaaatagagaatggctcaggcggaacggattgaccatcagttccgatgtgagcgacgccatgaccgatcatgagatgaaagggcagactgcgatcttagttgccattgatggcgtgctgtgtggaatgatcgcaatcgcggacgccgtgaagcaggaagcagctctggcggtccacaccctccagtctatgggggtggacgttgtgctcataacaggcgacaaccgcaaaacagcacgagccatagccacccaagtcggaattaacaaagtattcgctgaagtgcttccctcccataaagttgccaaagtgcaggagctgcagaacaaaggcaagaaggtggccatggtgggtgatggagttaatgattcacccgctcttgcccaagcggacatgggggtggccatcggaaccgggactgatgtagcaattgaggccgcagatgtggtgctcatacgaaacgacctgctggacgtggtagcctctatacatctgagcaaaaggactgtccgaagaataagaatcaatctcgttcttgccctgatttataatttggtcgggatccccatcgctgcgggagtgttcatgccgatcgggattgtcttacaaccatggatgggaagcgccgcgatggccgccagctctgtgagcgtggtgctgtcatcccttcagctgaaatgttacaaaaagcccgacctagagcgctatgaggcccaagctcacggacatatgaaacctctaacagccagccaagtgtcagtccacatcggcatggacgataggtggcgcgattcaccgagggctaccccttgggaccaggtctcctatgtgagccaggtctccctgtcgagcctgacctccgacaagccatctcggcatagtgccgcagccgacgacgatggtgacaagtggagtctgcttctgaacggtagagacgaagagcaatatatctag

SEQ ID NO: 280091 - DNA, 4398 bp, Artificial Sequence
  derived and/or modified sequence
atgcctgagcaagagcggcagattacagctagagaaggagcaagtcgtaaaatactgagtaaactcagcttgccaactagagcctgggaacccgccatgaaaaaatcattcgctttcgataacgtcggctacgaagggggactagacggcctcggaccgagctctcaggtcgcgaccagtaccgttcggatcctgggaatgacctgtcaaagttgtgtgaaatccatcgaggaccgtatctctaacttgaaaggtattatctcaatgaaagttagtcttgaacagggttctgcaactgtcaagtacgtaccctccgttgtgtgtcttcaacaggtgtgccatcaaatcggggatatgggtttcgaggcttccatcgctgagggaaaggctgccagctggcccagccgctcacttcccgcacaggaggccgtagttaagctgagggtcgagggcatgacatgtcaatcatgcgtgagtagtatagagggaaaagttcgaaagttgcaaggagtcgtgagagtgaaagtcagtctgagcaaccaggaagccgttataacttaccagccgtacctaatccaaccggaagatctcagggaccatgtaaacgatatgggtttcgaagctgccatcaagtctaaagttgcccctctgagtctgggacctatcgatattgaacgtcttcagagtacaaatccaaaaagacccctgtcatccgccaatcaaaacttcaataacagtgagacactgggacaccagggatctcacgtggttaccctacagctgaggattgacggtatgcattgcaaatcttgtgtattgaatatagaggaaaatattggtcagcttctgggagtacagtcaatccaggtttccttggaaaacaaaaccgctcaagtgaaatatgacccatcatgcacatcccccgttgccctgcaacgcgccatcgaagccttgccacccggaaatttcaaagtaagcctccccgatggggcggaaggctcaggcaccgaccataggtcttccagctctcactcacctggaagccccccccgaaaccaggttcagggcacgtgcagcaccaccttaatcgctatcgccggtatgacttgtgcctcatgtgtacactctatcgaagggatgataagccaactggagggcgtacagcagataagcgtctccctcgctgaagggaccgcaaccgtcctctataatccgtctgttatttctccagaagagttacgtgcagcaattgaggatatgggatttgaggctagtgtagtgtccgagtcttgctctaccaacccacttggcaaccattcggccggtaacagcatggttcagacaacagacggtacaccaacttccgttcaagaggtggccccacacaccggacgtctgccagctaatcacgcccctgatattctggccaagagtccccagtcgacccgcgcagttgccccgcagaagtgcttcctgcagattaaaggaatgacgtgcgctagctgtgtgtctaacatcgaaaggaatttgcagaaggaggctggtgtccttagtgtgctggtcgcgctcatggcaggtaaagcagaaatcaaatacgatccagaggttatccagccattggagatcgcacagttcatacaggacttaggattcgaggcagctgtaatggaagattatgccgggtcagatggaaatatcgagctcaccatcaccggaatgacatgcgcctcctgtgtccataacattgaatcaaaactcacacgaaccaacggcattacgtacgcatccgtcgctctcgccacttccaaagccttagtcaagtttgatccagaaattatcggcccacgtgatattattaaaatcatcgaagaaattggcttccacgcctctctagcccaacgtaatccgaacgcccatcacctggatcacaaaatggagatcaaacaatggaaaaagagtttcttgtgcagtctcgtgttcggaattcccgtgatggcactaatgatatatatgctgattccctccaacgagccgcatcaatctatggtactggaccacaacattattcctgggctttccattctcaacctaatcttttttattctttgtaccttcgtgcagctgctaggaggatggtatttctacgtccaagcctacaagtcacttcgacaccgcagcgcgaatatggacgttctgatcgtgctggctacttcaatcgcatacgtgtatagtctagtgatcctggttgttgctgtggccgagaaagcggagagatcccctgtcacgtttttcgatacacccccaatgttgtttgtcttcatcgcgctaggccgttggctcgaacaccttgcaaagtcaaagacctcggaggccctcgccaagttaatgtccctgcaggcaacggaagcgaccgttgtaaccctgggtgaggataatctgataattagggaggaacaggtccctatggaactcgtgcaaagaggcgatatagtgaaggtcgtcccaggaggcaagttcccggtcgacggtaaggtgttggaaggcaataccatggctgatgaatcactgatcaccggagaggcaatgcctgttaccaagaagcctggtagtaccgtgattgctggtagcataaacgcccatggatccgtgttaattaaagccacacatgtaggtaacgacactaccctagctcagatcgtcaaactcgtcgaagaggcccagatgtcaaaagctcccatacaacaactggccgataggttttcaggctactttgttccgtttatcattatcatgtctactcttacactcgttgtctggatcgtgatcgggtttatagacttcggggtagtacagagatacttccctaatccgaacaagcacatcagtcaaacagaggtgatcataagatttgcgtttcaaacctctataaccgtcttgtgcattgcctgcccctgctcactcggactcgcgacccctaccgccgtgatggttggcacgggcgtcgctgctcagaatggaatattgatcaagggggggaagccacttgagatggctcataaaataaagactgtgatgttcgataaaaccggaacaattacacacggtgtacctcgggtgatgcgggtcctgctcctgggcgatgtagcaacccttcccctgcgcaaggttctagccgtagtaggtacagccgaagcatcaagtgagcatcctctgggcgttgccgtgaccaagtattgcaaagaagagctgggcacagagaccctcggatactgtacagactttcaagccgttccaggttgcgggattgggtgtaaggtgtctaacgtcgaagggatcctcgcccacagtgagcgtccgctgagtgctcctgcttctcatctcaacgaggccggctctttacccgcggagaaagacgccgtcccccagacattctccgtgcttattggaaatagggaatggttacgcaggaatggcctgacaatttcatctgacgtttccgatgccatgactgaccacgagatgaaagggcagacagcaattctggtcgcgatcgatggagtcctgtgcgggatgattgctattgcagatgccgtgaagcaggaagccgctctggctgttcacactttgcagagcatgggcgtagatgtcgtcttgattacaggtgacaatcggaaaacagcaagagctatagcaacacaagtgggcattaataaggtatttgccgaggtcctcccatcccataaagtcgccaaggtacaggagctgcagaacaaaggcaagaaggtggccatggtgggagatggcgtaaatgactcacctgccctagctcaagccgacatgggcgtcgcaatcggcacaggcacagatgttgctattgaagcagccgacgtcgtcctaatcagaaatgatctactggatgtcgtggcttctatccacctttctaaaagaaccgtgcgccgaattcggatcaacctggtactggcactcatttacaatttggtgggcattccaatcgcagccggagtattcatgcccataggaatcgtgcttcagccatggatgggttctgcagcaatggccgcgtcaagtgtttcagtggtgcttagttccttgcaactgaagtgctataagaaaccggatctggaaagatacgaggcacaagcccacggccacatgaaacctctcaccgcttctcaagtctcagtgcacatcggaatggatgacaggtggagagattccccccgcgcgaccccttgggatcaagtatcctatgtaagccaagtgtcgctttcaagcctgacctctgataaaccaagcagacattccgccgctgctgatgacgacggagataagtggtccctactactcaatggacgggacgaggaacaatatatctag

SEQ ID NO: 280092 - DNA, 4395 bp, Artificial Sequence
  derived and/or modified sequence
atgcctgaacaagaacgacaaattaccgccagagagggcgcgtcacggaagatcctctctaagctttccctcccgacgagggcctgggaaccggccatgaaaaagtccttcgccttcgacaacgtcggctatgaaggagggctcgacggactgggaccctcctcacaagtcgccaccagtaccgtccgtattctcggaatgacatgtcagtcttgtgtcaagagtatcgaggatcggatctcaaacctgaaggggattatctccatgaaagtatccctggaacagggttccgccacagtgaagtatgtgccttcagtggtttgcctacagcaggtatgtcatcagatcggggatatgggctttgaagcatccatcgccgagggcaaggcggcatcgtggccgagccgctcactcccagcccaggaggctgtggtgaaacttcgcgtggaggggatgacctgccaaagctgtgtttcttctatcgagggaaaggtgcgaaagttacagggagtcgtccgtgtgaaggtgtcactgagcaatcaggaggctgtgatcacataccagccctacctcatccagccagaagacctgcgggaccacgttaatgacatggggtttgaggccgccataaagtcaaaggtggcaccactgtcacttggaccaatcgacatcgaacgcctgcaaagtaccaaccctaaacgacctctctcctcggccaatcagaatttcaataattcggagaccctgggacatcaggggagccatgtggtgacactacaactgcggatcgacgggatgcactgcaagagttgtgtactcaatatcgaggaaaacatagggcagctgctgggagtgcagagcatccaagtatctctggaaaacaaaacagcccaggtaaaatatgaccccagttgcacaagccccgtggcgttgcagagggctattgaggcacttcccccgggcaatttcaaggtctccttaccagacggcgccgaaggatcagggactgatcacagatccagtagtagtcatagccctggtagccccccacgcaatcaggtccaaggcacgtgctctacgaccttgatcgctattgccggaatgacctgtgcaagctgtgtacacagtattgaagggatgatctcccagcttgaaggagttcagcaaatctcggtttctcttgccgaaggcactgctacggtgctgtataatcccagcgtgatatctcccgaagagttgcgagccgctatcgaggacatggggttcgaagctagcgttgtcagcgaaagctgtagtactaaccccctgggcaaccacagcgccggaaatagtatggtgcagacgaccgatggtacaccaacctcagtgcaggaagtggctccccacactggtcggctgccggctaatcacgctcctgatattctggccaagtcccctcagagcaccagagccgtggctccccagaagtgtttcctccagatcaaaggcatgacgtgtgcgtcctgcgtctcaaatattgaaagaaatttgcaaaaagaggccggtgtgctgtctgtgctggtggctcttatggctgggaaagctgagattaaatacgatcctgaggtcatccagcctttggagattgctcagtttattcaggacttaggattcgaggcggcagtgatggaagattacgctgggagcgacgggaatatagaacttactattactgggatgacgtgtgcaagctgtgttcacaacattgagagtaagctgacccggaccaacggcatcacctatgcttccgtagccttggccaccagcaaagccctggttaagtttgacccggaaattatcggacccagagatatcatcaaaattatcgaggagatcggattccatgctagcctggctcagcggaacccgaacgcacaccatcttgaccacaagatggaaattaagcagtggaagaaatcatttttatgttcactggttttcgggattccagttatggcactcatgatctacatgttgataccttcaaatgagccccatcaaagtatggtccttgaccacaacatcatacctggtctgagcatcctcaacttgatttttttcattctttgtacctttgtgcagctcttaggcggatggtacttctatgtccaagcctacaaatcactgaggcacagatcagctaacatggatgtcctgattgtcctcgccacgagtatcgcatacgtgtacagcctggtgattcttgttgttgctgtcgcggaaaaggcagagagatcacccgttaccttctttgacacacctccgatgttgttcgtgttcatcgcattgggaagatggttagagcatctggccaagagtaaaacctccgaggccctagctaaactcatgagtctgcaggcgacggaggctactgttgtgaccttgggcgaagataacctgattattcgagaggaacaggtgcccatggagctggtgcagcgaggcgatatcgtgaaagtcgtcccagggggcaaattcccggttgatggaaaagtgttggagggaaacacaatggctgatgagtctctgattaccggcgaggctatgccagttacaaagaaaccgggtagtacggttattgctggatcgatcaacgcgcatggctccgtgctgatcaaggctacacacgttgggaatgacacaacattggcgcagatagtgaaactcgtggaagaagcacagatgagtaaggcacccattcagcagttggccgaccgcttttccggctatttcgtcccctttatcatcatcatgagtactctcaccctagtagtgtggatcgtgattggatttatcgactttggcgtcgtgcagcgatacttcccgaacccgaacaagcacatttcacagactgaagtaatcatcagatttgcttttcagaccagcatcacggtgctgtgcattgcttgcccatgtagtctgggccttgcgacccccactgctgtgatggtcggcaccggtgttgccgcccagaacggtatcttgatcaaaggggggaagcctctcgaaatggctcataaaattaaaaccgtgatgttcgataaaactgggaccataacccatggcgttccccgggtaatgcgggtcctcctgctcggggatgtggccacactgcccctgaggaaagtactggcggtggttgggacagccgaggcctcgagcgagcatcccctcggcgtcgccgtcactaaatactgcaaagaagagctgggtacggagacactgggttactgtaccgattttcaagctgtcccaggctgcgggataggatgtaaggtgagcaacgtggaggggatccttgcgcacagtgagcgcccactgtccgcacccgcctcacatttaaacgaggccggcagtctgcccgcagaaaaagatgcagtgcctcaaacttttagcgtgttgattggtaacagagagtggctgcgccggaatggattaactattagcagcgacgttagtgatgctatgactgaccatgagatgaaaggacagaccgccattttagttgcaatcgatggcgtgctgtgtggcatgatcgcgattgctgacgccgtcaagcaggaggccgcactggccgtgcacaccctgcagtcaatgggggtggatgtggtcctgattactggcgacaacaggaagacggcccgcgccatcgccactcaagttggaatcaataaggtctttgccgaagtgctgccatctcacaaagtggcgaaagtccaggagctgcagaataaaggcaagaaggtggctatggtcggtgacggtgtgaacgacagccctgccctggcccaggcagacatgggcgtcgccattggtacaggaacggatgttgcaatcgaggccgctgatgtagtgctgatacggaatgacttgttggacgtggtggcttctatccacctcagtaagcggacggtgcgccgcatcaggatcaatctggtcctggcgttgatttataatctggttgggatccctatcgccgcaggtgtgtttatgcccataggcatagtcctccagccatggatgggatctgctgcaatggccgccagctcagtgtctgtggttctttcatctctgcagcttaagtgctacaagaagccagacttggagaggtatgaagcacaggcccacggtcatatgaagcctctgactgccagccaggtgagcgtgcatatcggtatggacgaccgctggcgcgatagtcctcgcgcgacaccctgggaccaggttagttatgtcagccaagtcagcctctcttcactgactagcgacaagccttcaagacacagcgccgcagccgacgacgacggcgacaagtggtcactgctattgaacgggcgcgacgaggagcagtacatt

SEQ ID NO: 280093 - DNA, 4395 bp, Artificial Sequence
  derived and/or modified sequence
atgccagaacaggaaaggcagatcaccgcgagagagggggccagccggaagatcctttccaagctgtcgcttccgacccgcgcatgggaaccggcgatgaagaagtcatttgctttcgataacgtggggtacgaaggaggactggacggccttggaccctcttcacaagtcgctacctccactgtgcgcattctcggaatgacgtgtcaatcgtgcgtgaagtcgattgaagatagaatttcaaaccttaaaggcatcatatctatgaaagtgtcgcttgagcagggctcagccactgtgaaatacgttccgtctgtggtgtgcctgcaacaagtgtgccatcaaatcggagacatgggcttcgaggcctccattgcggaagggaaggctgcttcatggccgtcgcgcagcctgcctgcccaagaagctgtggtgaagctgcgcgtggaagggatgacttgtcaatcctgcgtgtcgtctatcgagggaaaggtgaggaagctgcaaggggtcgtgagagtcaaggtgtccctgagcaaccaggaggccgtcatcacttaccaaccttacttgatccagccggaggacctgcgggaccacgtcaatgacatgggattcgaggcggcgatcaaatccaaggtggcaccactctccctgggaccgatcgacatcgagcgccttcagtcgaccaaccctaaacggccgttgtcgtctgctaaccaaaactttaacaatagcgaaacgctgggacaccaaggatcacacgttgtgaccctccagctcagaatcgacggcatgcattgcaagagctgtgtgcttaacattgaagaaaacatcggtcaattgctgggagtccagtccatccaggtcagtctggagaataagacggctcaggtcaagtacgacccatcatgcacctcccctgtcgcgctgcaaagagcaatcgaggctctccccccgggtaatttcaaagtgtccttgccagatggcgctgaaggctccggaaccgatcatcggtcaagctcctcacactcgcccggatcgccgccaagaaaccaagtgcagggaacctgctcgaccaccctgattgctattgcgggaatgacgtgcgcctcatgcgttcactccatcgaagggatgatctcacagctggaaggggtccagcagatcagcgtgtcactggccgagggcactgcgaccgtgctgtataacccgtcggtcatctcacctgaagaacttcgggctgctatcgaggacatgggatttgaagcatcagttgtctcagaatcctgctcaactaacccactgggaaaccattcagcagggaattccatggtccagactacggacggaaccccgacctcagtgcaggaagtggccccgcataccggcagactgcccgctaaccatgcaccggacatcctggcaaagtcaccacagtcaactagagcggtggcgccgcagaagtgttttctccaaatcaaaggcatgacttgcgcaagctgcgtgtccaatatcgagcgcaacctgcagaaggaggcgggagtgctgtcggtgctcgtggccctgatggcgggcaaggccgagatcaaatacgacccggaggtgatccagcccttggaaatcgcgcagttcattcaggaccttgggttcgaagcggctgtgatggaggactacgccggctccgacggaaacatcgaactgactatcacggggatgacctgcgcgtcgtgcgtgcataacattgaatccaagctcaccagaactaacggaatcacctacgcctccgtggcgcttgccacttcaaaggccctggtgaagttcgacccggagatcataggcccccgcgacatcatcaagattatcgaagagattggcttccacgcttctttggcgcagcgcaaccctaacgcgcatcacctggaccataagatggaaatcaagcagtggaagaaatcgttcctctgctcgcttgtgttcggaatcccggtgatggcattgatgatctacatgctgatcccgtctaatgagccgcatcaaagcatggttctcgaccacaatatcatccctgggctctcgatcctgaatctcatcttcttcatcctgtgcacgttcgtgcagcttctgggaggatggtacttctacgtgcaggcttacaaaagcctccggcacagatcggcaaatatggatgtgctgatagtgctggccacttcgattgcctatgtgtattcactggtgatcctggtcgtggcggtggcagagaaggcagagaggagcccggtgacgttcttcgacaccccgccaatgctgtttgttttcatcgctctgggacggtggttggaacatctggccaagtccaagacttccgaagctctggcaaagctcatgtcactccaggccaccgaagcgaccgtggtcactctcggagaagataacctcattatccgagaagaacaagtgcctatggagttggtccagagaggggacattgtgaaggtggtgccgggcgggaagtttccggtggatgggaaggtgctggagggcaacaccatggcggacgaatctctgatcacgggagaagcaatgcctgtgactaagaagccagggtcgaccgtcatcgccggaagcatcaacgcacacggttcggtcctcattaaggcaacccacgtcggaaacgacaccactttggcacagattgtgaagctcgtggaagaagcccagatgtcgaaggccccaatccagcagctggccgatcggttctccggatacttcgtgccgtttatcatcataatgtcaaccctcactctggtcgtgtggatcgtcatcggttttatcgacttcggagtggtgcagcggtacttcccgaatcccaataagcacatctcccagactgaagtgattattcgctttgccttccaaactagcattaccgtcctgtgcatcgcctgcccatgctcgctgggattggctacgccgaccgccgtcatggtgggcactggtgtggccgcccagaacggcatcctcattaaaggaggcaagccactggaaatggcccacaaaatcaagactgtgatgtttgataaaaccgggacgatcacccacggagtcccacgcgtgatgcgcgtgctgctcctcggagatgtggctactctccctctccggaaggtgctcgctgtggtcggcacggcggaagccagcagcgaacatccgctgggagtggctgtcactaaatactgcaaagaagagctggggaccgaaaccctggggtactgcaccgacttccaagcggtgccgggctgcggaatcggatgcaaggtgtccaacgtggaaggaattctggcacattcagaacgcccgctgtcggcccccgcctcgcacctgaatgaggcaggatccctcccggccgagaaggatgccgtgccgcagactttctcagtactcatcggcaacagggaatggctccgccggaatggactcactatctcaagcgacgtgtcggacgcgatgaccgaccatgaaatgaagggtcagaccgcgatcctcgtggctatcgatggagtgttgtgtggcatgatcgcaatcgctgatgccgtgaagcaggaagcggcgttggcggtccacaccctccagtcgatgggagttgatgtggtcctcatcaccggagacaacaggaaaaccgcccgcgccatcgctactcaagtcgggatcaacaaggtgttcgctgaagtcctcccctcacataaagtcgctaaagtccaggagctgcaaaacaagggaaagaaggttgcgatggtgggcgatggagtcaacgactcgccggcgttggcccaagccgatatgggagtggccatcggaaccggaacggatgtggccattgaagccgccgacgtggtgctcattagaaatgatctcctggacgtggtcgcgtcaatccacctctcaaaacgtactgtgcggcggatccgaatcaatctcgtgctcgcactcatctacaacctcgtcggaattccaatcgccgccggagtgttcatgccgatcggaattgtgctgcaaccgtggatggggtcggcggctatggccgcctcaagcgtctcggtcgtcctgtccagcctgcagctgaagtgctacaagaaaccggatctggagagatacgaagcgcaggcccacgggcacatgaagcctctgacggcgtcgcaagtgtccgtccacatcggaatggacgaccgctggcgggattcaccgcgggcaactccgtgggaccaagtttcctacgtgtcacaagtgagcctgtcctccctcacctcggataagccatcacgccatagcgcagccgcggacgatgatggggataagtggtcgctgctgctgaacggacgtgatgaagagcaatacatt

SEQ ID NO: 280094 - DNA, 4395 bp, Artificial Sequence
  derived and/or modified sequence
atgcctgagcaagagcgccagatcaccgcaagagaaggagccagcagaaagatactttcaaaacttagccttcctactcgtgcctgggagcccgcgatgaaaaagagctttgcctttgataatgtgggatacgaaggggggttggacgggctgggtccctccagccaagtggcaacctctaccgtgagaattcttggtatgacctgccaatcctgtgtgaaatcgattgaagatcgaatatccaaccttaagggtatcattagcatgaaggtatcactggaacagggctcagcaactgtgaagtacgtccctagcgtggtgtgtttgcagcaggtatgtcatcagatcggagatatggggttcgaagcatccattgcggagggaaaggcggcttcctggccaagcagatccctcccggcacaagaggccgtggtgaaactgcgggtcgaggggatgacctgccagtcgtgtgtgtcgagcatcgaaggaaaggtcagaaagctccaaggcgtcgtgcgagttaaggtgtcactgtcaaaccaggaagccgtcatcacttaccaaccttacctcatccagccagaagatttgcgggatcacgttaacgatatgggatttgaagctgcaatcaagtctaaagtcgctcccctctccctgggacctattgatatcgaacggcttcaatcaactaaccctaagcgccctctgtcgtcagctaatcagaatttcaataacagcgaaactcttggacatcaggggtcccatgtcgtgactctgcagctgagaatagacggaatgcattgtaagtcatgcgttcttaacatcgaagaaaacattggacagcttctgggtgtccagagcatccaagtgtcacttgagaacaagactgcccaggtgaaatacgatccctcatgtacttcccctgtggcactgcaaagggccattgaagcacttccccccggaaacttcaaggtgtccctgcctgatggagcggaaggctccggaactgatcatcggtcatcgtcgtcccactcgcccggctccccaccacggaatcaagtccaaggtacttgcagcaccactctgattgcaattgcaggtatgacctgtgcgtcgtgcgtgcattccatcgaaggtatgatctcccaacttgagggggtgcagcaaatctccgtttcgcttgccgaaggtaccgctacggtcctgtacaatccaagcgtgatttccccagaagagcttcgggcagcgattgaagatatgggcttcgaagcgtctgtcgtgtcggagtcatgctcgacgaacccactggggaaccacagcgccggaaactcgatggtgcaaactactgacgggacccccacctcagtgcaagaagtcgcccctcataccgggagactcccagcaaaccacgcgcctgacatcctggcaaagtcaccccagtcgacgagggcagtggcgccacaaaagtgtttcttgcaaatcaagggaatgacctgtgccagctgcgtgagcaacatagaaagaaatctgcaaaaggaagcgggggtgctctccgtcctcgtcgcacttatggcagggaaagctgagattaagtatgacccagaagtgattcaaccgcttgaaattgcccaattcattcaagaccttggttttgaagcagcagtcatggaagattacgctggatcagatggcaacatcgagctgaccatcactggaatgacctgcgcatcgtgtgtgcataacattgagtcgaagctgactcgaaccaacggtataacttacgcatcagtggccctggcaacttccaaggcacttgtgaaatttgatccggagattatcggtcctcgggatatcatcaagataatagaagaaattggatttcatgcctcgcttgcgcagcgaaaccctaacgcacatcacctcgaccacaagatggagattaaacagtggaagaagtcattcctttgtagcttggtgtttggaatcccggtgatggctctgatgatttacatgcttattccctccaacgaacctcaccaatccatggtgctggatcataacatcatacccggcctgtcgatcttgaatttgatctttttcatactgtgcactttcgtgcagcttcttggcggctggtacttttacgtgcaggcatacaaaagcctcagacaccggtcagcaaacatggatgtgctgattgtgcttgcaacttccatcgcgtacgtctattcacttgtgatccttgtcgtggcggtggccgagaaggcagaaagatcgccagtgactttctttgatacgccccctatgctttttgtgttcatagcacttggaagatggcttgaacaccttgccaagtccaagacctcggaagccctggcgaaacttatgtcacttcaggccaccgaagcaaccgtggtgactctgggtgaggataatctcattatccgagaagaacaagtgcctatggaactcgtgcagaggggggatatcgtcaaggtggtgccaggaggcaagttcccagtggacggtaaagtgctggaaggaaatactatggcagacgaatccttgattaccggagaagcaatgcccgtcactaagaagcctgggtccacggtgattgcaggttccattaatgcccatggtagcgttttgattaaagcaactcatgtgggaaatgacaccactttggcccaaattgtcaaacttgtggaagaagcgcaaatgtcaaaggcgcctattcagcaactggctgaccgtttttccgggtactttgtgccctttatcatcattatgtccactctcaccttggtggtgtggatcgtcattggctttattgacttcggcgtggtccaacgatactttccaaacccgaataaacatatttcacaaacggaagtgattattcggttcgcattccagaccagcatcactgtcctttgcatcgcatgcccttgttcgcttggcctcgcaaccccgactgcagtgatggtcggaactggagtcgccgcgcagaacggaattctgatcaaagggggtaaacctttggaaatggcacacaaaatcaagactgtcatgttcgataagactggcaccattactcacggcgttccaagagtcatgagggttctgcttcttggtgatgttgcgaccctgcctttgaggaaggtccttgcagtggtgggaacggcagaagcgagttcggagcacccgttgggcgtggccgtgaccaaatactgtaaagaagaactgggaaccgaaactttgggttactgtactgattttcaggcggtcccaggttgtggtatcggttgtaaagtctccaacgtggagggcatcctggcgcatagcgagcgccctcttagcgcacctgcgagccacctcaacgaagcaggctcgcttccagcagagaaggatgcagtcccacaaactttttcagtgcttatcggcaatagagaatggcttcgccgtaacgggcttaccatctcaagtgacgtctcggatgctatgaccgaccatgagatgaagggccaaaccgcaattctcgtcgccatcgacggggtcctttgtggcatgatagcgatcgccgacgcagtgaaacaggaggcagcactggctgttcatacgctccaatcgatgggagtcgatgtggtgctgattaccggggataaccggaaaaccgcacgagcgatagcaactcaagtgggtataaacaaggtattcgcagaggtcctgccaagccacaaggttgcgaaggtccaagaactgcagaacaagggtaagaaagttgcaatggtcggagacggcgtgaacgattcaccagcactcgcacaagcagatatgggagtggcaattggaaccgggactgatgtggccatagaagcagccgatgttgtgctcattcggaacgacctgctcgatgtcgtggccagcattcacctgtcgaaaagaaccgtccgcagaattaggatcaatctcgtgctggccttgatttacaatctcgtgggaattccaattgcagctggtgtattcatgccaatcgggatcgtgcttcagccatggatggggtccgccgccatggcagcgtcctcggtgagcgtggtgctttcgtctctgcaacttaaatgttataagaaaccggatctggaaagatacgaggctcaagcacacggacacatgaaacctcttactgccagccaagtctcggtccatataggcatggatgataggtggcgtgactcacctcgagccactccgtgggatcaagttagctacgtgtcgcaagtctcccttagctcacttacctcagacaagccatccagacatagtgccgcagcagatgatgacggtgataaatggtcgctccttctcaacggaagagatgaggaacagtacatc

SEQ ID NO: 280095 - DNA, 4395 bp, Artificial Sequence
  derived and/or modified sequence
atgccggaacaggaacggcagattaccgcgcgggagggggcctcgcgcaaaatcctgtctaagctgagccttccgacgcgggcgtgggagcctgcaatgaaaaagtcattcgcctttgacaacgtgggctacgaagggggcctggatggtctgggaccgtctagccaagtggcaaccagcaccgtccgcatcttgggcatgacttgtcagtcatgtgtcaagtcaatcgaggatcgaatttcaaacctgaagggaattatctccatgaaggtgtcgctggagcagggtagcgcgaccgtcaagtacgtgccatccgttgtctgcctccagcaggtctgtcatcagatcggagacatgggattcgaagctagcatcgccgaaggcaaggcggcttcctggccgtccagatcgctgcccgcgcaagaggccgtggtgaaacttagagtggaaggcatgacctgtcagagctgcgtgtcatcgatagaaggtaaggtcagaaagctgcaaggagtggtgagagtcaaagtcagcctctcaaaccaggaagctgtgatcacctaccagccgtacctgatccagcctgaggacctgagggaccatgtcaacgatatgggtttcgaagctgctatcaaaagcaaggtggcaccgctgtcactgggacctattgacatcgaaaggctgcaatcgaccaacccaaagcggccgctgtcgtccgcgaaccagaacttcaataactcggagactctgggtcatcagggatcgcacgtggtcactctccagctgcgcatagatggcatgcactgcaagtcgtgtgtgctgaacatcgaagagaatatcggccaactgctgggagtgcaaagcatccaagtgtcactcgaaaacaagactgcgcaggtgaaatacgacccatcgtgcacctcgcccgtggcgcttcaacgggcgatcgaggcgctgccgcccggcaacttcaaggtgtcgctcccagatggagcggaaggttcaggaaccgaccatcgctcgtcctccagccactcaccgggaagcccacctagaaatcaggtgcagggtacttgctccactaccctgattgccatcgccggaatgacgtgcgcgagctgcgtccattccatcgagggcatgatctcgcaactcgagggagttcagcaaatctctgtgtcgcttgctgaagggaccgcgactgtgctgtacaatccgtcagtgatctccccggaagagctgagagccgctatcgaggacatggggtttgaagcatcggtggtgtcggaatcctgctccaccaatccactgggaaaccatagcgcgggcaattcgatggtccagaccactgacggaacgcctacctcggtccaagaagtggctccgcataccggaaggttgccagctaaccacgcccctgacatcctggcgaaatcgcctcagagcacccgggcggtggccccgcagaagtgctttctccaaatcaagggcatgacgtgtgcttcgtgcgtctcgaatatcgaaagaaacttgcagaaggaggctggcgtgctgagcgtcctggtggcgctgatggccggtaaagctgagatcaaatacgaccctgaagtgatccagccactggaaatcgcgcagttcattcaggaccttggctttgaagccgcggtcatggaagattacgcagggtcagacggaaacattgagctgactatcactggaatgacttgtgcctcctgcgtgcataacatcgagagcaagctgacccgaaccaacggaatcacgtacgcctcggtcgcgctggcaacttccaaagctctggtcaaattcgaccccgaaatcatcggtcctcgggacatcataaagatcatcgaggagatcggatttcatgcttccctcgctcagagaaatccgaacgcccaccacctcgaccacaaaatggaaatcaagcagtggaagaagtccttcttgtgctccttggtgtttggcatcccagtgatggctctcatgatctacatgctgattccatcgaacgagccgcaccaatcaatggtgctggatcataacatcatcccaggcttgtcaatcctcaatctcatcttcttcattctgtgcactttcgtgcagttgctgggagggtggtacttttatgtgcaagcctacaagtccttgcggcaccggtccgcaaacatggacgtgcttatcgtcctggcgaccagcattgcgtatgtgtactcgctggtgatcttggtggtggcagtggcggaaaaggccgagagaagcccggtgaccttctttgatactccgccgatgttgttcgtgttcatcgccctgggacggtggctggagcatttggcaaagtccaagacgtctgaggctttggccaaactgatgtcactgcaagctacggaagccacggtcgtcactctgggtgaggacaacctgattatccgcgaagaacaagtgcctatggaactcgtccagagaggagacatcgtgaaggtcgtcccgggaggaaaattcccagtggacggaaaggtgttggaaggtaacactatggcagacgaaagcctcatcactggtgaggcaatgccggtgactaaaaagccgggctcgactgtgattgccggatcgatcaatgctcacggctcagttctgatcaaggcgacccacgtggggaatgatacgacccttgcacaaatcgtgaagctcgtggaagaagcgcagatgtccaaggcaccgatccaacaactggcagatcgcttctcaggatacttcgtgccgttcataatcatcatgtcgactctcaccctggtggtgtggattgttatcggctttatagacttcggagtcgtccagcgctactttccaaatcccaacaagcacatctcgcaaaccgaagtgatcatcagatttgccttccagacttccatcaccgtgctctgcatcgcctgcccgtgttcactcggtcttgcaacgccaacggcggtgatggtgggaacgggagtcgccgcgcaaaacggcatcctcatcaagggcggtaagccgctggagatggcgcacaaaatcaagactgtgatgttcgataagaccggtactatcacccatggcgtgccccgggtgatgagagtgttgctcctcggagatgtcgctactctgccactgcggaaggtcctggcggtcgtcggaacggccgaagcctcgtcagaacacccgcttggcgtcgccgtcactaagtactgtaaggaagaacttggaactgagacgttgggatattgcaccgacttccaggcagtgccagggtgcggaatcggatgcaaagtgtcgaatgttgaaggcatcctggcgcattcggagcggccgctgagcgcacctgcctcccacttgaacgaggcgggaagcctccctgctgaaaaggacgcggtgccacagaccttctcggtgctgatcggaaatcgggagtggctgcgccgcaacggactcaccatctcgtccgacgtgagcgacgccatgaccgatcacgaaatgaagggacaaaccgccattctcgtggccatcgacggcgtcttgtgcggcatgatcgccattgccgatgcggtgaagcaggaggcggctttggccgtgcatactcttcagtccatgggagtggacgtggtccttatcaccggtgacaataggaaaaccgctcgggcgattgctactcaagtgggcattaacaaagtgttcgcagaggtgctgccgagccacaaagtggctaaggtgcaggagctccaaaacaaaggaaagaaggtggcgatggttggggatggagtgaatgattcaccagcattggctcaggcggacatgggagtcgccatcggaaccggtaccgacgtggctatcgaggccgcggatgtggtcctcattcggaacgacctcctggatgtggtcgcttccatccacctgtcgaaaaggactgtgaggaggattagaatcaatctcgtgctggccctcatctacaatctggtgggaatcccaattgctgccggagttttcatgccgatcggtatcgtgctgcagccttggatgggctcggcagccatggccgcgtccagcgtgtcggtggtgctgtccagcctgcaactgaaatgctacaagaaaccggatctggaacgttacgaagcccaagcccatggacatatgaaacctctgaccgcctcacaggtcagcgtccacattgggatggacgatagatggcgcgattcaccacgtgcaaccccatgggaccaagtgagctacgtgtcccaagtctcgctctcatccctgaccagcgataaaccttcgcggcacagcgccgccgccgacgatgacggagacaaatggtcgctcctcctgaatggccgcgacgaagaacaatacatc

SEQ ID NO: 280096 - DNA, 4395 bp, Artificial Sequence
  derived and/or modified sequence
atgcctgaacaagagcgtcagatcactgcaagggaaggagcatccagaaagatactctcgaagttgtctcttccaaccagggcctgggagcctgccatgaagaagtcgtttgcatttgacaacgttggctacgaaggaggactggatggactgggaccttcgtcacaggtggctacttcaaccgtgaggatcctgggaatgacttgtcagtcatgcgtgaaatcgatcgaagataggatctcaaacctgaaagggatcattagcatgaaggtcagccttgaacaaggatccgcaacggtgaaatacgtgccttccgtggtgtgcctccaacaggtctgtcatcagattggtgacatgggtttcgaggcatccattgcagaaggcaaagccgcatcatggccatcgagatcactgccggctcaagaggcagttgtgaagctccgcgtggaaggaatgacctgtcagtcatgtgtgtcctcgatagagggaaaggtgcgtaagctccaaggggttgtgagagtgaaggtgtcactttcgaaccaggaagcagtgataacctaccagccttacctgattcagcctgaagatctccgggatcacgtgaatgatatggggttcgaagcggccattaagtccaaagtggcacctctgagcctgggaccgatagatattgagagactccagtccaccaatcctaagcgcccactttcctccgcgaaccagaatttcaacaacagcgaaacccttggccatcagggatctcatgtggtgactcttcaactcagaattgacggaatgcactgtaagtcatgtgtgctgaatattgaggagaatattggacaacttctgggtgtccaatcgatccaggtgtcactggagaacaagacggcacaagtcaagtatgatccaagctgcacgtcgcctgttgcacttcaaagagccatagaagcactgcctccaggaaactttaaggtgtccctcccggatggggccgaaggaagcggtaccgaccatcggtctagcagctcacattcgcctgggtcaccccctcgcaatcaggtgcaaggaacttgcagcactaccctgattgcaattgcgggaatgacctgcgcatcttgcgtgcattccatcgaaggtatgatctcccagctcgaaggggtccagcagatttcggtttcgctcgccgagggaaccgcgaccgtgctctacaatccgtcggtcatctcccctgaggagctcagggcggcaatcgaggacatgggatttgaggcaagcgtggtatccgaatcgtgtagcactaatccgcttgggaatcactccgcaggaaactccatggtccaaaccactgacgggaccccgaccagcgttcaagaagtggcaccacataccggcagactccctgccaaccatgcccctgacatccttgccaagtcgccacagagcaccagggcagttgccccacagaaatgctttctccagataaagggcatgacttgcgcgtcgtgcgtcagcaatatcgagcgaaacctccagaaagaagccggagtcctgtctgtgcttgtggctctgatggccgggaaggctgagattaagtacgatccagaggtcattcagccccttgagattgcccagtttatccaggatctgggattcgaggccgccgtgatggaagattatgcaggatcggacggaaacatcgagcttacgataactgggatgacgtgtgcgtcatgtgtgcacaatattgagtcgaagctgacgagaactaacgggattacttacgcatcggtggcactggcaactagcaaggccctcgtcaagtttgaccccgagataatagggcctcgggacattatcaagatcattgaggaaatcggatttcatgcatcgctcgcccaaagaaacccgaatgcacaccatcttgaccacaagatggagataaagcagtggaagaaatcgtttctgtgtagcctcgtgtttggaatacctgtgatggcacttatgatttacatgctcatcccttcgaatgaacctcatcagtcgatggtgctggatcataacatcatccctggactttccattcttaacttgattttctttatcctttgcactttcgtgcaactcctggggggttggtacttctacgtgcaggcctacaagtcccttcgtcatcgctcggcaaatatggacgtccttattgtgctggcaacgtccattgcttacgtgtactcgttggtgattcttgtcgttgccgtggctgaaaaggctgagaggtcccctgttacttttttcgacactccaccaatgcttttcgtgttcatagccctgggaagatggcttgaacacctggcaaaaagcaagacctccgaggctctcgcgaagctcatgtccctgcaggcgaccgaagccacggtagtgactcttggtgaagataatctcataattcgtgaggaacaggtgcctatggaactcgtgcaacgtggagatatcgtgaaagtggtccccgggggaaagttcccagtcgacgggaaagtcctcgaaggtaacaccatggcagacgaatccttgataaccggtgaggctatgccagtgactaagaagccaggatccactgtcatcgcgggttctattaacgcacatggcagcgtgctgatcaaggcaactcacgtgggcaatgataccaccctggcacaaatcgtgaaacttgtggaagaggcacagatgtccaaagccccaattcaacaactggcagatcgcttttccggttactttgtcccttttatcatcataatgtccactctgaccttggtggtgtggatcgtcattggtttcattgactttggtgtcgtccaaagatactttcctaaccctaacaagcatatttcacaaactgaggttatcattcgctttgccttccagacgtcaattacggtgttgtgtattgcttgtccctgttcgcttggtcttgccacgcctaccgcagtgatggtgggaacgggcgtggcagctcaaaacggtatcctcataaaagggggcaaaccccttgaaatggcacataagataaagacggttatgtttgataagaccggaactatcacccatggtgtgcccagagtgatgcgcgtcctgcttctgggagacgtggccactctgccactgagaaaagtgctggcagtggtcggcactgccgaggcatcatcagaacacccactcggtgtcgcagtgaccaagtactgcaaagaagagctcggtaccgaaaccttgggatactgtaccgactttcaggcagttccaggttgtggtattggatgtaaggtgagcaacgtcgaaggtattctggcacattcggaacggcccctgtccgcccccgcgtcgcatcttaatgaagcaggttccctgccagcggagaaagacgctgttccacagaccttcagcgtgcttattggcaaccgggaatggcttcgtaggaatgggctgactattagctcagacgtctcggacgcaatgactgatcatgaaatgaagggccaaaccgcaatcctcgtggccattgacggagtcctgtgtggtatgattgcaatcgctgatgccgtcaagcaggaagctgcgcttgcggtgcacaccctccaatccatgggtgtagatgttgtgctcatcactggtgataaccgaaagactgcacgggccattgcaacccaagtgggcatcaataaagttttcgcagaagtgcttcccagccacaaagtcgcaaaggtgcaagaattgcagaacaagggtaagaaggtggcaatggttggagatggcgtcaatgatagcccagcactggcgcaggcggatatgggtgtggcaataggcactggcaccgatgtggcgatagaggcagcagatgtggtgctgattcgaaacgacctcctggatgtagtggcatcgattcatctctccaaaaggaccgtcagaagaatccggattaatctcgtgcttgcgctcatctataacctggtcggtatcccgatcgcagcaggagtctttatgccaatcggcattgtcctgcaaccttggatgggaagcgcggccatggctgcgtccagcgtcagcgttgtcctgagctccctgcaacttaagtgttacaagaagcccgaccttgagagatacgaggcccaggcacatggacatatgaagccgctgactgcaagtcaggtgagcgtgcatatcggaatggatgataggtggagggacagccctcgggcgactccatgggatcaggtgagctacgtgtcccaggtgagcctgtcgtcattgacttccgataaaccttcaaggcactcggcagcggcagatgatgatggcgataagtggtcgctgctgcttaacggacgtgatgaagaacaatacata

SEQ ID NO: 280097 - DNA, 4395 bp, Artificial Sequence
  derived and/or modified sequence
atgcctgaacaggaaaggcagatcactgcaagagaaggcgcctcccggaaaatcctgtccaagctctcgttgccgactcgcgcctgggaaccagccatgaagaagtcattcgcattcgataacgtggggtacgaaggcggactcgatggcttgggtccttcgtcccaagttgccacttccaccgtgcgcatccttgggatgacttgtcaatcgtgtgtcaagtccatcgaagataggatctcaaatctcaaaggaatcatctccatgaaggtgtcactggaacagggctccgctaccgtgaagtacgtgccttctgtggtctgcctgcagcaagtgtgccaccagattggggatatgggatttgaggcatccatcgctgagggtaaagcggcgagctggccatccaggtcgctcccggcgcaggaagcagtggtcaaactccgggtggaagggatgacctgccaatcgtgcgtgtcctcgatcgaaggcaaggtgcgcaagttgcaaggagtcgtgagagtgaaagtatctctgtcgaaccaagaggcggtcattacctaccaaccttacctgatccagcccgaggatctgcgggaccatgtgaacgacatggggttcgaagcagccattaagagcaaggtcgcgccgctgagcctcggtcccatcgatattgagcggctccaaagcaccaaccccaagcgcccactgagctccgctaaccagaatttcaataacagcgagacgcttggtcaccagggtagccatgtcgttacgctgcagctcagaatcgacggaatgcattgtaagtcgtgcgtactgaacattgaagagaatataggtcaactgctcggagtccagtcaattcaagtgtccctggaaaacaagaccgcccaagtcaagtacgacccaagctgcacttcgcctgtcgccctccaaagggccatcgaggcgctcccaccgggcaacttcaaagtctcgctgccagatggagctgaaggctcgggcaccgaccaccgtagctcatcatcccatagcccaggtagccccccgcggaatcaggtgcaaggaacttgctcaaccactctgatcgccattgccggtatgacttgtgcatcgtgtgtgcattcgatcgagggaatgattagccaactcgagggagtgcagcagatctccgtgtccctcgctgaaggtacggccacggtcctttacaacccttctgtcatcagcccggaggaattgagagctgctatcgaggacatgggtttcgaggcttcagtggtttccgaatcgtgcagcaccaatccgctcgggaaccacagcgctgggaactcaatggtccagaccaccgacggaactccgactagcgtccaggaagtggcgccgcacacgggcagattgcctgcgaatcatgctccagatatccttgccaaatcccctcagtccacccgcgcagtggcaccacagaagtgcttcctgcaaatcaaaggaatgacctgcgctagctgcgtttccaacatcgaacggaacctgcaaaaggaggccggagtgctttcagttctcgtggccttgatggcaggaaaggccgagatcaagtacgatccggaggtcattcagccactcgaaatagcgcagttcatccaggatctgggattcgaggcggccgtgatggaggactacgcgggatcggacggaaatatcgaactgaccatcaccggcatgacttgcgcgtcctgcgtgcacaatattgaatcgaagctgactcgaaccaatggaattacttatgcctcggtggcgctggctacctccaaggccctggttaagtttgacccggagatcatcggcccgcgggacatcataaagatcatagaggaaattggatttcacgcatcactggcgcaaagaaacccgaacgcccaccacctcgaccacaaaatggagatcaagcagtggaaaaagagtttcctctgcagtctggtgttcggaatcccggtcatggccctgatgatttacatgctcatcccgtctaacgaaccgcatcaatcgatggtacttgaccataacattatcccgggactctccatcctgaacttgatcttctttatcctttgcaccttcgttcaactcctgggaggttggtatttctacgtccaagcctataagtccctgaggcaccgcagcgccaacatggacgtgctgatcgttctcgccaccagcatcgcgtacgtctactcgcttgtcatcctggtggtggccgtggcagaaaaggcagagcggtccccggtaacgttttttgacactccgccgatgctctttgtgtttattgctttgggacgctggctcgaacacctggcaaagtctaagacctcggaagcgcttgccaaattgatgagtctgcaagccactgaggccactgtcgtgactctgggcgaggacaacttgattatccgggaggaacaggtcccgatggaactggtgcagcgcggagacatcgtgaaagtggtgccgggaggtaagttcccggtggatggaaaagtgctggaaggcaatactatggcggatgaatcacttatcaccggggaagcgatgcctgtgactaagaagcctggatccaccgtaatcgcaggatcaatcaacgctcacggatcagtgttgattaaagccacccacgtcgggaacgatactactttggctcagatcgtgaaattggtcgaggaggcacaaatgtcaaaagcccccatccagcagctggcggatcgcttctctggatactttgtccccttcataatcatcatgagcaccttgaccctcgttgtgtggatcgtgattggattcatagacttcggcgtcgtgcagcgatacttcccaaaccctaacaagcacatttcacagaccgaagtcatcatccggttcgcatttcagacctcgatcaccgtcttgtgtatcgcctgcccctgctcgttggggcttgcgacccctaccgcggtaatggtcggcactggcgtggccgcccaaaatggaatcctcatcaagggagggaagccactggagatggcccacaagatcaaaaccgtgatgttcgacaagactggtaccattactcacggagtcccccgggtcatgagggtgctcctcctgggagatgtggcaacgctgccactgcgtaaggtcttggcagtggtcggaactgccgaagcctcctcagaacaccctctgggcgtggcggtgactaagtactgcaaggaagaactcggcaccgagacgctggggtactgtactgatttccaggccgtcccgggatgcgggatcggctgcaaagtctcgaatgtggaaggtatcttggcccattccgaaagaccgctctcggctccagcaagccatctgaacgaagctgggtcgctgccggcagagaaggatgctgtgccacagactttctccgtcctcattggaaacagagagtggctgaggcgcaatggactgacgatctcttcggacgtgtctgacgcgatgactgaccacgagatgaagggccagaccgctatcctggtggccatcgatggagtgctgtgcggtatgatcgcgatcgcagacgccgtgaagcaagaggcggcccttgcagtgcataccttgcagtcaatgggagtcgacgttgtgctcatcacgggggataatcggaaaactgcacgagcgatcgctactcaggtgggaatcaacaaggtgttcgcggaggtcctgccgtctcataaggtggccaaggtgcaggaacttcagaacaaaggcaaaaaagtcgcaatggtcggggacggcgtgaacgactcaccggcactggctcaggcggacatgggagtggccatcggcaccggtactgatgtcgccatcgaagccgcggacgtcgtgctgatcagaaacgatttgctggatgtggtggcctctatccacctctcaaagcgcaccgtgagaagaatccggatcaatctggtgctggcgctcatctacaatcttgtgggcatcccaatcgcagcaggtgtgttcatgccaatcggaatcgtgctgcagccgtggatgggatccgccgccatggcagcgtcatccgtgtccgtggtgctgagctcactccaactgaaatgttacaagaagccagatctggaacgctacgaggctcaagcgcacggacacatgaagccgctgaccgctagccaggtgtccgtccatatcggaatggacgatcggtggcgggactcgccccgcgcgactccatgggaccaggtgtcgtacgtttcacaggtgtccctctcgtcgcttacctccgacaagcccagtcgccatagcgctgcggccgacgacgacggcgacaagtggagtctgctgctcaatggaagggacgaggagcagtacatc

SEQ ID NO: 280098 - DNA, 4395 bp, Artificial Sequence
  derived and/or modified sequence
atgccagaacaggagcgccaaatcactgcccgcgaaggtgcgtctcgaaagattctgtcgaagttgtctctgcccacgcgcgcctgggaaccagcgatgaagaaatcgttcgccttcgacaatgtgggatacgaaggcggcttggacgggcttggaccgtcgtcccaagtggcgacgtccaccgtcaggattcttggaatgacttgccagtcatgcgtgaagtccatcgaggacagaatatcgaacctcaagggcatcatcagcatgaaagtgagtttggaacaaggctcagctaccgtgaagtatgtcccatccgtcgtgtgcttgcagcaagtgtgtcaccagataggcgacatgggtttcgaggcctccatcgcggaaggaaaggcagcgagctggccgtcgcgctccctgcctgcccaagaagcggtggtgaagttgcgggtggagggaatgacttgtcagtcttgtgtcagcagcatcgaagggaaagtgagaaagctccagggggtggtgagggttaaagtgagcctgagcaatcaggaagcagtcatcacgtaccaaccgtacctgatccagccggaggacctgcgcgaccacgttaacgacatggggttcgaagcggccatcaagagcaaggtggccccgttgtcactggggccgatcgacatcgaacggcttcagtccactaacccaaaacggccgctgagcagcgctaatcagaacttcaacaattctgaaacgctcggccaccaaggatcccatgtggtgaccctgcagctgcggatcgacggcatgcattgcaagagctgtgtcttgaatatcgaagagaacatcggccaactgctcggcgtccagtcgatccaagtgtccctggagaataagaccgcccaggttaagtacgacccctcctgtacctccccagtcgccctccaaagagccattgaagcccttcctccaggaaactttaaggtgagcctgccggacggagcagagggatccggaaccgatcatcgctcctcctcgtcgcattctcctggaagtccgccccggaaccaggtccagggaacgtgctcgactacgctgatcgccatcgccggcatgacgtgcgcgtcctgtgtgcatagcatcgagggcatgattagccaactcgagggtgtgcagcagatctcggtatcgctggcggagggcactgcaacggttctgtacaacccgtctgtgatctcgcctgaggagcttcgcgccgctatcgaagatatgggattcgaagcgtcggtagtctcggaaagctgctcgaccaatccgcttggcaaccattccgcgggtaactcaatggtccagaccaccgatggaaccccaacttcagtgcaggaagtggccccgcatactggcagactgccagccaatcatgcacctgatatcctggcgaagtccccgcaatcgacccgcgcagtggccccccaaaagtgcttcctccaaatcaaaggtatgacgtgtgcatcatgcgtgagcaacattgagcgaaacttgcaaaaggaagctggcgtgctgagcgtgctggtggcactgatggctggcaaagctgagataaagtatgacccagaagtcatccagcctctggaaatcgcccagttcattcaggatctggggttcgaggctgcggtcatggaagattacgccggatcggatggaaatatcgaactgactatcactggtatgacctgcgctagctgcgttcacaatatcgagtccaagttgactcgcactaacggcatcacctacgccagcgtggcacttgcgacctccaaggccctcgtcaagtttgaccctgagatcatcgggccacgggacattatcaagatcattgaagagatcggcttccatgcgtctctggcccaaagaaacccaaacgcccaccacctggaccacaaaatggagattaaacaatggaagaagtcttttctctgttccctcgtgttcggaatccctgtcatggcactcatgatttacatgctgatcccatcgaacgaaccgcatcagagcatggtgctggaccataacatcatcccgggtctgtcaatcctgaacctcatcttcttcatcctgtgcacttttgtccaattgctggggggatggtacttttacgtgcaggcttataagtccctccgccacaggtccgcaaatatggatgtgctgatcgtcctcgcaactagcatcgcctatgtgtactcactggttatcctggtcgttgccgtcgccgagaaagccgaacggtcacctgtgactttctttgataccccacccatgctcttcgtgttcatcgctctggggcgctggctcgagcacctcgctaagtcaaagaccagcgaagcccttgccaaacttatgagcctccaagccacggaagcgaccgtggtgacgttgggagaggacaatctgatcatccgggaagaacaggttcctatggagcttgtgcaaagaggagacatcgtgaaggtggtgccaggtggaaagttcccggtcgacggaaaagtgctggaaggaaacaccatggcggatgagagccttataacgggagaggcgatgccggtgactaagaagcctgggtccactgtgatagctggatccatcaacgcccatggatccgttctcatcaaggccactcacgtcggaaacgacaccaccctcgcacaaatcgtgaagctggtggaggaggcgcagatgtcgaaagcacctatccagcaactcgcagatcgcttctccgggtactttgtgcctttcatcatcatcatgtcaacccttaccctcgtggtgtggatcgtgatcggattcattgacttcggtgttgtgcagagatacttcccgaacccgaacaaacatatctcacagaccgaggtcatcatccggtttgccttccagacttccattaccgtcttgtgcatcgcgtgcccttgctcactcggcctcgcgaccccgacggccgtcatggtgggaactggtgtggccgcccagaatggcatactgatcaagggaggaaaaccactggaaatggcacacaaaatcaagaccgtgatgtttgacaagaccggaactatcacgcacggggtgccccgggttatgagggtgctgctgttgggcgatgtcgccactctgccacttcggaaagtcctcgcggttgtgggaactgcggaggcttcctcggagcacccgctgggagtcgcagtaaccaagtactgcaaagaagaactgggcaccgaaaccttgggatactgcaccgatttccaagcagtcccgggttgcggaatcgggtgcaaggtgagcaatgtcgagggaatcctggcacactccgagcgcccgctgagcgccccggcctcgcacctgaatgaagctggttcgcttcctgcagaaaaggacgccgtcccccaaactttctcggtgctgatcggaaatcgcgagtggcttcggagaaacggactgaccatctcgtccgacgtgtcggatgccatgactgatcacgaaatgaaaggacagaccgcaattctcgtcgcgattgatggagtgctgtgcggaatgattgccattgcggacgcggtgaaacaagaagccgccctggcggtgcacaccttgcagtcgatgggagtggatgtggtcctgatcaccggagacaacaggaaaactgctagggcgatcgccactcaggtgggcatcaataaggtgtttgccgaggtgctgccatcacacaaggtggctaaggtgcaagagctgcagaacaaaggaaaaaaggtcgccatggttggtgatggggtcaacgactccccggcactcgcgcaagccgacatgggcgtggcgatcggcactggaaccgatgttgccattgaggccgccgacgtagtcctgatccgcaatgatcttctggacgtcgtcgcctccatccatctctcgaagcgaactgtgagacggatccgtatcaacctggtgcttgcgctgatctacaacctcgtgggcattccgatcgccgctggagtgttcatgcccatcggcatcgtcttgcaaccatggatgggatcggcagcaatggctgcgagctcagtgtccgtagtactcagctcgctgcagctgaaatgttacaagaagccagatctcgagagatacgaagcacaagcacacggtcacatgaagccgctgactgcttcccaggtgtccgtccacattggtatggatgacagatggcgcgacagcccacgcgcaaccccctgggaccaggtgtcgtacgtgtcgcaagtgagcctgtccagcctgactagcgataagccctccagacattcggcggcagctgatgacgacggggacaagtggtcactgctgctgaatggaagagatgaagaacagtacatc

SEQ ID NO: 280099 - DNA, 4395 bp, Artificial Sequence
  derived and/or modified sequence
atgcccgaacaagagagacagatcaccgcgagagagggagcctcaaggaaaatcctctcgaagcttagtctgcccactagggcctgggaacctgcaatgaagaaaagctttgcctttgacaacgttggctatgagggtggattggatggactggggccaagtagccaggtggctactagtaccgtgcggatcctaggaatgacctgtcagtcctgcgtgaagtcgatagaggatcggatttcgaatctgaaaggaatcatttcaatgaaggtatcacttgaacaaggttcagccactgttaagtatgttcccagcgtggtgtgcctgcaacaggtatgccatcagatcggggatatgggcttcgaggcttccatagctgaggggaaggctgcatcatggccttcacggtccttgcccgcacaggaagctgtcgtgaagctgagggtagagggcatgacatgccagtcttgtgtgagctccatagagggcaaagtgcgaaagttacagggtgttgtgcgagtgaaggtgtcgttgtcaaaccaggaagccgttataacataccaaccttatcttatccaacccgaggatctacgggatcatgtgaatgatatggggttcgaggccgcaattaagtcaaaggtagcacctcttagcttggggcctattgacatcgagcgtctccaatccaccaacccaaaacgcccgctgtcaagcgcaaaccagaactttaataacagtgagacactgggccatcagggctctcacgttgttaccttacagcttcgaatcgacggcatgcactgcaagagttgtgtgctcaacatcgaggaaaatatcggccagctgctgggcgtgcagtcgatccaggtaagtctggagaataaaaccgcacaggtgaaatacgatcctagctgcacatcaccagtcgcccttcagagagctatagaggctctcccgcccgggaatttcaaggtgtccttgcctgacggggcagaggggagtggaacagatcaccgtagctcgagctctcactctcctggctccccacctcggaaccaagttcaggggacttgttcaacaaccctcatcgcaattgctggcatgacttgcgcaagctgcgtgcatagcatagaagggatgatttcccagctcgagggcgtccagcaaatcagtgtttctctcgcagaagggactgctaccgtgctctacaatcccagcgttatatcaccagaagaactgcgggcagcaattgaggatatggggtttgaggcaagcgtagtgagtgaatcatgttcgacgaacccattgggcaaccatagcgctggcaatagtatggtccagacaacagatggaacccctaccagcgtgcaagaggtggcaccacacaccggtcggttgcccgccaaccatgcccccgacatattggccaagtctccccaaagcacaagagccgttgctccccaaaaatgttttctacagatcaagggtatgacctgcgcgtcttgtgtatcaaatatcgaaagaaacctgcagaaggaagccggcgtgctgtctgtgctggtcgctctgatggccggcaaagctgaaataaaatacgaccctgaggttatacagcctcttgaaatcgctcagttcattcaggacctggggttcgaggcagcagtgatggaggattacgccggctcggatggcaatattgagttgactattactgggatgacatgcgcttcttgcgtgcacaacattgagtctaaacttacgagaacaaatggaatcacatacgcttcagtggcgctggctacctccaaggcattggtgaagttcgatcccgaaattataggcccacgggacattatcaagatcattgaagagatcggctttcacgcaagtcttgcgcaaagaaacccaaacgcgcatcatcttgaccacaagatggaaatcaaacagtggaaaaaatccttcctgtgctccctagtcttcggtatacccgttatggcgctgatgatttacatgctcatcccttctaatgagcctcaccagtccatggtgctagatcataatatcattccaggcctgtccatccttaacctcatctttttcattctgtgcactttcgtgcagttgctcggtgggtggtatttttatgtgcaagcctacaagtccttgcggcataggagtgcgaacatggatgtgctgattgtgcttgccacaagtattgcctatgtgtatagtctggtgatcttggtcgttgccgtggccgagaaggctgagagatcccccgttaccttcttcgacacacctcccatgcttttcgtgttcatagccctcggccgatggctagaacacctggccaaaagtaaaacatccgaagccctggctaagctcatgagcctgcaggcaactgaagccaccgtggtgacattaggagaagataaccttatcatccgtgaggaacaggtacctatggagctggtgcagcgcggagatatcgtcaaggtggtgccgggcgggaagtttcccgtcgatggtaaagtcctcgagggtaatactatggcagatgagtctcttattaccggcgaagccatgccagtgacgaaaaaacctggatcaactgttattgctgggagcattaacgctcacggatctgttttgatcaaggcaactcacgtcggcaacgacacaactctagcacaaatcgttaaactggtggaagaggcacagatgtccaaagctccaatacagcagctggccgaccggttcagtgggtactttgttccctttataattatcatgtccacccttacactcgtggtctggattgtgatcgggttcatcgattttggagtggtgcaacgctactttccaaaccccaataagcacatcagccagaccgaggtgatcatcagatttgcattccagacatcgatcactgtcttgtgcatcgcttgtccatgtagtctggggctagccacacccacagctgtgatggtgggcaccggcgttgcagcccaaaatggtatcctgattaagggaggaaaaccgcttgagatggcacacaaaataaagacagtaatgttcgataagaccgggacgatcacccacggagttccgcgagtcatgcgggttcttctcctcggagacgtagccaccttgcccttacgcaaagtgttggccgtggtgggcacagctgaagcctcgagtgagcatcccctcggcgtcgctgtcacaaagtactgcaaggaagaactcggcacagagacgctaggttactgcacagacttccaagctgtccccggatgtgggattgggtgcaaggtcagcaacgtggaaggtatcctcgctcactcagagaggcctctctctgcccccgccagccacctgaatgaggccggctctctgccagccgagaaagacgctgttccacaaacttttagtgtattgattggaaatagagagtggctgcggaggaacgggctcactatcagttcagacgtgtcggacgctatgacggaccatgaaatgaagggccaaactgcaattcttgtggcaattgacggggtcctatgcggaatgatcgccatagcagatgccgtcaagcaggaggcggcgcttgctgtacacacacttcagagcatgggagtggacgttgtgctgataaccggcgacaaccgtaagaccgctagggctatcgctactcaggtgggtatcaataaggttttcgctgaggtactgccgtcccataaggtagctaaggtccaggagctgcagaataaggggaaaaaagtcgcgatggtgggcgacggggtgaacgactcccctgccctggcgcaggctgatatgggcgtggccattggaaccggcactgacgtggccatcgaagccgctgacgtggtcctaatacgaaacgatcttttagacgtggtggcgagtatccatctgtccaagcgaactgtgaggagaattcgcatcaatctggtcctggccctgatctataacctggtgggaatccccatcgctgcaggggttttcatgcctatcggaatagtgttgcagccttggatggggtccgcagccatggcagcgtcctctgtgtccgtcgtcctcagttcactgcagctgaaatgctacaagaagcccgacctagagcgctatgaggctcaagctcacggtcacatgaaaccactgaccgctagccaggtgtctgtccacatcgggatggacgatcggtggagggattcgccccgggccaccccttgggatcaggtttcttacgtctcgcaggtaagtctatcctctctgacttcagacaagccaagcagacactctgcagccgctgacgacgatggtgataagtggtctttgctgctgaacggcagagacgaggagcaatatata

SEQ ID NO: 280100 - DNA, 4395 bp, Artificial Sequence
  derived and/or modified sequence
atgcccgaacaggagaggcaaatcaccgcgcgggaaggcgcaagtcgaaagatcttgagcaaattgagtctgccaacgagggcatgggagcccgcaatgaagaaatccttcgcatttgacaacgtgggttatgagggcggattagacgggttaggcccatctagccaggttgcgacgagcacagtgagaattcttgggatgacatgtcaatcatgtgtgaaatctatagaagacaggatctctaatctgaagggcatcatctccatgaaagtctccttggaacagggttcagccaccgtcaaatatgttccatctgtagtctgcctgcaacaggtgtgccaccagatcggggatatggggtttgaagccagcattgccgagggcaaagcagcctcttggccgtcgagaagtctgcccgcccaggaggccgtggtgaaactgcgcgtcgaaggtatgacttgtcaatcatgcgtaagttccattgaggggaaggtgaggaaactgcagggcgtggtgagagtcaaagtcagcctctctaatcaggaggccgttattacttaccagccatatctgattcagccagaggacctgcgagaccatgtcaacgatatgggctttgaagccgccattaagtcgaaggtggcccctctgagccttggccccatcgatattgagcggttgcagtctactaatcctaagaggcctctgagctcagcaaaccaaaacttcaataattccgaaaccttggggcatcagggttcccatgtggtcactcttcaactgcgaatcgatgggatgcactgtaaatcgtgtgtcctcaatattgaagagaacatcggccaactgctgggtgtgcagtccatccaggtttccctggagaacaaaactgcccaggtgaagtatgatccatcatgcaccagcccagtggcactgcagcgggcaattgaggccctccctcccggtaactttaaggtgtctttacccgacggagcggagggttcgggcactgaccaccgcagtagttcctctcactcacccggttcgccaccccgcaaccaggtccaggggacgtgttcaaccacccttatcgcaatagccggaatgacttgcgcctcttgcgtgcattccatagaaggtatgatctctcaactggagggcgttcaacagatatctgtgtccctcgccgagggcactgcaaccgtcctctataatcccagtgtgatatcacccgaggagctcagagcagccattgaagatatggggtttgaggctagtgtcgtgtctgagagttgtagtactaaccccctgggcaaccactctgcaggcaatagcatggtacagacaactgacggcacacctacaagtgttcaagaggttgccccgcacactggcaggctcccggccaaccacgcacctgatattcttgcaaaaagcccacaaagtacgagggcggtggctccgcagaaatgctttctgcaaatcaaaggaatgacatgtgccagctgtgtgtcgaacattgagaggaacctgcagaaagaagccggtgtactcagcgtgctcgttgccttaatggctgggaaggcagaaattaagtacgaccctgaggtgattcaacccctggagatagcccagtttatccaggatcttgggttcgaggccgccgtgatggaggactatgcagggtcggatggcaacatcgaactcactattactggaatgacttgtgcgagttgcgtgcataatatcgagtcaaagctgacgcgcactaacggcattacctatgcctcagtcgcgcttgccacgtccaaggctcttgtcaaattcgatccagaaatcatcggtccccgtgacattatcaagatcattgaagaaattggtttccatgcgtccctggctcagcgaaatccgaacgcccatcacctggaccataaaatggagataaaacagtggaaaaaaagttttctgtgtagtcttgtgtttggcatccctgtaatggcactgatgatctatatgttaattccgagcaacgaacctcaccaaagtatggtcctggatcacaatataatcccagggctcagcatactgaacttgatcttcttcatcctgtgtacattcgtgcagctgttagggggatggtacttttatgttcaggcttataagtccctaagacaccggtctgctaatatggatgtcctgattgttctggctacctctatcgcttatgtttacagtctggtaatactggtggtcgcagtggcggaaaaggccgaacgtagccctgttactttcttcgataccccccccatgctcttcgtgttcatcgcgttagggcgctggctggaacacttagcaaaaagcaagacttccgaggcattggccaagttaatgtccctgcaggcgacagaagcaaccgtggtgacgctcggtgaagataatttgattatcagggaagagcaggttccgatggagttggttcagcggggagatatcgtcaaagtggtgccgggtggaaaatttcccgtggatggcaaagtactagagggcaatactatggccgatgagtccctcatcaccggagaagcaatgccagtgacaaagaagccaggcagcaccgtgatagctggtagtattaacgcgcatggatccgtgctgatcaaggctacccacgtcggaaatgacacaactctcgctcaaattgttaaacttgtagaagaggcccagatgagcaaagcccctatccagcagcttgctgataggttctctgggtatttcgtaccctttattattatcatgtcgaccttgaccctcgtcgtctggattgtgatcggatttatcgacttcggggtggtgcagcggtatttccccaacccaaataagcacatttcccagactgaagtcattattcggttcgcctttcagacttccatcaccgtgctgtgtatcgcttgcccatgctccctgggtctggcaacccctactgccgtgatggtgggcacaggtgtggctgcccaaaatggaattctgatcaaaggaggaaaaccactagaaatggcacataaaatcaaaacggtaatgttcgataaaactgggactattactcacggagtgccgcgcgttatgagggtccttttgttaggcgatgttgccacgctgcccttgagaaaggtgctggccgttgttggaacagcagaggccagttccgaacatccacttggtgtggccgtgactaagtactgtaaggaagagcttggaaccgagactctggggtactgcacagatttccaggctgtaccggggtgtgggatagggtgcaaagtaagcaacgtagagggcatcctcgctcattccgagaggccactgagcgcccccgctagtcacctgaatgaggccggatccctgccagccgagaaggacgccgtaccccagaccttttccgtgctgattggcaaccgagagtggctcagaaggaacggtctgactattagcagcgatgtatctgacgcaatgacggaccacgaaatgaagggccagacagctatccttgtggccatcgacggagtgctctgtggcatgatcgcgatcgcggatgccgtgaagcaggaggcagctcttgcggtccacactctccagtccatgggtgttgacgtcgtcctgatcactggggacaatagaaaaactgcacgcgccattgccacgcaggttgggataaacaaggtgtttgcggaagtcttgccctctcacaaagttgctaaagtgcaggagcttcagaataaggggaagaaagtggccatggtgggggacggggtcaacgacagccctgcactggcacaggcagacatgggggttgccattggaacaggaaccgacgttgcgatcgaggctgcagacgtggtgttgattaggaatgacctgttggacgtggttgcctcaatccacctgagtaagcgtaccgttagaagaatccgtataaatctggtacttgcactgatctacaacctagtcggtatccccattgctgctggcgtattcatgcccatagggattgttttgcagccatggatgggtagtgccgctatggccgcctcatctgtctctgtggtgcttagcagtcttcaactgaagtgctataagaagcccgatttggaaagatacgaagcacaggctcacggacatatgaagcccttgacagccagtcaggtatccgtgcatatcggtatggacgataggtggagagactccccgagagccacaccgtgggaccaggtgagctacgtgtcacaggtctctctatcttccttgacatctgataaaccgtcacgacatagtgctgcagctgacgatgatggtgataaatggagcttactgctgaatggcagggatgaggaacagtatatc

SEQ ID NO: 280101 - DNA, 4395 bp, Artificial Sequence
  derived and/or modified sequence
atgcccgaacaagaacgccagatcacggcaagggaaggggcaagcagaaagattctcagcaaactgtccctgccaactcgcgcatgggagcccgcgatgaagaaatcctttgcatttgataacgtcggctacgagggtggcctggatggactgggaccttcctcgcaagtggccacctcgacggtgcgaatactgggcatgacctgtcaatcgtgcgtgaaatctattgaagatcggatttctaacttgaagggaatcatatcaatgaaggtgtcacttgagcaggggtcagcgactgtgaagtacgtgccatccgtggtgtgtctgcagcaagtgtgccaccaaattggtgatatgggttttgaggcatccatagccgaaggtaaggcggcctcatggccatcgcgttcgttgccggcgcaagaagccgtggtgaagctgcgtgttgaaggcatgacctgccaatcttgcgttagctccattgagggaaaggttagaaaactgcagggagtggtaagggttaaagtgtcgctttcgaaccaagaagcagtcatcacctaccagccctatctgattcagcctgaagatctccgggaccatgtcaatgatatgggatttgaggcggcaattaagagcaaggtggcccccctgtcacttggtccaatcgatattgagagactccaatcgactaaccctaaacgccctctttcatccgccaatcaaaacttcaataactcagagacgcttggacatcagggaagccacgtggtgactttgcaactccgcattgatggaatgcactgtaagtcatgtgtgcttaacatagaagagaacataggccagctgcttggggtgcaatcaatccaggtcagccttgagaacaagaccgcccaggtcaaatacgacccttcatgtactagcccggtggcacttcaacgcgccatcgaggcgctgccacctggcaactttaaggtgtcccttccagacggcgcagaagggtcgggaacggaccacagatccagcagctcgcattcgcctggttcaccacctagaaaccaagtgcaagggacttgtagcactacgctgatcgccattgcggggatgacttgcgcttcgtgcgtccactcaatcgagggaatgatcagccagctcgaaggtgtccagcaaatcagcgtgtcgcttgctgagggaacggcaaccgtgctttacaacccttcggtcatctccccagaagaactgcgcgccgcaattgaagatatgggctttgaagcctcggtcgtctcggaatcttgttcaaccaacccactgggaaatcactcggcgggcaacagtatggtgcaaaccactgatggaacccctaccagcgtgcaagaagtcgcaccccacactgggagactgccggccaatcatgcgccagacattcttgcgaaatcgcctcaatccacccgagccgtcgcacctcaaaaatgttttctccaaatcaaaggaatgacctgcgcgtcgtgtgttagcaacatagaacgtaaccttcaaaaggaagccggagtgctctccgtgctggttgcacttatggcaggtaaggccgagatcaagtacgaccctgaagtgatacagcccttggagattgcacaattcattcaagaccttggatttgaagcggcggttatggaagattacgcaggttcggatggtaatatcgaactgactatcaccggaatgacttgcgcatcctgtgtgcacaatattgaatccaagctcacgaggaccaacggaatcacctacgcatcggttgcattggcaacctctaaagcactggtgaaattcgatccggagataattggaccacgggacatcattaagatcatagaggagattggatttcatgcatcgcttgcacaacgcaatcccaatgctcatcatctggaccataagatggagattaagcaatggaagaagagctttctgtgtagcctcgtgtttggtataccagtgatggccctgatgatttacatgctcatcccaagcaacgaaccacatcagtcgatggttctcgatcacaacattatccctgggctctccattctcaatctgattttcttcatcctctgtacttttgtccagcttcttggtggatggtacttttacgtgcaagcatacaagtccctccgacatcggtccgcaaacatggacgtgttgattgtgctcgcaacttcaattgcatatgtgtatagcctggttattctcgtcgttgcggtcgcagaaaaagcagaacgttctcccgtcaccttcttcgacaccccacctatgttgtttgtctttattgcactcggcagatggctcgaacatctcgcaaagtccaaaaccagcgaagcacttgcaaagctgatgtccctgcaagcaactgaggctaccgtggtgactcttggagaagataatctgatcattagggaggagcaggtgccgatggaacttgttcagaggggagacatcgtgaaagtagtgcctggaggcaagttccctgtcgatggaaaagttctcgaaggtaatactatggcagacgaatcactgattaccggagaggcaatgccagtaaccaagaagccaggatcgactgtgattgcgggcagcatcaacgcacatggatctgtgctgatcaaagcaacccatgtcggaaatgacactactcttgctcagatcgtgaagctggtggaagaagcccaaatgagcaaggcaccgatccaacagcttgcagatagattttcagggtatttcgtgccctttatcataatcatgtccacgctgactctggtggtctggattgtgataggcttcatcgattttggcgtcgtgcaaaggtactttccgaaccctaataagcatattagccaaactgaagtgatcattcggttcgcattccaaacgtcaatcaccgtgctctgcattgcctgtccctgttcgcttggactcgcaacccctactgccgtcatggtcggaactggtgtcgcagctcagaacggaatactcataaaaggtggcaagccactggagatggcacacaagataaagaccgtcatgtttgataagaccggaaccatcactcatggtgtgcctcgcgtgatgcgcgtcctgctcctcggggacgtggcgacgcttcctcttagaaaggtcctggcagtggtgggcactgcagaagccagctcggaacaccccctcggagtggccgtgaccaagtattgtaaggaagagcttggcaccgaaactctgggatactgcaccgatttccaggctgtcccagggtgtggaattggttgtaaagtgtcgaacgtggagggaattttggcacactccgaacggccgctgagcgcgcccgccagccatctgaacgaagcaggatcgctgcctgctgagaaggatgctgtgcctcagacctttagcgtgctcatcggaaaccgagaatggcttcgccgtaatgggctcactatttccagtgacgtgtcagatgccatgaccgatcatgaaatgaaaggacagaccgcaattctggtcgcaatcgacggagtcctgtgcggtatgattgccattgctgatgccgtgaagcaagaagcggcacttgccgtgcacaccctgcagagcatgggagtcgatgtcgtgctgataactggagacaatcgtaagactgccagagcaattgcgacccaagtggggatcaacaaggtgttcgcagaagtgcttccatcgcataaagttgctaaagtgcaagagcttcagaataagggaaagaaggtcgctatggtgggggatggtgtcaatgactcccctgcccttgcacaggcagacatgggtgtggctattggcaccggaaccgatgttgcaatcgaagcagcggatgtggtgctgattcggaacgatcttcttgatgtggtcgcatccattcatctgtcaaaacggaccgtcagaagaattagaattaacctggtactggcactgatctataacctcgttgggatccctattgctgcgggagtctttatgccaataggtatcgtactgcagccttggatgggatctgcagccatggccgcatccagcgtgagcgtggtcttgagttccctgcagctgaagtgttacaaaaagcccgatcttgaacggtacgaagcccaagcgcatggtcacatgaagccacttacggcaagccaggtgtcggtccatattggtatggacgatagatggcgggattctccaagagcgacgccttgggaccaggtttcatacgtgagtcaagtgtcgctcagctctcttacctccgataaaccaagcagacattccgctgcagcagacgacgatggagataagtggtccctccttttgaacggccgcgacgaagaacagtacatt

SEQ ID NO: 280102 - DNA, 4395 bp, Artificial Sequence
  derived and/or modified sequence
atgccagaacaggagcggcagattactgcgcgggaaggcgcctcccgcaaaatcctttcgaagctgagcctgccgactcgcgcttgggaacctgccatgaagaagtcatttgcgttcgacaatgtcggttatgaaggaggactcgacggtttgggtccgagctcccaggtggctacttccaccgtgcgcatcctgggcatgacttgccagtcctgcgtcaagtcaatcgaagatcgcatctcgaacctcaagggtatcatatccatgaaggtttcactggaacagggctcagcgaccgtgaagtacgtaccttcagtagtgtgcctccagcaggtctgccatcagatcggcgatatgggcttcgaggcttcgatcgccgagggaaaggcggcgtcatggccgtcacggagcttgccggcgcaagaggctgtcgtcaagctgagggtggaaggaatgacgtgccagagctgtgtgagctcaatcgagggcaaggttcgcaaattgcaaggtgtcgtccgtgtaaaggtgtccctgtccaaccaagaagccgtgatcacttaccagccatacctgatccaaccagaggatctcagagatcacgtcaacgacatgggttttgaagcagccatcaagtcgaaggtggcccccctctcgctggggccaatcgatatcgagcggttgcaatcgaccaaccccaagcggcctctgagctctgccaaccaaaatttcaacaactcagaaaccctcggtcaccaggggtcccacgtggtcactctgcaactgcggatcgacggcatgcactgtaagtcctgtgtcctcaacatcgaggagaacattggacaactcctgggagtgcagtcgatccaggtgtcgctcgagaacaagaccgcccaggtgaagtatgacccctcgtgtactagtccggtggccctgcaaagggcaatcgaggccctgccgcccgggaactttaaagtctcgctgccggacggcgcagaagggagcgggacggaccaccggtccagctcatcgcacagccctggatctcccccgagaaaccaggtccagggcacttgttcgacgactttgatcgcgatcgcgggtatgacgtgcgcttcgtgtgtgcactcgattgagggcatgatctcacagctggaaggagtgcagcagatatcagtgagtctggcggaaggaaccgcaaccgtcctctacaaccctagcgttatcagccctgaagaactgcgtgctgctatcgaagatatgggattcgaggcgtcggtggtgtccgagtcgtgtagcaccaatccactgggaaatcattcggcgggaaattccatggtccagactaccgacggcaccccaacttcagtgcaagaggtcgccccacacaccgggagacttcctgcaaaccatgcgcctgatatcttggccaagtccccgcagtccaccagggcagtggctccgcaaaaatgtttcttgcaaattaagggtatgacttgcgccagctgcgtgtccaatattgaacgaaatctgcagaaggaagccggagtgctgtccgtgcttgtggcactcatggcaggtaaagcagaaatcaagtacgatccggaagtgattcagccactcgagatcgctcagttcatccaagatctggggttcgaggccgccgttatggaggattacgcaggatccgacggaaatatagaattgaccatcaccggaatgacctgcgcctcgtgcgtccataatatcgagtcaaaacttactcgcaccaatggaatcacttacgcatcggtcgctcttgctacctcgaaagcgttggtgaagtttgacccagaaatcatcggtccacgcgacattatcaaaatcatcgaagagatcggctttcacgcctcactggcccaacggaatccaaacgcccaccacctcgaccacaaaatggagatcaagcagtggaagaaatccttcctgtgctcgctggtcttcgggatcccggtgatggcactcatgatctacatgctcatcccttccaatgaaccacatcagagcatggtgctcgaccacaacatcatcccgggattgtcgatcctcaacttgatctttttcattctctgcacttttgtgcaacttctgggaggatggtacttttacgtccaagcgtacaaatcacttaggcacagatcagctaacatggacgtcctgatcgtgctcgccacctccattgcctacgtctactcgctcgtgattctggtggtcgctgtagcagaaaaagccgaacgcagcccggtcactttcttcgacacccctccaatgctgtttgtgttcatagcgctcggacggtggctggagcacctggccaagtcgaaaacgagcgaggctctcgctaaactcatgagccttcaggccaccgaggcgactgtggtgacgctcggagaggacaacctgatcatccgcgaggaacaggtgccaatggagctggttcagagaggcgacatcgtaaaagtggtgcccggaggaaagttccctgtggacggaaaggtcctggagggaaacaccatggctgacgagtccctgatcactggggaagctatgccggtgaccaagaagcccgggtctaccgtgatcgcaggctcaatcaacgcccatggcagcgtgctgattaaggccacccacgttggcaatgatacgactctggcgcagattgtcaagctggtagaggaagcccagatgtcaaaggcacccatacaacaacttgcagaccgcttctccggctacttcgtgccgttcattatcatcatgagcaccctgactcttgtggtgtggatcgttatcgggttcatcgatttcggagtggtgcagagatacttcccgaacccgaacaagcacatctcgcaaaccgaagtcatcataagattcgcattccaaacgtcgatcactgtgctgtgcattgcatgcccgtgctcccttggccttgctaccccgactgccgtgatggtcgggactggcgtggcagctcagaatggaatccttatcaaaggaggcaagcccttggagatggctcataagatcaaaaccgtgatgttcgataaaaccggaaccatcactcatggagttccgagggtgatgcgcgtcctccttctcggagacgttgcgactctccccttgagaaaggtgctggcggtcgtcgggaccgcggaggctagctccgaacatccgctgggagtcgcggtgaccaagtactgcaaggaagagctgggaaccgaaaccctgggctactgcactgatttccaggccgtccctggctgcggaatcggatgcaaagtgtcaaatgtcgaaggaatcctggcccatagcgaacgcccactgtccgccccggcctcccatctcaatgaggccggatcactgccggcggaaaaggacgcggtacctcaaactttctctgtgctgattggaaatagagaatggctccgccgaaatggactgactatctccagcgacgtttctgacgccatgaccgaccatgagatgaaggggcagacggcgatcctggtggcaatcgacggagtgctgtgcggaatgatcgcgattgccgacgccgtgaaacaggaggccgcccttgcagtccacacgctgcaatcaatgggtgtggatgtggtgctcatcaccggagacaacagaaagactgcgcgcgccatcgccactcaggtgggaatcaacaaggtgttcgcggaagtgctgccgagccacaaggtggccaaagtgcaggagctccagaacaagggcaagaaagtcgccatggtgggcgatggggtgaacgattcgccggcgcttgcccaggcggacatgggagtggctatcggaactggtaccgacgtggcaatcgaagccgcagacgtggttctcatccgaaacgacctgcttgatgtggtggcctcgattcacctgtctaagcgaaccgtgagacgcatccgcatcaatcttgtcttggctcttatttacaacctcgtgggcattccgatcgccgcgggtgtgtttatgccgatcggaatcgtcctgcaaccgtggatgggatcggcggccatggcagcctcttcggtgagtgtcgtcctctcctctctccagctgaagtgctacaaaaagcccgatctggaaaggtacgaagcccaggcacatggacatatgaagccacttaccgcgagccaagtctccgtgcacatcgggatggacgatcggtggcgggattcacctcgggccacgccgtgggaccaagtcagctacgtgagccaggtgagcttgtcgtccctgacttcggacaagccatcccggcattccgcagcggcggacgacgacggagataagtggtcgctgctgctgaacggacgcgatgaagaacagtatatt

SEQ ID NO: 280103 - DNA, 4395 bp, Artificial Sequence
  derived and/or modified sequence
atgcctgagcaggaaaggcagatcactgccagagagggtgcctcccgtaaaatactcagcaaactgagcctcccaacaagggcatgggagccggcaatgaagaagtcattcgccttcgacaatgtgggctatgaggggggtcttgacgggctcggcccttctagccaggtggccacgagcactgtcaggattttgggtatgacctgccagagttgcgtcaaaagtatagaagatcggatcagcaaccttaaagggattattagcatgaaagtgagtctagaacaggggagtgctaccgtaaagtacgtcccatcagtcgtgtgcttgcagcaagtgtgtcaccagatcggagatatggggtttgaggcttctatcgcagagggcaaagccgcctcctggccatcacgaagtctccccgcccaggaggccgttgtgaagctgagagttgaagggatgacctgccagtcttgcgtgagcagtatagagggaaaagtgcgaaaactccaaggtgtggttagggtgaaggtgtctctcagtaaccaggaagctgtaattacttaccagccgtacctcattcaacccgaagacttaagggatcacgttaacgacatgggatttgaggctgccatcaaatcgaaggttgctccgctgtcactgggcccgatagacatcgagagactgcagtctacaaaccccaaacgacctctttcaagcgcgaatcagaacttcaacaacagcgagacactcggccatcaggggagtcacgtggtgacactgcagctgcgtatcgacgggatgcattgcaaatcatgtgtcctaaacatcgaagaaaacattggtcagctgcttggggttcagtcaatccaggtttccctggaaaacaaaacggcccaggtaaagtacgacccttcgtgcaccagtcctgtggctctccagcgagctatagaggcacttccaccaggcaattttaaagtgagcctgccagacggggccgagggaagtggcaccgaccatcggagctccagctcccattcacccggcagccctccacggaatcaagttcagggtacgtgttctacgacactgatcgcaatcgcgggaatgacatgcgcctcatgtgtacacagcattgaaggcatgatcagccagttggaaggagtgcagcagatctccgtgtctctcgccgagggcacagccacagttctgtataacccatctgtaatctcacctgaggagctgcgcgccgcgatcgaagatatggggttcgaggcatccgtcgtgtcggagtcttgtagcacaaatcccctgggaaatcacagtgctggcaatagcatggtccagaccaccgacggcacccccacaagcgtacaggaggttgccccccacaccggaagactgcctgccaatcatgcacccgacatcctagctaagagtccacaaagtacacgggccgtagctcctcagaaatgctttctacagattaaagggatgacatgcgccagctgtgtctcaaatatagaaagaaaccttcaaaaggaagccggcgtcctgtccgtgctggtggctcttatggcgggaaaggctgagataaagtacgaccctgaagtcattcagcctctggaaatcgcacagttcatccaagacctgggctttgaagccgccgtcatggaggattatgccggaagtgacggcaatattgagcttaccatcacagggatgacttgcgcctcctgtgtgcataacatagaatccaaactgacacggaccaacgggatcacctacgcatccgtggctcttgccacatctaaggccctggttaaatttgacccggaaatcataggcccacgggacatcatcaaaattatcgaggaaataggatttcatgcctctctcgctcagaggaaccccaatgcccatcatctggatcataagatggagatcaagcagtggaaaaagtccttcctgtgcagtctagtttttggaattcccgtgatggcgcttatgatttacatgttgattccatccaatgaaccacatcaaagcatggtcctggatcataatataattcctggccttagcatcctcaacctgatttttttcattttatgtaccttcgtccagctgcttggtgggtggtacttctacgtccaggcctacaagtcactgaggcatcgcagcgcaaacatggacgttttaattgttctggcgacatcaatagcatatgtctacagtctggtcatcctggtagtggctgtcgcagagaaagcagagagaagtcccgtgactttttttgatactccacctatgctcttcgtgtttattgctctcggccgatggctggagcacctggccaagtcaaaaacctcggaagctttagcgaaattaatgtcactgcaggccactgaggctaccgttgttacattaggtgaagataacctgattatacgtgaagaacaggtgccaatggagctggtgcagaggggtgatatagtcaaggtggtgcccgggggaaaatttcccgtggatggcaaggttctagagggaaacacgatggctgacgagtcactcatcaccggagaggcgatgccggtgaccaaaaaacctggcagcacagtaatagctggcagcatcaacgcccatggatccgtgctgattaaggccacacatgtgggaaatgatactactctggcgcaaattgttaagttagtggaagaggcccagatgagtaaagcccccatacagcaacttgcagaccggttctcaggctattttgttccgtttatcattattatgtctacattgaccctggtggtgtggattgtcatcggatttattgatttcggcgtcgttcagcgctacttcccgaatcctaataagcacatctctcaaaccgaggtgattattaggtttgcatttcagacgagtatcacggtcctgtgcatcgcgtgcccctgttctctgggcctggccacccctacagctgtgatggtgggaaccggcgtggcggcacaaaatggaatattgattaaggggggtaagccactagagatggcccacaaaatcaagacagtcatgttcgacaaaacaggaacaataacccacggagtaccccgggtcatgcgcgtgctgctactgggcgacgtcgccacgttaccgctccggaaggtgctggccgtcgtgggcactgccgaggcatcctcagagcacccactgggagtcgcggttaccaaatactgcaaggaggaactcgggaccgagaccctcggatattgtaccgacttccaagccgtcccgggatgtggcatcggctgtaaagtgtcaaatgtggaagggatcctggcccactccgagcgtccccttagcgcccctgcttcgcatttgaatgaagctggctctctgccagcagaaaaggatgcagttcctcaaaccttttcagtgttaattggaaaccgcgagtggctgcgaaggaacggactgaccataagtagtgatgtttctgatgctatgacggatcatgagatgaagggacagaccgctattctagtagccattgacggagttctgtgcggtatgatcgccatcgcggacgcggttaaacaggaggcggcgctagctgtccatacacttcagagtatgggtgtagacgtggtgcttatcaccggggacaacagaaaaacggcgcgcgctatagcaacccaggtgggaataaataaggtgttcgctgaggtgttgccgtcacataaagtggcaaaagtgcaggaactgcagaacaagggcaaaaaggtagccatggtgggggatggggtgaacgattcgcccgcactcgcacaggccgacatgggcgttgcgatcgggacaggaaccgacgttgcgattgaggcagcggatgtagtgctaattcgaaacgatctcctggacgtggtcgccagcatccacctatcaaagcggactgttagacggatccggattaacctcgttctggctctgatatacaaccttgtggggattccgatcgccgcgggcgtgttcatgcccattggaatagttctgcaaccatggatgggcagtgccgcaatggctgcttcgtccgtgtcagttgtgctctcctccctgcaactgaagtgctataagaaacccgacctcgagcgatacgaggcacaggcccacgggcatatgaagcccttgacagcttctcaggtgtctgtgcacatcggcatggacgataggtggagagatagtccccgtgctaccccctgggaccaggtgtcttatgtatcgcaagtgagtctgagctcactgacaagtgataagccaagtcggcacagcgctgcggctgacgacgatggggacaagtggagcttactcctaaacggaagggatgaggagcagtacata

SEQ ID NO: 280104 - DNA, 4395 bp, Artificial Sequence
  derived and/or modified sequence
atgccagaacaagaaagacagatcaccgctagagagggggcttcgcggaagattctctcaaagctgagcctgcctacgcgggcctgggaaccagctatgaaaaagtccttcgcctttgacaatgtgggttacgaaggaggactggacggcttgggaccctcgtcgcaggtggcaacttctactgttagaatcctcggtatgacctgccagagctgcgtgaagagcatcgaagatcgcatctctaatcttaaaggaatcatctccatgaaagtctctttggaacagggatcagccactgtgaaatacgtgccaagcgtggtgtgtctgcagcaagtgtgccatcaaatcggagatatgggcttcgaggcttccattgcggaaggaaaggctgcctcgtggccaagccgctcactgcctgctcaggaagccgtcgtgaagctgagagtggaaggaatgacctgccaatcctgtgtcagctcgatcgaaggcaaggtgagaaagctgcagggggttgtgcgcgtgaaggtgtccctgtccaaccaggaagccgtgatcacttatcagccgtacttgatccaaccggaggatctgcgggatcacgtgaacgacatgggctttgaagccgcgatcaaaagcaaggttgcaccactctccctggggccaatcgacatagaaaggctgcagtcgaccaacccgaaacgcccgctgagctcggccaatcaaaactttaacaactccgagacgttgggacaccagggatctcacgtcgtgaccctgcaactgcgcatcgacggaatgcactgcaagtcgtgtgtgttgaacatcgaggaaaacatcggccagcttctcggtgttcagagcatccaagtctccctggagaacaaaactgcccaagtgaaatacgacccgtcctgcacctcacctgtggccttgcagagggcgatcgaggcactgccccccggtaatttcaaagtgtcactgccggacggcgccgaaggatccggaactgatcatagatcgagctcctcccactctcccggctcgccgccacggaaccaggtgcagggtacttgctcaactactcttatcgccattgctggaatgacgtgtgcgagctgtgtgcacagcattgagggaatgatctcccaactggaaggtgtgcagcaaatctccgtgtcgctggccgagggcaccgccaccgtcctctacaacccatcagtgatttccccggaggagttgagggcagccatcgaggacatgggattcgaagcctccgtcgtgagcgaatcctgctccactaacccactcggtaaccactctgccggtaattccatggtccaaacgactgacggcaccccgacttcggtgcaagaagtggcgccgcacaccggacggctgccggccaatcacgcaccggacatcctggcgaagtccccacagtcgaccagagcggtcgcaccgcaaaagtgctttctccagatcaagggcatgacctgtgcgagctgcgtctcgaatatcgaacggaatttgcagaaagaagctggcgtgctgagcgtcctggtggcgctgatggcggggaaggcggagatcaagtatgaccctgaggtgatccagccactggagatcgcacaattcatccaggaccttggtttcgaagcggcggtaatggaggattacgctggatcagatgggaacatcgaactgacgatcaccggcatgacttgcgcgagctgcgttcacaacatcgaatcaaagttgaccagaaccaatgggatcacttacgcgtcagtcgcgctggccacttcgaaagccctcgtcaaattcgacccagagattattggacctagggacatcatcaagattatcgaagagatcggtttccatgcttcgctggctcagcggaacccgaacgcgcatcatctggatcacaaaatggaaatcaagcagtggaagaagtcgttcctgtgcagcctggttttcggaatcccggtcatggccttgatgatttacatgctcatcccgtcaaacgagccgcatcagtcaatggtcttggaccacaatatcattccaggtttgtcgatcctcaatctgatcttcttcatcctgtgcactttcgtccaactcttgggagggtggtacttctatgtgcaggcctacaaaagcctgcgacaccgctcagcgaatatggacgtgctcattgtgctcgccacttccatcgcctacgtctactcacttgtcatcctggtcgtggccgtggcggagaaagcagagcgcagccctgtgacttttttcgacactccaccaatgctgttcgtgtttatcgctcttggaaggtggctggaacacttggcaaagagcaagacctccgaggcgctcgcgaagctgatgagcctccaggcgacggaagcgaccgtcgtcacgctgggtgaggacaatctgatcatacgcgaggaacaagtgccgatggaactcgtgcagcggggcgacattgtcaaggtggtgccggggggtaagtttccggtcgacggcaaagtgctcgaaggaaacaccatggccgatgaaagcctcatcactggagaggccatgcctgtcactaagaagccaggatcgactgtcatcgccggcagcatcaatgcacatggatcggtgctcattaaggcgactcatgtgggaaacgacactaccctggcccagattgtgaagctggtggaggaagcccaaatgtccaaggctccgatccagcagctggccgaccgtttctcaggatacttcgtgccattcatcatcatcatgagcacgctcacgctggtggtgtggatcgtcattgggtttattgatttcggcgtcgtgcagagatacttcccaaacccaaataagcacatttcgcagactgaagtgatcatccggttcgctttccagacttccatcactgtcctgtgcatagcatgtccctgctccctcggcctcgcaacgccaaccgcggtgatggtgggcactggcgtggctgcgcaaaacggaatcctgattaaagggggcaagccgctggagatggcgcacaagatcaaaaccgttatgttcgacaaaaccggaactattacccacggcgtcccgagagttatgagagtgctgctgcttggagacgtggctaccctcccgctcagaaaggtcctggcagttgtgggcaccgctgaggcgtcctcagaacaccccctgggagtcgcggtcactaagtactgtaaggaagagctcggaaccgaaacgcttggctactgcacggacttccaggcagtgccgggatgcggtatcggttgcaaggtgtcaaacgtcgaaggcatcctcgctcattccgaaagaccgctgagcgcaccggcgtcacatctcaatgaagcggggtcgctccctgccgaaaaagacgcggtgccacagacgttctccgtcctcatcggcaaccgcgagtggctgagacggaacggcctgactatctcatccgacgtgtcagatgccatgacggaccacgagatgaagggacagactgcgattctggtggccatcgacggagtcctctgcggaatgatcgccatcgcggacgcagtgaaacaagaggcggctctcgctgtccatactctgcagagcatgggagtcgatgtggtcctcattactggggacaaccgaaaaactgcgcgggctatcgctacccaggtgggcatcaacaaggtctttgccgaggttctgcctagccacaaagtggcgaaagttcaggagctgcagaataaaggcaagaaggtggccatggtgggagatggagtgaacgatagccctgcgctcgcacaagccgatatgggagtggctatcggaaccggaaccgacgtcgcgatcgaggctgcagatgtcgtgctcatccgcaatgacctgctggatgtggtcgcttcaatccatttgtccaagcggacggtgcgccggattcgaatcaacctggtgctggctcttatctacaaccttgtgggaatcccaatagctgccggtgtctttatgcctattggaatcgttctgcagccatggatgggctcggccgcaatggccgcctccagcgtgtcggtggtcttgtcgtctctgcagcttaaatgctacaagaaaccggaccttgaaagatacgaggcccaggcgcatgggcacatgaaaccccttaccgcgtcgcaggtttccgtccacattgggatggacgatagatggagagatagcccacgggcaactccgtgggatcaggtcagctacgtgagccaggtgagcctgtcctctctgactagcgacaagccctcgcgccattccgccgctgccgacgatgatggagacaagtggtcccttctcctgaatggtcgggacgaagagcaatacatc

SEQ ID NO: 280105 - DNA, 4395 bp, Artificial Sequence
  derived and/or modified sequence
atgcctgaacaggaaaggcagataactgccagggaaggagcatctcgcaaaatcctatctaaactgagtttacctacacgagcatgggaacccgccatgaagaaatcattcgccttcgataacgtcggatatgaaggagggctcgacgggctgggaccttccagtcaggttgccacttccactgtccggatccttgggatgacatgccagtcctgtgtgaaatctatagaagatagaatctctaacttaaaaggaatcatctctatgaaggtgtctttggaacaggggtccgctacagtcaagtacgtgccttccgtggtgtgcctacagcaggtgtgccatcagataggagacatgggattcgaggcaagtatagccgaggggaaagcggcgtcttggccatcgaggagtctccccgcccaggaagcggtggtaaagctgcgggtggaggggatgacttgccaatcttgcgtttcatctatagaaggaaaggtaagaaaattacagggggtggttagagtgaaagtttccctctcaaaccaggaagctgtgatcacttatcagccttacttaatacagcccgaagatctgagggatcacgtaaacgatatggggtttgaagcggcaattaaatctaaagtggcccccttatctctaggacctatcgatatcgaacgcctgcagtctacaaatcctaaaagacccctttctagtgctaaccagaacttcaacaattcagaaacactcgggcatcaggggagtcatgtggtgacactgcaactacggatcgatggaatgcactgcaagagttgtgttctaaacatcgaagagaacatagggcagcttcttggagttcagtctatacaggtgagtctggaaaacaaaactgcccaggttaaatacgatcccagttgtacttctccagtagctctacagcgggcaatcgaagccctcccgcccgggaatttcaaagtgagtctcccagatggggccgaaggatccggaactgatcataggtcaagttcctctcactctcctggaagtcctcctcggaatcaggtccagggaacatgttctactacactaatagccatcgctggaatgacatgtgcatcttgtgtgcactcaattgaagggatgatctcgcagctcgaaggagtacagcagatctctgtgtcgctcgccgaagggacagccactgtgctctacaacccgtccgtgatcagtcctgaagaacttcgagccgcaatagaggacatgggattcgaggcctccgttgtctctgaatcctgctccactaaccccctaggaaaccactctgccggaaattccatggtgcaaactacagacggaacacctacttccgtacaagaagtggccccacacacaggacggttaccagcaaaccacgctcccgatatcttggcaaaatcccctcagtcgacacgtgcagtagcaccacagaaatgctttcttcagatcaaaggaatgacatgcgcttcatgtgtgtccaacatagaacgaaacctccagaaggaagcgggagttttgtctgtgctcgtagccttaatggctggaaaagccgaaataaaatatgatcctgaagtcatccagcctctcgagatagcccagttcatacaggatctcggattcgaagcagccgtaatggaagactacgcgggatccgatggaaacatcgaactcactatcacaggaatgacatgcgcctcctgcgtgcacaacatagaatctaaacttacacggacaaatggaatcacatacgcttccgtggccttagccacaagtaaagctttggtgaagtttgacccagagattatcggacctcgcgatattataaaaataatagaagagatcgggtttcatgcaagtcttgcccagaggaatccaaatgcccaccatctggaccataaaatggaaatcaagcagtggaaaaaatctttcctctgttccttagtgttcggaattcccgttatggctctcatgatttacatgctcataccgtctaatgaaccacatcagagtatggtcctcgaccataatataatacccggattatccatcctcaacctcatattttttatcctgtgtactttcgtgcagcttctcggagggtggtacttttatgtgcaggcatataaatcccttagacaccggtcagcgaacatggacgtcctaattgtgctcgcaacatctatcgcatacgtctattcactcgtgatcttggtggtcgcagtggcagaaaaggcggaaagatcacctgtgacttttttcgatactccacccatgctctttgtgtttattgctctggggaggtggctcgaacatctcgccaaatcaaaaacatctgaagccttagcaaaattgatgtctttacaggccactgaggcaacagtggtaacactgggagaagataaccttataatcagagaagaacaggtaccaatggaactagtccagcgaggagatattgtgaaagtcgtccctggaggaaagtttcctgttgatgggaaagtactggaagggaatactatggcagatgaatcactgatcacaggggaagccatgcctgtaacaaaaaaacctggatctactgtaatcgctgggtccataaatgctcatggaagtgtgctgataaaggccacacacgtaggaaatgacacgactttagcgcagatagtcaagctagttgaagaggcacagatgtcaaaagcaccaatacagcagctggcagatagattttccgggtatttcgtgccctttataatcataatgtctacattgactttagtcgtttggatagtgatcggatttatcgattttggagtggtgcagagatacttccccaatcccaataaacatatttctcagactgaggttataattcgattcgcttttcagactagtatcactgttctctgcattgcctgtccatgctccctcggactcgctactcccacagccgttatggtcgggactggggtagccgcacagaacggaattcttatcaaagggggaaaaccccttgaaatggctcataaaataaaaacagtgatgttcgataaaactgggacgatcacacacggagttcccagagtgatgagagtcctcctactcggagatgtcgctactctccctttgagaaaagtcctcgccgtggtcgggacagccgaagcctcttccgaacaccctctcggggtcgccgtcactaaatattgcaaagaagaactcggaactgaaactctcggatattgcactgatttccaggcagtgcccgggtgcgggataggatgtaaagtatctaatgtagaagggattcttgctcactcagaacggccactttccgctcccgcatcccatctcaatgaagccgggagtctccctgccgaaaaagatgctgtgccccagacttttagtgttctcatagggaacagggaatggctccggaggaatgggctgactataagttccgatgttagtgatgctatgacagatcacgaaatgaaaggacagacagctatcctggtagccattgatggagtgttatgcggaatgattgccatagctgatgctgtaaaacaggaggctgccctcgctgttcacacactacagagtatgggagtcgatgtggtacttataactggagataatcggaaaactgcacgggctatcgctacacaggtcgggattaacaaagtgtttgcagaagtgctgccatcacacaaagtcgccaaggtacaggaacttcagaataagggaaaaaaagtggccatggtcggggatggggtaaatgatagtccagctctcgcacaggccgatatgggggtggctattggaacaggaactgatgtcgccatagaagccgctgatgtggtgctcatccggaacgacttactagatgtcgtcgcctctatacaccttagtaaacgaactgtcagaagaatccggattaatctggtgttagccctgatctacaatctggtaggaatacccatcgcagccggggtctttatgcccatagggatagttctgcagccctggatggggtcagccgccatggctgcaagttctgtttccgttgtgctgtcctcactgcagcttaaatgttataagaagccagacctcgaaaggtatgaagcacaggcgcacgggcacatgaagcccctaactgccagtcaggtttccgtccacatcgggatggacgaccgctggcgagattctccccgagcaacaccatgggatcaggtgagttatgtctcacaagtgtcattaagttctctgacatcagataaaccatcccggcactctgctgccgctgatgacgatggggataagtggagtttactgctaaatgggcgcgatgaagaacagtatatc

SEQ ID NO: 280106 - DNA, 4395 bp, Artificial Sequence
  derived and/or modified sequence
atgcctgagcaggagaggcagattaccgcacgcgaaggggcatccaggaagatcctcagcaaactttctctccccacccgtgcttgggagccggctatgaagaagagcttcgcctttgataacgtagggtacgagggaggactggacggactaggaccaagctctcaggtggccactagcacggtacgcatcctgggcatgacatgtcagtcatgcgttaaatcgatcgaggatcgcatctccaacttgaaagggattatctccatgaaggtatccttggaacaaggttctgcaacagttaagtatgttccttccgtcgtgtgcctacaacaagtttgtcatcagataggagatatgggttttgaagcctctatcgccgaaggcaaggcggcgagctggccctctcggagtctgcctgcacaggaggccgtggtgaagctgcgggtcgaaggcatgacgtgccaatcttgtgtgagtagtatcgaaggtaaagtgaggaaactgcagggtgtggttcgcgtgaaggtttcactttccaatcaggaggcagtgatcacctaccagccttacctgatccaaccggaagatctccgggatcacgttaacgacatgggcttcgaagccgcaatcaagtcaaaagtcgcccccctgtctttaggacccattgacattgagcgtctgcagagtacgaacccgaagcggcccctgtcgtccgctaatcagaattttaataattccgaaacactgggccatcagggcagccatgttgtgacacttcaacttcgaattgacgggatgcattgtaagtcatgcgtgctcaatatagaggagaatatcggtcagctcctgggcgtgcaaagcatccaagtctcactggaaaataagaccgcccaggtgaagtacgatccaagttgtacctcccctgttgcccttcaaagagccatcgaagccctgccacccggtaattttaaggtgagcctacccgatggggccgaggggtctgggacagaccacaggtcctctagctctcattcgcccggttcccccccccgaaatcaggtgcagggaacctgctccactacactgattgctattgctggcatgacttgtgcctcctgcgtccactctatcgaggggatgataagtcagttagagggggtgcagcaaatatcagtgtccctggctgagggaaccgcaacggtgctgtacaacccctccgtaatctcccctgaagagctacgggccgcaatcgaagacatggggtttgaagcctccgtggtttcagaatcctgttccaccaacccgcttggaaaccacagtgctggcaacagtatggtacagacaacagacggcacccccacttcagtgcaggaagtggccccccacactggccgactacccgcaaatcacgctccagacatcctggccaaaagcccccagtctacacgggctgtcgctccgcagaaatgtttcctccaaattaagggtatgacctgcgcctcatgcgtgagtaacatagaacggaatcttcagaaggaggccggagttctgagtgttctggttgccctcatggccggaaaggcagaaatcaagtatgaccctgaagtgatacaaccactcgaaattgcgcagttcattcaggatctgggctttgaagccgccgtgatggaggactacgccggctcagacggcaacatcgaactcaccatcacaggaatgacctgtgcgtcttgcgtgcacaacatcgaatctaaactcactaggactaatggcataacttacgcctccgtggctctggcaaccagtaaggctctcgtaaagtttgaccccgaaatcattgggcctagggatatcattaagatcattgaagagatcggctttcatgctagtttggctcagcgcaatccgaacgcacaccacctcgaccataagatggagatcaagcaatggaagaaatcattcctatgtagtttagtgttcgggattcccgtgatggctctcatgatatatatgctgattccttccaatgagcctcaccagtctatggtcctggaccacaatattattccagggctgtctatattaaacctgatttttttcatcttatgcacttttgtacagctgcttggcggctggtatttttacgtacaggcctacaaaagtctgagacatagatccgctaacatggatgttctgatagtgctggctacttccatcgcttacgtgtattcactggtgatactcgttgtcgccgttgcagagaaagccgaacgatctcccgtgacctttttcgacacccctcctatgctatttgtgtttatcgcccttgggcgctggctggagcaccttgccaagtctaagacgtcagaagccctcgccaagttgatgtccctccaggctacagaagcaactgtcgtgacactaggggaggacaacttgattataagagaagagcaggtaccaatggaactggtccagaggggcgacatcgtaaaggtggtacccgggggcaaattccctgttgatgggaaggtgcttgaaggcaataccatggccgatgagtctttaatcactggggaggcaatgccggttacgaaaaaaccggggtctacggtcatcgctggctcgatcaacgcccacggctccgtgctgattaaggccacccacgtcgggaacgacaccaccctggcccaaatcgtcaaactggtcgaggaggctcagatgtcaaaagcccctatccagcagttggccgacagattcagtggatacttcgttcccttcataattatcatgagcaccctgactttagtcgtctggatagtcatcgggttcattgacttcggtgtggtccagaggtatttccctaaccccaataaacacatatcccagacggaagtaatcatccgttttgcttttcagacgtccattacggtcctctgcattgcctgtccctgctctctgggcttggctacccctactgccgtcatggtaggcactggagtggcagcgcagaacggcatcctgatcaagggggggaagcccctggaaatggctcacaagattaagactgtgatgtttgacaaaacggggactatcactcatggcgtgccgcgcgtgatgcgtgtgctgctccttggtgatgtcgccactctgcctttgcgaaaggtccttgccgtagttggaactgcggaagcttcaagtgaacacccacttggcgtcgctgtgaccaaatactgcaaagaggagcttggcactgagacactcggctactgtacagactttcaagccgtaccaggttgcggaatcggttgtaaggtttcgaatgtggaaggaatactcgcccactctgagaggccattaagcgccccagcctctcacctgaacgaagccggaagtctacccgccgagaaggatgcagtgcctcagaccttttccgtgctaatcgggaaccgggagtggctgcgcaggaatggcttgacaatctcctccgacgtcagcgatgcaatgacagaccacgaaatgaaagggcaaaccgccattcttgtagcgatagatggagtgttgtgtggtatgattgcaattgcagacgctgtgaagcaggaagcggctctagcggtgcacactctgcagtcaatgggtgtcgatgtggtattaattaccggtgacaataggaaaactgcacgggctattgccacacaggttggcataaacaaggtttttgctgaggttctccctagccacaaagttgccaaggtacaggaactccagaacaaaggaaagaaggttgccatggtaggagatggggtaaatgacagtcctgctctggctcaagcggatatgggagtggcaatcgggacaggtacggatgtcgcaatcgaagcggctgacgtggtcttgattcgtaacgacctgctggacgttgtggcctcaattcacctgtcaaagagaactgtgcgtagaattcgcataaatctggtactggctctaatctataacctggttggtatccccattgccgcaggggttttcatgcctattggaattgtgctccagccctggatgggctccgctgctatggctgccagctcagtgtccgttgtgctgtcttctctgcaactgaagtgctacaagaaaccggatctggagaggtacgaggcacaggcgcacggccacatgaagcctctcaccgcttcccaggtaagcgtgcatattggcatggatgatagatggcgcgacagccccagagcaaccccatgggaccaggttagctacgtgtctcaggtttctctcagctctctcactagcgacaaaccatcccggcacagcgccgcagccgatgatgatggcgataagtggagcctgctgctgaatggccgggatgaggaacagtacatc

SEQ ID NO: 280107 - DNA, 4395 bp, Artificial Sequence
  derived and/or modified sequence
atgcctgaacaggagaggcagatcactgctcgcgagggagccagcagaaagatcctttcgaagctgtcactcccaacccgcgcctgggaaccggccatgaagaagtcattcgcatttgacaacgtgggatacgagggtggcctggacggcctcggaccgtcgagtcaggtcgccaccagtaccgtgcgcattctgggtatgacctgtcagtcatgcgtgaagtcgattgaagatcggatcagcaacctgaagggtatcatttccatgaaggtcagtctcgaacagggatcagccaccgtcaagtacgtgccatcggtggtgtgccttcagcaagtgtgccaccaaattggcgacatggggttcgaggctagcatcgctgagggtaaggcggcgagctggccatcgcgctcgctgccagcccaagaggcagtggtgaaactgagagtagagggcatgacttgccaatcctgtgtgagctcgatcgagggaaaggtccggaagctgcaaggtgtcgtccgagtaaaggtgtcactgtccaaccaggaagctgtgatcacttaccagccgtatctgatccaaccggaggacctgcgcgaccatgtcaatgatatgggattcgaagctgcaatcaagtccaaagtggccccactgtctctgggaccgatcgacatcgagcgcctccagtcaactaatccgaaaaggcccctctcctcagcgaaccagaatttcaataactccgagactctgggccaccagggctcacacgtcgtgactcttcagcttcgcatcgacggcatgcattgtaagtcctgcgtcttgaacatcgaggaaaacatcggacaattgctgggagtgcaatcgatccaggtgtccctggagaacaagactgcgcaagtcaagtatgatccatcctgcacctcaccggtcgctctccaacgggcgatcgaagcactgcctccaggcaactttaaggtgtccctgccggacggagccgaaggcagcggaactgaccaccggagcagctcatcgcactccccggggtcgcccccgcggaatcaggtgcaaggaacctgtagtactacgctgatcgcaatcgctggaatgacctgtgctagctgcgtccacagcatcgaaggcatgatttctcaacttgagggggtgcagcagatctcagtgtccttggccgaaggtaccgccacggtgctgtataacccttcagtgatctccccagaagagcttagagccgccatcgaagatatgggatttgaagcctcggtggtgtcggagtcctgttcgacgaatccactcggcaaccactccgcgggaaattccatggtccagaccactgatggcactccgacgtcagtccaggaagttgcccctcataccggacggctgccggctaatcatgctccagacatcctcgccaagagcccgcaatcgactcgcgcggtcgccccccaaaaatgtttccttcagatcaaaggcatgacgtgcgctagctgcgtgtcgaatattgaacggaatctgcagaaggaagcaggggtgctctcggtgctcgtggcactcatggccggaaaagctgaaatcaaatacgatccagaagtaatccaacctctcgaaatagcgcagttcatccaagatctcggcttcgaagcggcagtgatggaggactacgcgggaagcgatgggaacattgagctgaccatcacgggaatgacgtgtgcgtcgtgtgtgcacaacatcgaaagtaagctgacgcggaccaatggcatcacctacgcctcggtcgctctggctacctccaaggcgcttgtgaaatttgatcccgagattatcgggccgagagacatcatcaaaatcatcgaggaaatcggattccacgcatcattggcccagagaaacccaaatgcacaccacctggatcataagatggaaatcaagcaatggaaaaagagctttctttgttccctcgtgttcggaatcccggtgatggcgcttatgatctacatgctgatcccgtcgaacgagccgcaccagtccatggtcctcgaccataacatcatcccaggactgtcgatcctgaacctcatcttcttcatcctgtgcaccttcgtgcagttgctcggcgggtggtacttctacgtgcaggcctacaagagccttcgccacagatcagcgaacatggacgtgctgattgtcttggcgacttccatagcgtacgtctactccctggtgatcctggtggtcgctgtggcggagaaagcggagagatcaccggtgacttttttcgacactcctccaatgctgtttgtgttcatcgccctgggccgctggcttgagcacttggccaagagcaaaacgtccgaggcgctcgcgaagctgatgtcactgcaggcgaccgaagccaccgtggttactcttggggaagataacctgattatccgcgaggagcaggtgccaatggaactcgtgcagcgtggcgacatagtgaaggttgtgccgggaggaaagttcccggtggatggtaaggtgctggagggcaataccatggctgacgaatccctgatcaccggagaagcgatgccagtcactaagaagcccgggtcgaccgtgatcgccggttcgatcaacgctcatggctcggtgctgatcaaggctacccatgtcgggaacgatacgactctcgcgcagatcgtcaagttggtggaagaagcgcagatgtccaaagctccgatccaacagctggctgatcgattctccggttactttgtccctttcatcatcatcatgtcaacccttaccctggtggtttggatcgttattggattcatcgatttcggagtggttcagagatactttccgaacccaaataagcacatcagccagactgaggtcatcatccgcttcgccttccaaacttcaatcacggtgctctgcatcgcatgcccatgctctcttggactggcgaccccgactgcagtcatggtggggactggagtcgccgcccaaaacggaattctcatcaagggaggaaagccgttggaaatggcccacaagatcaaaaccgtgatgtttgacaaaactggcacgatcacgcacggtgtgccgcgcgtgatgagagtcctgctgctgggagatgtggccacgttgcctctccggaaagtcctcgcagtggtcggcaccgcggaggcctcgtcagaacacccgctgggagttgcagtgactaagtactgtaaggaagagctgggcaccgaaactctgggctactgtactgattttcaggcggtgccaggatgcggcatcgggtgtaaggtttcgaatgtcgaaggcattctcgcccatagcgaaagaccgctgtcggccccggcttcgcatctgaacgaagcgggaagcctcccagccgaaaaggacgccgttccgcagacgttctccgtgctgatcggaaatcgggagtggctgcggcggaacggactgaccattagcagcgacgtctcggacgcaatgactgaccacgaaatgaaaggccagaccgcaatcctcgtggcgattgacggggtgctctgcgggatgatcgcgatcgcagatgctgtcaagcaagaggcggccctggccgtgcatactctccagtcaatgggtgtcgacgtggtgcttattaccggtgacaaccgcaaaacggcgcgcgctatcgctacccaagtgggtatcaataaagtgttcgcagaggtcctgccctcgcacaaggtcgcgaaggtgcaagaactgcagaacaaaggaaagaaggtggcgatggtcggagatggagtcaacgattcacctgcattggcacaggcagacatgggtgtggccatcggaactggaaccgatgtcgcgattgaagcagccgacgtcgtgctcatccgcaatgacctgctggacgtggtcgcctcgatccatctctctaaacgcactgtgagaagaattcgcatcaacctggtgctggcgctgatctacaacctggtgggcatcccgatcgctgctggagtgttcatgccaattggaatcgtgttgcagccttggatgggatcggccgcaatggcagcatcttcagtgtccgtggtactttccagcttgcagctcaagtgctacaagaagccagacttggagcgctacgaagcccaggctcacggacacatgaagccgttgaccgcctcacaggttagcgtgcatatcgggatggacgacaggtggcgcgactcgccacgggcaacgccgtgggatcaagtctcctacgtgagccaagtgagcctgtcatcactcacctcggataaaccatcccgccactccgcagccgctgatgacgacggagacaagtggtccctcctgttgaatggccgggacgaggagcaatacatc

SEQ ID NO: 280108 - DNA, 4395 bp, Artificial Sequence
  derived and/or modified sequence
atgcctgaacaagaaaggcaaatcaccgctagagaaggtgcctcgcgcaagatcctgagcaagctctccctgccgacgcgcgcctgggaaccggcaatgaaaaagagcttcgccttcgataacgtgggatacgagggaggattggatggactcggtccgtcatcccaggtcgctacttcaactgtcagaatcctcgggatgacgtgtcaaagctgtgtgaagagcattgaggacaggatctccaacctgaaagggatcatctcgatgaaggtgtcgctggagcaaggctcggccactgtgaaatacgtgccgtcggtcgtgtgcctgcagcaagtatgccaccagatcggagacatgggctttgaagcgtcgatcgcagaaggaaaggccgcttcctggccatcccggtcgctccctgcacaggaggccgtggtcaaattgcgcgtggaaggcatgacctgtcagtcgtgcgttagctccatcgaagggaaggtgcgcaaactccagggtgtggtgcgcgtcaaggtgtccctgtcaaatcaggaagcagtgatcacgtaccaaccttacttgattcaacctgaggacctcagggatcacgtgaacgacatgggatttgaggcggcgataaagtccaaggtggcgccactgtctctgggaccgatcgacatcgaacgcctccagagcactaatccgaaacgcccgctgtcatccgcgaaccagaatttcaacaactccgaaaccctgggtcaccaaggctcccatgtcgtcaccctgcagctgcgaattgacgggatgcattgcaaatcatgtgtgctgaatatcgaggaaaacatcggtcagcttctcggcgttcaatccatccaggtcagccttgagaataagaccgcccaggtgaagtatgatccttcctgtacttccccagtggccttgcaaagagccattgaagctctgccacctgggaactttaaggtgagcctgccggacggcgctgagggttctggaacggaccacaggtctagctcctcacatagccccggttcacccccgcggaaccaggtgcaaggaacctgctcgactaccttgatcgcgatcgcgggaatgacctgcgcgagctgcgtgcattcaatcgaaggaatgatcagccagctcgaaggagtgcagcaaatcagcgtgtccctggcggaaggtaccgccactgtcctctacaacccgtcggtgatctccccggaagagctgagagcagcaatcgaggacatggggtttgaggcatcggtcgtgagcgaatcctgcagcactaatcccctgggtaatcacagcgcgggaaacagtatggtgcagaccaccgacggcactccgacttccgtccaggaggtggctcctcacactggtcgccttcccgcaaatcacgccccagacatcctggcgaagtcgccgcaaagcaccagagcggtcgcgcctcaaaagtgcttccttcaaatcaagggaatgacgtgtgcctcgtgtgtgtcgaacattgagcgcaatctccagaaggaggccggagtgctcagcgtgctggtggccctgatggcgggaaaggctgagatcaaatacgatcccgaggtgatccagcccctggagatcgcccaattcatccaggatctgggtttcgaagccgctgtcatggaagattacgctgggtcggacggcaacatcgagctcacgatcactggcatgacgtgtgcgtcatgcgtccacaacatcgaatccaaactgactcgcactaatgggatcacctacgcatccgtggccctggccacctccaaggccctggtgaagttcgacccggaaatcatcgggccgcgggacatcatcaagatcattgaggaaattggctttcacgcttcgctcgctcagagaaacccaaatgcacatcatctggatcataagatggagatcaaacaatggaagaaatcgttcctctgtagcctggtgttcgggatcccagtcatggccctgatgatctacatgcttatcccgtccaatgaaccgcaccagtcaatggtgctggaccataacatcatcccaggactctcgatcctcaatctcatcttcttcatcctgtgtacgttcgtccagctgctcggcggctggtacttttacgtccaggcgtacaaaagcctccgccatcgcagcgccaacatggatgtgctgatcgtgctggccacttccatcgcctacgtgtacagcctggtgattttggtggtggcggtggcggagaaggccgagcgctctccagtgaccttttttgatactcctccaatgctcttcgtctttattgccctcggaagatggctcgagcatctggcaaagtccaaaacttcggaggcactcgccaaactcatgtccctgcaggcaaccgaggccactgtcgtcacgctgggagaggacaacttgataatcagagaagagcaggtcccgatggaactcgtccagaggggtgacatcgtcaaagtggtgccgggaggcaagttcccggtggatgggaaggtgcttgagggcaatactatggctgatgaatcactgatcaccggagaagcgatgccggtcaccaagaaacctggttcaactgtgatcgcaggtagcattaatgcccacggttccgtcctgatcaaagccacccatgtgggtaacgacactacgctggctcagatcgtcaagctcgtggaggaggcacagatgtcaaaggcgccaatccagcaactggccgataggttctcgggctacttcgtgccgttcatcatcatcatgtcgaccctgactcttgtggtgtggattgtgatcggcttcattgactttggagtggtccaaagatactttccgaaccccaacaagcacatctctcagactgaagtcattattcgcttcgccttccaaacttcaattacggtcctgtgcatcgcctgcccatgttcgctgggattggcgacgccaaccgcagtgatggtgggaaccggagtggccgctcagaatgggattctgatcaagggaggtaagccgctggaaatggcccacaaaatcaagactgtgatgttcgacaagactggaaccatcactcacggcgtgccccgcgtgatgcgggtgctgctgctgggagacgtggccactctgccgctgaggaaagtgttggcggtagtggggactgccgaagcatcgagcgaacacccgctcggggtggcagtgactaagtactgtaaggaagaactgggtactgaaaccctgggctactgcactgattttcaagcggtgccaggctgcggaatcggctgcaaagtctctaacgtggaaggaatcttggcccactccgaaagacctctgtccgccccagcaagccacctgaatgaggcggggtcgctgccagcggagaaagacgcagtcccccaaaccttttcggtgctgatcggaaaccgggagtggctgcgcaggaatggactgactatcagcagcgacgtgtcggatgccatgactgaccatgaaatgaagggccagacggcaatacttgttgccatcgacggggtgctctgcggcatgattgccatcgcggacgccgtcaaacaagaagctgcgctggcggtgcacactctgcagtccatgggagtggatgtcgtcctcatcaccggagacaaccgcaagaccgctagagcaatcgccactcaggtcggcatcaacaaggttttcgccgaagtgctcccgtcccataaggtcgcaaaggtccaggaactgcagaacaaggggaagaaggtggcgatggtgggggacggagtgaacgactcaccggcccttgcacaggccgacatgggagtggcaattggaaccggaaccgatgtcgctattgaggcggccgatgtggtcttgatccgcaacgacctgttggatgtggttgcctcgatccatctgtccaaacggactgtccgcaggattagaatcaacctcgtgctcgccctgatctacaacctcgtcggtatcccgatcgcagcgggcgtgttcatgcctattggaatcgtgttgcagccgtggatgggatcagctgccatggccgccagcagtgtatccgtggtgctgtcaagcctgcagctcaagtgttacaagaagccggacctcgagcgctacgaggcccaggcgcacggacatatgaagccgttgactgcctcccaagtgagcgtgcatatcggcatggacgatcgctggcgggactcgccgcgggcgaccccgtgggaccaggtgtcctacgtgtcacaggtgtcgctgtcctccctgacctcagataagccatcgcgccatagcgccgctgccgacgatgacggtgacaaatggtcgctgctgctgaacggacgcgacgaggagcaatacatc

SEQ ID NO: 280109 - DNA, 4395 bp, Artificial Sequence
  derived and/or modified sequence
atgccagaacaagagcgccagatcactgcacgtgagggagcgtcgaggaagatcctgtcgaagctgagccttcccacccgagcctgggaaccggccatgaagaagtcgtttgcatttgataacgtgggatatgaaggagggcttgacggacttggacctagctcgcaagtggcgacttccactgtccgcatccttggaatgacctgtcagtcgtgtgtgaagtccatcgaagataggatttccaatttgaaaggtattatcagcatgaaagtgtcactggagcagggctcggcaaccgtgaagtacgtgccttccgtggtgtgcctgcaacaggtgtgtcatcagataggtgatatgggatttgaggcctcgattgcagagggtaaggcagcatcgtggccaagtcggtcgctgccagcacaggaagcagtcgtgaagctgcgcgtggaaggcatgacgtgtcaatcctgtgtgagctcgattgaaggcaaggtccgcaaacttcaaggtgttgtgcgagtgaaagtgtcccttagcaatcaagaagcggtcattacctaccaaccatacctgattcagccagaagatcttagagatcatgtgaatgacatggggttcgaagcggcgatcaagtcgaaagtggcacctctgtcgctgggacctattgatattgaacggcttcaaagcactaaccctaagcgtcctctttcatcagcaaatcagaacttcaataactccgaaaccttgggccatcaaggatctcatgtcgtcaccctccaacttagaatcgatggaatgcactgtaaatcctgcgtccttaacatagaggaaaacattgggcaactcctgggcgtgcaatcgatccaggtgtcgctggaaaacaagaccgcacaggttaagtacgacccatcctgcactagccctgtcgcccttcagagggcaattgaagctcttccgccaggaaactttaaggtgtcgctgcccgatggtgctgaggggtccggaacggaccataggtcctccagctcacatagccccggctcgcctcccagaaaccaagtgcaagggacttgctccaccactcttattgccattgccggtatgacttgtgcaagctgtgtgcactctatcgaaggtatgatttcccaactggaaggtgtgcagcaaatctccgtcagcctggcggagggcaccgccactgtgctgtacaatccgtccgtgatttcgcctgaagaactcagagcagcaattgaggacatgggctttgaggcatcagtggttagtgaatcatgttcgaccaacccgcttggaaaccattcggctggaaactctatggtgcaaactactgatggaaccccaacttccgtccaggaggtcgcaccgcataccggaagattgcccgcaaaccatgcacctgacatcctggcaaagtcaccgcaatcaactagagccgtcgcccctcagaagtgttttctccagattaaaggcatgacctgtgcttcatgcgtctcgaacatcgaaagaaatctccaaaaagaagcaggtgtgttgagcgtcctggtcgccttgatggcaggcaaggcagagataaagtacgaccctgaagtgattcaacctcttgaaatcgcacaattcattcaggatcttggttttgaggcagcagtcatggaggactacgccggtagcgatggaaacatcgagctcaccataaccggtatgacctgcgcttcgtgcgttcacaacatcgaatcaaaactgacccggaccaacgggatcacttacgcatcagtggcactggcgacttcaaaagccctggtcaagtttgatcctgagatcatcggtcctagagatatcattaagatcatcgaagaaattggatttcatgcatcgctggcacaacggaatcctaacgcacaccatctcgaccacaaaatggagattaagcagtggaagaaatctttcctgtgttccctcgtgtttgggatcccggtgatggccctgatgatctacatgctgatccctagcaatgaaccccatcagtcaatggtcctcgaccacaatatcatccctggactgtcgatactcaatctcattttctttatcctctgtacctttgtccagctgttgggagggtggtacttctacgtgcaggcatacaaatccctcagacatcggagcgccaacatggacgtgcttatcgtgctcgcaacctccattgcatacgtctattcgcttgtgattcttgtcgtggcagtggcggagaaggcagaacgttcgccagtgaccttcttcgacactcctcccatgcttttcgtgttcatcgccctcggtcggtggcttgaacatctcgcaaagagcaaaaccagcgaagccctcgccaaactgatgtcccttcaagcgacggaggccacggtggtgactcttggcgaagataatctgattatccgcgaagaacaagtccccatggagttggtgcaacgaggtgatattgtgaaggtcgtccctggtgggaagtttccagtggatggcaaagtcttggaaggtaatacgatggcagatgagtccctgattactggtgaagcaatgcccgtgactaagaagcctggttcgaccgtcatcgcaggttccatcaacgcacacggcagcgtgcttatcaaagccacccatgtgggtaacgataccacccttgcccaaattgtgaagctcgtcgaagaggcacagatgtcaaaagccccaatccaacagctggcagataggttctcgggatactttgtgcccttcattatcatcatgtcaactctgactttggtggtgtggattgtcattggctttattgatttcggagtggtgcagagatactttccaaacccgaataaacatatctcacagactgaagtgattattcgatttgcattccaaaccagcattaccgtgctctgtattgcgtgtccttgttccctgggcctggccacccctactgcagttatggtgggaactggcgtggccgcccaaaacggaattctgattaagggtggtaaaccactggaaatggcgcataagataaagactgtgatgtttgataagactggcactatcactcacggggtgccacgcgtgatgagagtgcttcttctgggtgatgtcgcaacgctgcccctgcgtaaggtgctcgccgtggtgggaacggcagaggcctcctcagaacacccactgggcgtggccgtcactaaatactgcaaggaagaacttgggactgaaaccctcggatattgtactgactttcaagccgtaccagggtgcggaattggatgtaaggtgtcaaacgtggagggaatccttgcacattccgagaggcccctgtccgcccctgcatcacatctgaatgaagcgggctctttgcccgcagaaaaagacgcagtgccgcagacctttagcgtcctcattggtaatcgtgaatggctgcgacgcaacggtcttacgatttccagcgacgtgtctgacgcaatgaccgaccatgaaatgaagggacaaaccgctatcctcgtcgccatcgacggtgtgctgtgtgggatgatcgctatagcggacgcagtgaaacaagaggcagcacttgccgtccatactctgcaatctatgggggtggatgtggtgttgatcactggggataaccgtaagaccgccagggcaattgctacccaggtgggtattaacaaggtctttgcagaagtgctgccatcccataaggtcgcaaaggtgcaggaactgcaaaacaaaggaaagaaagtcgcaatggtgggggatggggtgaacgatagcccagccctcgcccaggccgatatgggagtggcaataggaactgggactgacgtggccatcgaagcagcagacgtggtgctgattcgcaacgacttgctggatgtggtggcttcgatccatctctcgaaacgtaccgtcaggaggatccgcatcaacctcgtcttggcactcatctacaacctcgtcggtattccgattgctgcgggtgtctttatgcctattggaatagtcctgcagccgtggatgggaagcgcagctatggctgcaagctcggtgagcgtggtgctctcctccctccaactcaagtgttataagaagcctgatctcgaaagatacgaagcccaagcacatggtcatatgaagcctcttactgcatcccaggtgtcagtgcacattggaatggatgatcgctggagagacagccctcgggcgaccccatgggatcaagtctcatacgtgtcgcaagtctccctcagctcccttacctccgacaagccgtctcgtcattccgcagcagcagacgatgatggggataagtggagccttcttttgaacggtcgggacgaagagcaatacatt

SEQ ID NO: 280110 - DNA, 4395 bp, Artificial Sequence
  derived and/or modified sequence
atgccagagcaggagcggcagatcacagcacgtgagggcgctagtagaaagatcctgagtaaattgtctttaccaaccagggcttgggagcccgccatgaaaaaaagctttgcgtttgataacgttggttacgaaggagggcttgacgggctggggccgtcaagtcaggtggccacctctactgttcgcatcctcggcatgacttgccaatcctgtgtcaaaagcatcgaggatcgcatttccaaccttaagggaatcatctcaatgaaggtttctctggagcagggatcagccaccgttaagtacgtgccgtccgttgtgtgcctgcagcaagtctgccaccagattggcgatatggggtttgaggccagtatcgccgaaggcaaggccgccagctggccatcccggagcttaccagctcaggaagccgtggtgaaactgcgcgtcgagggtatgacatgccagagttgcgtttctagcattgagggcaaggtcaggaaactccaaggagtggtgcgagtaaaagtgagcctgagcaatcaggaggcagtcataacctatcagccttacctgatccagcctgaagatctgcgcgatcacgtgaatgacatgggattcgaggcagcgatcaaatctaaggtcgccccactgagtctgggccctattgacattgaacggctgcagagtaccaatcccaaaagacctctgtcctcagctaaccagaactttaataactccgaaaccttgggccaccaggggtcccacgtcgtgactcttcagctgcggatcgatggaatgcactgcaagtcttgtgtcctcaacattgaggagaacatcggccaactccttggagtgcagagcatccaagtgtcattggaaaacaagaccgcacaagtgaaatatgacccatcttgtacaagtcccgtagcccttcagcgggctatcgaggccttgccacccggaaattttaaggtttccctgccagatggagcggagggcagcggcaccgaccacaggagcagctcctcccactcacccggcagcccacctaggaatcaagtgcaagggacatgctcaactactctgatcgctattgccggtatgacttgcgcgagctgcgtgcacagtattgagggcatgatctctcagctggaaggcgttcagcaaatttcagtgtccttggctgaaggcacagcaaccgtgctgtacaatccgtccgttatctcccctgaggaattgagagccgccatcgaggacatggggtttgaggcgtcagtagtctccgaatcctgttccaccaaccctttggggaatcatagcgccggcaacagtatggttcaaactacagatgggacaccgacctcggtccaggaagtcgctccgcatactggacgattgccagccaaccacgcaccggatatattggctaagtcaccccagtccactcgggcggtggccccccagaagtgtttcctgcaaatcaaggggatgacgtgtgctagctgtgtttccaacatcgagcggaacctgcaaaaggaggccggcgtactgagcgtgttagtagctctgatggctggaaaagctgaaatcaagtacgaccccgaagtcatacagcccctggaaattgctcagttcatccaggatctcgggtttgaggccgcggtgatggaggactatgccggctctgacggcaatatcgaactcaccataacaggtatgacatgtgctagctgcgtgcataacattgagagtaagctgacaagaactaacggcataacatacgccagcgtcgcactggctacctccaaagcactggtcaagttcgatccagagataattggaccacgagatataattaaaattattgaagagattggctttcacgctagcttggcccaacggaacccaaacgcccatcatctcgaccataaaatggagatcaaacagtggaagaagtcctttctttgttctcttgtgtttggcatcccagttatggcgctcatgatctatatgctcattccttccaatgaaccgcatcagtccatggtgctggaccataacataataccaggtctctcaatcctgaacttgatattttttattctgtgtacctttgtgcaactgctgggagggtggtacttctatgtacaggcttataagtccctgcgccataggagcgcgaatatggacgtcctcatcgttctggctaccagcatagcctatgtttattctctggtaatcctcgtcgtggccgtggctgaaaaggcggagaggagccctgtgacattcttcgacaccccaccaatgctcttcgtcttcattgccttgggtcggtggctggagcatctcgccaaaagcaagacatcagaagctctagccaagctcatgtctctacaagcgactgaagccactgtggtcacccttggcgaggacaacctcattattcgagaagagcaggtgccaatggaactggtgcaacgaggtgacatcgtaaaggttgtacctggcgggaaattccccgtggacgggaaggttctcgagggcaacaccatggctgatgagagcctcatcactggagaggcaatgccagttaccaaaaaacccggatccacagtgattgccgggtcaattaacgcccatggcagtgtgctgataaaagcgacccacgtgggtaatgacacaacactcgcccagatcgttaaattggtagaagaagcccagatgagcaaagcacccatccaacagcttgctgatagattcagtgggtattttgtgccgtttatcattattatgagtactttgactcttgtagtttggatcgtgatcggctttattgactttggggttgtgcagcgttatttcccaaacccaaacaaacatattagtcagactgaagttataattaggttcgcttttcagacatcaattacggtcctctgtatcgcatgcccctgtagcctcgggctagccaccccaacagccgtaatggtgggcactggcgtagcggcccagaatggtatcttgatcaaaggcgggaaaccactggagatggctcacaagatcaagaccgtaatgttcgacaaaacaggaactattacccacggggtaccccgggtcatgcgcgtcctcttactgggcgacgttgctaccctgcctctccggaaagtcctcgcagtggtgggcacggcagaagcaagctcagaacatccattaggtgtcgccgtgactaagtattgtaaagaggagttggggacagagaccctcggctactgcacagatttccaggcagtgccagggtgcgggattggatgtaaagtgagcaacgtagagggaatactggcccattcagagcgaccgctatcagcacctgcatcccatctcaacgaggccggcagtctgccagctgaaaaggacgctgtgccacagacgttttctgtgctgattggcaatagagagtggcttcgtagaaacggtctcacaattagtagcgatgtctcagatgctatgaccgaccatgagatgaaggggcagacagctattttggtggccatcgatggcgtgctctgtggaatgatcgctatcgcagacgcagtcaagcaggaagcagcactggcagttcataccctccagtcaatgggggtcgacgttgtcctcatcacaggggacaatcggaagactgccagggcaatcgccacacaggtaggcatcaataaggtctttgccgaggtgctccctagccacaaggtggcaaaagtacaggaactgcaaaataagggaaagaaggttgccatggtgggtgacggggtgaacgacagtccagctttagctcaggctgacatgggagttgcaatcggaacgggtaccgacgtcgcaatcgaggccgcagacgtcgtgctgatccgcaacgatctgttggatgtggtggctagtatacatctctcgaagagaacagtgcgacgcatccggattaacctggttttagctctgatctacaatctggtgggaattccaatagccgccggcgtgttcatgcctatcggcatagtgctccaaccttggatgggaagtgctgcgatggccgcgtctagcgtaagcgtcgtcctgagctctctgcagctaaagtgctacaagaagccggacctggaacgctatgaggctcaagctcacggccatatgaagcctttgactgcttcccaggtttcagtgcatataggcatggatgaccgctggagggacagccctagggctacgccttgggaccaggtgagttatgtgagtcaggtctcactgtcaagcttgacaagcgataaaccctctcggcacagcgccgctgcagacgatgatggcgataagtggtctttgctcctgaacggtcgtgatgaggagcagtacatc

SEQ ID NO: 280111 - DNA, 4395 bp, Artificial Sequence
  derived and/or modified sequence
atgccggaacaagaacggcagattaccgcacgtgaaggggcaagcagaaagattcttagcaaactgtcacttccaaccagagcctgggagcccgccatgaaaaagtccttcgcgtttgacaatgtgggctacgagggaggacttgatggacttggtccttccagccaagtcgcaacttccactgtccgcattcttggaatgacctgccaatcgtgtgtgaagagcattgaagataggatttccaaccttaaaggcattatctcaatgaaagtgtcccttgaacaagggagcgcaaccgtgaagtacgtgccttcagtggtctgtctgcaacaagtgtgtcaccagattggagatatggggtttgaagcatccatcgcagaaggaaaggctgcctcctggccgtcgcggtccctgccagcacaagaggcagtggtgaagctgcgggtggaaggtatgacgtgccagtcgtgtgtgtcatcgattgagggcaaagtgagaaagctgcagggagtggtccgggtgaaggtgtcgcttagcaatcaagaggctgttatcacctaccagccataccttatccaaccagaggacttgagagatcatgtcaatgatatggggttcgaggcagcaatcaagtcgaaggtggccccactgtcgctggggcctatcgacattgaacgccttcaaagcactaaccctaaacggcccctttcctcggcaaaccagaactttaacaactcggaaaccctgggccatcagggctcccatgtggtcactctgcaactgcggattgatggcatgcactgtaagtcctgtgtgctgaacatcgaagagaacattggtcaacttctgggcgtccagagcatccaggtgtccctcgaaaacaagacggcccaggtgaaatacgatcctagctgtacttcacctgtggctctccagcgcgcaatagaagcactgcctccgggcaactttaaagtgtcgctgcctgatggcgccgaaggatccggcactgaccatcgctcctccagctcccatagccctggttctccacctcggaatcaagtgcaagggacttgttcaactactctgattgcaattgcagggatgacgtgtgcatcatgcgtccattcaatcgaaggtatgatcagccaacttgaaggtgtccaacaaatctcagtgtccctggcagagggtactgccaccgtgctgtacaatccgtccgtgatctcacctgaggagctgcgggcagcaattgaagatatgggcttcgaagcatcggtcgtgtccgaaagctgtagcaccaaccctctcgggaaccatagcgcaggaaactccatggtccaaaccaccgatggaactcctacttcggtgcaggaagtcgcaccacataccggacgcttgccagcaaatcatgccccggatatcctggctaagtcaccccagtcgacccgcgccgtggccccacagaagtgcttccttcagattaagggaatgacttgcgcttcatgtgtgtcgaatatagaacgaaaccttcaaaaagaggcgggagtcctctcagtcctcgtcgccctcatggcaggaaaggcagagataaagtacgaccctgaagtcattcaaccgttggagatagcccaattcatccaagatttgggatttgaagccgcagtcatggaggactacgcagggtcggacggaaacattgagcttactataactgggatgacctgtgcctcttgcgtgcataacattgaatcgaaacttaccagaaccaatggaatcacctacgcttctgtggcccttgcgactagcaaggcacttgtcaagtttgatccagagattattggtcccagagacattatcaagattattgaggagatcggatttcatgccagcctggcacaaaggaatcctaacgcacaccacctggatcacaagatggaaatcaagcaatggaagaagtcatttctttgttccctggtgtttggtataccagtgatggccctcatgatttacatgcttattccatccaacgagcctcatcagtcaatggtgctggatcacaacattattcctggcctttccatactgaacctgatcttctttattctgtgtacgtttgtccagctccttggtggttggtacttctacgtccaagcctacaagtccctccgtcatcggtcggcaaacatggatgtgctgatagtgctggcaacttccatcgcatacgtctatagcctcgtcatactggtggtggcagtggctgaaaaggcagaacgatcccccgtcactttctttgatactcctcccatgttgttcgtgttcatcgcgcttggtcgatggttggaacatctcgcgaagtccaagactagcgaggcattggcaaaactcatgtcacttcaagctactgaagccactgtggtgacgctcggagaagataatctgatcataagagaggagcaagtgccaatggaactggtgcagcggggggacatcgtgaaggtggtgccgggtgggaagtttccagtggatgggaaagtgctggaaggaaatacgatggcagatgaaagcctgattactggtgaagcgatgcctgtgaccaagaaacccgggtcaactgtgattgcaggtagcatcaacgcccatggatcggtgttgataaaagcaacccatgtgggaaatgataccaccctggcgcaaattgtgaaactggtcgaggaggcacagatgtcgaaggcaccaatccaacagctggctgatagattcagcgggtactttgtcccatttatcattatcatgtcgaccctgaccctggtggtgtggatagtgattgggttcattgactttggcgtggttcagaggtacttccctaaccccaacaaacacatttcccaaaccgaggtcatcatacgctttgcgtttcagacctccataaccgtcctgtgcattgcatgtccttgctcgctgggactggcaacccctactgccgtgatggtgggaactggagtcgcagcacaaaacggtatcctgattaaaggaggtaagccacttgagatggctcacaaaatcaagaccgtgatgtttgacaaaaccggcactatcacccatggcgtgcctcgcgtgatgagggtcctgttgctgggtgacgtcgctaccctgcctctgcgcaaggtcctggcagtggtcggtaccgcagaagcctcctcagagcatccactgggagtggcagtcactaagtactgtaaggaggaacttggaaccgaaactttgggatattgtaccgatttccaagccgtgcccgggtgtggaattggttgtaaagttagcaatgtggaaggaattctggcccacagcgaacggccactgtcggcgccagcatcgcatcttaacgaagccggcagcctgccggcggagaaagacgcagtgcctcagaccttctcggtgcttattggcaacagagagtggctgaggcgcaacggtctgactatctcatcggatgtctccgatgcaatgactgatcatgagatgaagggacaaacggcaatccttgttgcaattgacggtgtcctttgtggaatgatcgccattgctgacgccgtcaagcaggaagcagcacttgctgtgcatacccttcaatccatgggagtcgatgtcgtcttgattactggagataacagaaaaaccgcccgcgcaatcgcaacgcaagtcggtataaacaaggtgttcgcggaggtgctcccatcccataaagtcgcaaaagtgcaggagcttcaaaacaagggaaaaaaggttgcaatggtgggtgatggtgtgaacgacagcccagcgctggctcaggccgatatgggagtcgccattggaaccggaaccgatgtggcgatcgaagctgcagatgtggtgctgattaggaacgaccttcttgatgtggtggcatcgattcatttgtcaaaaagaaccgtccgtagaatcaggattaatctcgtactcgccctgatttacaacctggtcggtatccccatcgctgctggagtgtttatgcctatcggtattgtgctgcaaccctggatgggctcggcagcaatggccgcaagcagcgttagcgtcgtcctttcgagcctgcaactgaagtgctacaaaaaacctgacctggagagatacgaagcacaagcgcatggtcacatgaaacctttgaccgcatcccaggtgtccgtgcacataggcatggatgaccggtggagagattcgcctcgtgcaactccctgggaccaagtgtcctacgtgtcccaagtgagcttgtcctcacttacttcggataagcccagcagacactccgcggcagcggatgacgacggagacaagtggtcacttcttcttaacgggagagatgaagagcagtatatc

SEQ ID NO: 280112 - DNA, 4395 bp, Artificial Sequence
  derived and/or modified sequence
atgccagagcaggaaaggcagattacagcaagagagggcgcaagtcggaagatactcagcaagctttcactgcccacaagggcgtgggagcctgctatgaagaaaagctttgctttcgataatgtgggctatgaaggaggcctggacggtctcggccccagttctcaggttgcgacgagtacagttcggatcctggggatgacctgccagagctgtgtgaagtctattgaggatagaatcagcaacctaaagggcataatttccatgaaggttagtctggagcaaggatccgccaccgttaaatacgtgccctccgtcgtctgccttcagcaagtgtgtcatcaaattggggacatgggtttcgaagcgagtattgccgaggggaaagccgcctcgtggccgtcgcgcagcctgcctgctcaggaggcggtggttaagctcagggtggagggtatgacttgccagtcttgcgtgtccagtatagaaggaaaggtgcgaaagctgcagggtgtggttagggtgaaggtgtctttgtcaaaccaagaagcggtgataacctaccaaccatacctcatccagcctgaggacctccgggatcatgttaacgatatgggcttcgaggccgcgatcaaatccaaggtggcacctctaagtctgggccccatcgatattgaaagactccaaagtacgaatcctaaacgccctctgtctagtgcgaaccagaacttcaacaatagcgaaaccctgggccaccaaggatcccatgtagttacgttgcaactgcgcattgatggaatgcactgcaaaagctgtgtcctcaacatcgaggagaacatcggccagctcctgggggttcagagtatacaggtgtccctcgagaataagacagcacaggttaagtacgatccctcctgtacttccccagtcgcactccagagagccattgaggccctgcctccggggaactttaaggtgtcccttccagatggagccgagggctccgggacagaccacagatcctcctcatctcattcaccagggtctcctccccggaatcaggtccaggggacatgctctacgactttgatagcgattgccggaatgacctgtgctagttgcgtccacagtatcgagggcatgattagccaattggaaggcgtgcagcagatatctgtgtctttggcagaaggcaccgctaccgtgctttataacccgagcgtgatcagcccggaagaacttcgcgcagccatcgaggatatggggtttgaggcctctgtagtttccgaatcctgttcgacaaacccattggggaaccattcagctgggaactcgatggtccagactacggacggaactcccacctccgttcaggaggttgctccacatacaggcagactccccgctaaccacgcgcctgacattcttgcaaagtcccctcagagtacccgggccgtagcccctcagaagtgctttttacagatcaaaggcatgacttgcgcgtcatgcgtaagcaatatagagcggaatctacagaaggaggccggggtgctgtctgtgctcgtagcactaatggccgggaaagcggagattaagtacgaccccgaagtcattcagcctttggaaatagctcagttcatccaggacctcggatttgaggccgccgtaatggaagactacgccggaagcgacggcaatattgagctcacgatcacagggatgacctgcgcctcatgtgtgcacaacattgaatccaaactgacacgaactaacgggattacatacgcttccgttgccctggcgacatccaaagccctggtcaagtttgaccctgagattattgggccccgcgatatcattaagataatagaagaaattggcttccacgcgagcctggctcagaggaacccaaacgcgcaccatctggaccacaaaatggagatcaagcagtggaaaaaaagtttcctgtgctccttggtgttcggcatccccgtgatggcgcttatgatctacatgttgattcccagcaatgagccccatcaatctatggtgctggaccataatattatccctggattatccattctgaatctaatattttttatcctgtgtaccttcgtccaactgcttggaggttggtatttctacgttcaggcctacaagagcctccgacataggagcgccaatatggacgtgttaattgtcttggccacatccattgcgtatgtctactccctggtcatcctggtggtcgccgtagccgagaaagccgaacgcagtcccgtgacgtttttcgacacacctcccatgctgtttgtgtttattgccctaggtaggtggctcgagcacctcgccaagtccaaaacctccgaagccttagctaaactgatgtccctgcaggccactgaagctacggtggtgaccctgggcgaggataatctcataatccgggaggagcaggtacccatggagctcgttcaacgaggtgatattgtaaaggtggtccctgggggaaagtttcccgtagacgggaaagtgctggaaggtaacacgatggcggatgaaagcttgatcacgggcgaagcaatgccggtgaccaagaaaccaggcagcaccgtaatcgcggggtcaattaatgcacatggtagtgttctgatcaaagctactcacgttggcaacgacacgactcttgcccaaatcgtcaagctcgttgaagaggcccagatgagtaaagctcctatacagcagttggccgatcgattcagcgggtactttgtgcccttcatcattatcatgtcaacgcttacccttgtggtgtggatcgttatcggctttatcgattttggcgttgtccaacgttacttcccaaaccccaacaaacacatcagccagactgaggtgatcatcaggtttgcgttccagacttctatcacggtgctgtgtatcgcctgtccctgtagcctggggctcgcaacacccacagcagtcatggtcggaacgggagtagctgcccagaacggcatccttattaagggcggtaaacccctggagatggcacacaagattaaaaccgttatgtttgataagaccggaacgattactcatggtgtccccagggtgatgcgagtactgctgctgggagatgtagcgacattgcctctgcgcaaggttctcgccgtcgtggggacggcagaggcttctagtgagcacccactcggggtggctgtcaccaagtactgcaaagaagagctgggtaccgaaactctgggatattgtaccgactttcaagccgtgcccggttgcggcatcggctgcaaggtctccaacgtcgaaggaatactggcccactctgagcgtccgctgtcggctccagcatctcatctcaatgaagccggctcattgcctgcagaaaaagatgccgtcccccagaccttctcagtgttaattggcaacagagagtggctgcggcggaatggcctaaccatcagcagcgatgtcagtgacgctatgaccgatcacgagatgaaagggcaaactgctatcctagtagccattgacggggtgctttgcggtatgatcgccatcgctgacgccgtgaaacaagaggccgcgctggcagtgcacaccttacagtcaatgggcgtggacgtcgtgctgattaccggagataatcgcaagactgcgagggcaatagcaacgcaggtggggataaacaaggtttttgccgaagtgctgcctagccacaaagttgccaaggtccaggaactgcagaacaaagggaaaaaggtagccatggtcggtgatggcgtgaacgactctccggctcttgcacaggccgacatgggtgtggccattggcaccgggacagatgtggctattgaagccgctgacgtggtgctcatacgcaatgatctcctggatgtggtggccagcatacatctctctaaacggacagttcggaggatcagaataaatctcgtgctagccttgatctacaacctggtcggcatcccgatcgcagccggagtattcatgccaatcggcatcgtgctacagccatggatgggatcggcagccatggccgcctcttcagtcagtgtggtgttgtcctcactgcagctgaaatgctacaaaaagcccgacctggagagatacgaggcacaagcccacggtcacatgaagcccttgacagcgagccaggtcagtgtccacatcggcatggacgatagatggcgcgactccccccgggccacaccatgggatcaggtgtcttatgtttcacaagtgtccttgtccagcctcacatctgataaaccttcccggcattccgcagctgcggatgacgatggcgacaaatggtcattactgcttaatggaagagacgaggagcagtacatc

SEQ ID NO: 280113 - DNA, 4395 bp, Artificial Sequence
  derived and/or modified sequence
atgcccgaacaggagcggcagatcacggcccgagagggggcttcccgcaaaattcttagtaaattaagccttcctactcgcgcatgggaacccgcaatgaagaagtcattcgccttcgataatgtcggatatgaaggcggtttggatggcctgggtccaagctctcaagtggccacatccacagtgcgcattctcgggatgacatgccaatcctgtgtcaagagcatcgaggacaggatttccaatctcaagggcattatttctatgaaagtgtcccttgagcagggctccgccaccgtgaagtatgtgccttccgtcgtctgcctccagcaagtgtgccaccagatcggcgacatgggtttcgaggcatcaatcgcagaggggaaagcagcgagctggccgagtcgcagtctgccggcacaagaggctgtggtgaaactgagagtggagggcatgacttgccagagttgtgtaagttctatcgaggggaaggttcgaaagttgcagggtgtggtgagggtgaaagtgagcctttcaaatcaggaggcagttatcacctaccaaccatatctgattcagcccgaggacctgagagaccatgttaacgatatggggtttgaagccgcgattaagagcaaggtcgctcccctgtctctggggcctatcgacattgagcgactgcagagtacaaaccccaagcgtccgctgtctagcgcaaatcagaattttaacaacagcgagacgctaggccaccagggaagtcatgtggtgactctgcaattacggatagacgggatgcattgcaaaagctgcgtgctgaatatcgaggaaaacattggccaattgctaggtgtgcagtcaattcaggtgtctctcgagaacaagaccgctcaagtcaagtatgacccgagctgcacctctcctgtggctctccagagagcgattgaagccctgccccccggtaacttcaaagtcagcttgccggatggcgccgaagggagcggaacggatcatcgctctagtagcagccatagcccaggaagcccaccccgaaaccaggtgcagggaacttgctctacaaccttgatcgcaattgctggcatgacctgtgcatcctgtgtacacagtatcgaggggatgatcagtcaattggagggggtacagcagattagcgtgtcactcgcagaagggacagctactgtattatacaacccttctgtcatctcccctgaggaactccgtgctgccatagaggacatggggtttgaagcctcagtggttagcgaatcttgcagcactaatcccctcggaaaccatagcgccggaaactccatggtgcagacaacagatggaacaccgactagtgtgcaggaggtggccccacacacaggaaggctgcccgccaaccacgcaccggacatcttggcaaagtcccctcaatccacgcgtgccgtcgcgccacagaagtgttttttgcagatcaaaggaatgacttgtgcctcctgtgtgtccaatattgaaagaaatcttcagaaagaggcaggggtgctgtccgtcttggttgcactgatggcaggtaaggccgaaattaaatacgaccctgaggtgatacaacccctggagattgcacagtttatacaggacctcggctttgaagccgctgtaatggaggattatgctgggtccgatggaaatatcgagttgactatcacagggatgacatgcgccagttgcgtgcataacatagaaagtaagctaacccgcaccaacggtataacgtatgccagcgtggcccttgccacaagcaaggctttagtcaagttcgatcctgagatcataggcccgagggatataattaagatcattgaggagatcggatttcatgcgtccctggctcagcggaatcccaacgctcaccacctggaccacaagatggaaatcaaacagtggaagaagtcgtttctctgtagcctcgtgttcggaatccccgttatggccttgatgatttatatgttgatcccgagcaatgagccccaccaatccatggtgctcgaccacaatatcatccctgggctgtctatcctgaatctgatcttcttcattttatgcactttcgtgcagctgctgggcggatggtacttttacgtgcaagcctacaagtcccttcggcaccgtagtgccaacatggacgttctcattgtgctggccacatcaattgcgtatgtgtactccctggtgatcttggtggtagctgtcgctgaaaaagccgaacgttccccagtcaccttttttgatacccccccaatgttatttgtatttatcgccctaggccgatggcttgagcatctggccaaatctaaaacatcagaggctctcgcaaaactcatgagcctacaggccacagaggccactgtcgtgaccttaggggaagacaacctgattatccgcgaagagcaggtaccgatggaactggttcaaagaggagacatagtcaaggtggtcccagggggtaagtttcctgttgacggcaaagtgttggagggaaacacgatggccgatgaatccctcattacaggggaggccatgcctgtaaccaagaagccaggctctaccgtgatcgccggaagtataaacgcacacggctcagtgcttatcaaggccactcacgtcggaaatgacactacacttgcccaaattgtcaagctcgtcgaagaagctcagatgtcgaaggcccccatccagcagctggccgatcggttttcaggttattttgtgccatttattatcattatgtctacgctgaccctggtcgtatggatcgttataggcttcattgatttcggagtggtgcagcgatactttcccaaccctaataagcacatctcacaaaccgaagttatcatccggttcgccttccagacctccatcaccgttctgtgcatagcctgcccttgcagtctggggctcgctactcctacggccgtcatggtgggcaccggcgttgctgcacagaatgggatcttgatcaagggaggtaagcctctggagatggcgcataaaataaagaccgtgatgttcgacaaaacaggaaccatcactcatggcgtgcctagagtgatgcgagtactgttgctcggcgacgtggcaacacttcccctccgaaaggtgctggcagtggtgggaaccgccgaggcgagttccgaacatccactcggagtagccgtgaccaagtactgcaaggaggaactgggcacagaaacgctaggctattgcaccgactttcaggccgtgccaggttgtggtatcggctgtaaagtctctaacgttgaaggaatattggcacacagcgagcgaccattgagcgcacccgcgagccatctaaacgaggcgggatctcttccggcagaaaaagatgcagtacctcagactttctcagtcctgattggaaaccgcgagtggctgagaagaaacggactaactatttctagcgacgtcagtgatgccatgacggatcatgaaatgaagggccagactgctattctagtggccatagatggtgttctgtgtgggatgattgcaatagctgatgcagtgaagcaggaagcagccctcgcggttcacacccttcagagcatgggagtcgatgtggtactgattacaggggacaacaggaagaccgcgcgggcgattgctacccaagttggcataaataaggtgtttgccgaagttctgccaagccataaagtggccaaggtgcaggagctgcaaaacaaaggtaagaaggtagctatggtaggagatggtgtgaacgactcaccggcccttgcccaggcagatatgggtgtggctatcggcaccggtaccgatgtcgcgattgaggcggcagacgtagttcttatacggaacgacctgctggatgtcgtcgcttccatccatctctctaaacgaacagtgcgtcgcatcaggattaacttagtactggcactgatctataacctggtgggaattcccattgctgccggagtttttatgcccatcggaattgttttacagccatggatgggttcggcggccatggcagcatcttctgtaagcgttgtactgtcctccttgcagctcaagtgctataagaagccggatctggagcggtatgaagcgcaggcccacggacacatgaagcccttgacggcaagccaggttagtgtgcacatcggcatggatgatcgatggagagatagcccccgcgccacaccatgggatcaggtatcgtatgtgtcacaggtaagcctgtcctctctgacctccgacaagcctagtagacactcagccgccgccgatgatgatggggacaaatggtccctcctcctcaatggacgggacgaggaacagtacatc

SEQ ID NO: 280114 - DNA, 4395 bp, Artificial Sequence
  derived and/or modified sequence
atgccagaacaagagcggcagattacggccagagagggcgcgtcgagaaagatcctgtcgaagctgtcgctgcccactcgagcgtgggaacccgcaatgaagaaatcatttgccttcgacaatgtgggttacgagggcggactggatggactcgggccgtcatcgcaagtggccacctcaactgtccgcatcctcgggatgacttgccagtcctgtgtgaagtctatcgaggacagaatcagcaatctcaaaggcatcatttcaatgaaagtctccctcgagcagggatccgctactgtgaaatacgttccgtcagtcgtttgcctgcaacaggtgtgtcaccagatcggggacatggggtttgaagcgagcatcgcagagggcaaagccgcgtcgtggccttcccgatcgctcccagctcaggaagctgtggtcaagctgcgggtggaaggcatgacgtgccagtcgtgcgtgtcaagcatcgagggaaaggtgaggaaattgcagggagtggtccgggtcaaggtgagcttgtcgaaccaggaggcagtgatcacctaccaaccgtatctgatccagccggaggacctgcgcgatcatgtgaatgacatgggctttgaggcggcgatcaagtcgaaggtcgcaccgttgtcccttggtccaatcgatatcgaacggctgcagtcgaccaacccaaaacggccgctgagctcggcgaatcagaacttcaacaactcggaaactctgggacaccaggggtcccatgtggtgaccctccaactgcgcatcgacggaatgcattgcaaaagctgtgtgctcaacatagaagaaaacatcgggcagctgcttggagttcagagcatccaggtgtcactcgagaacaagactgcccaggtgaagtacgacccgtcctgcacttccccggtcgcgctgcaaagggctatcgaggctctcccgcccggaaactttaaagtcagcttgccggacggagcggaaggatccgggaccgatcacagatccagctcatcccacagccctggctcaccgccgcgtaatcaggtgcagggcacctgttctactaccctcatcgctatcgcgggtatgacgtgcgcttcctgcgtgcattcgatcgaggggatgatttcccaactcgaaggggtgcaacagatctcggtatccctggccgaagggaccgcaactgttctgtacaacccctcagtgatttcgccggaggaactgcgggctgccatcgaagatatgggatttgaagcgtccgtggtttccgaatcatgttcgactaatccattgggaaaccattcagcggggaactcgatggtgcagactactgatggaacccctacttccgtgcaagaggtggccccgcacactggtcggttgccagctaaccatgcaccggacatcctggccaagtcaccgcagtcgacccgcgccgtggcaccccaaaagtgcttcctgcagatcaaaggtatgacctgtgcgtcatgcgtgtcaaacattgaacggaacttgcaaaaggaagcgggagtcctgtcagtgctggtggcactcatggccgggaaggcagaaatcaagtatgatccggaagtcatccagccactggagattgcgcagttcatccaagacctgggattcgaggccgcagttatggaagattacgcaggcagcgatggaaacatcgagctcactatcacgggcatgacttgcgcctcatgcgtccacaacatcgagtccaagctgactcgcaccaatggaatcacctacgcctcagtcgccctcgctacctcaaaggcgttggtgaagttcgaccccgagatcatcggacctcgcgacattatcaaaatcatcgaggaaatcggtttccatgcgagcctggcacagagaaacccgaatgctcaccacctggaccacaaaatggaaatcaagcagtggaagaagtccttcctgtgctcgttggtctttggaatcccagtgatggccctgatgatctacatgcttattccgtcaaacgaaccccatcaatccatggtgcttgatcataacatcattcctggactgtctatcctgaatctcattttctttattctgtgtaccttcgtccaacttcttgggggatggtacttttacgtgcaggcctacaagagcctgagacatcggagcgctaacatggacgtgctgatcgtgctggcgacctctatcgcatacgtgtactcgctggtgatcctggttgtcgccgttgccgagaaggctgagagaagcccagtcaccttcttcgacactcctccgatgctgttcgtgttcatcgccctgggaaggtggctggagcacctggccaagagcaagacctccgaagccctggccaagctgatgtcgctgcaggccactgaggcgaccgttgttactcttggagaggataatcttatcatcagagaagagcaggtgccaatggagctggtccaaaggggtgacattgtgaaagtcgtgccgggaggcaagtttccggtggatggcaaggtcctggaaggaaacaccatggccgacgaatcgctgattactggtgaagccatgcctgtcaccaagaagcctggatccactgttatcgcagggtcgatcaacgcgcacggtagtgtgctcattaaagctacccacgtgggaaatgatactactctcgcccagatcgtgaaactggtggaagaggcccagatgtccaaagcacctatccaacaactcgcggatcggttttccggttactttgtgccatttatcatcattatgtccaccctgactctcgtcgtgtggatcgtgattggattcattgattttggagtggtccagcggtacttccctaacccgaacaagcacatcagccagactgaagtgattatccggttcgctttccaaacttcgatcaccgtcctgtgcatcgcttgcccatgtagcttgggactcgccaccccaacggccgtaatggttggcactggagtggcagcgcaaaacggcatcctcatcaagggaggcaaaccgctcgagatggcacacaagatcaagactgtgatgttcgacaagacgggcaccatcacccacggagtgccgagagtgatgcgggtgctgttgctcggcgacgttgctaccctcccattgcggaaggtgttggccgttgtcggcactgctgaggctagcagtgaacatccgctgggggtcgccgtgaccaagtactgcaaggaagagctgggtaccgagactcttggatactgcaccgacttccaagccgtaccgggttgtgggatcggctgtaaggtatcaaacgtcgaaggaattctggcccactcggagcgtccactgtccgctcctgctagccacctcaatgaggcaggaagtttgccagcagaaaaagacgccgtcccacagaccttctccgtgctgatcggaaacagggagtggctgcgcagaaacggactgaccatctcgtctgacgtctcagacgccatgactgatcacgaaatgaaggggcagactgcaattctggtggcgatcgacggagtcctctgcggaatgatagcgatcgcggatgcggttaaacaggaagccgctctggcggtgcacactctccagagcatgggcgtggatgtggtgttgatcacgggagacaacagaaagaccgctagagcaattgcaacgcaggtcgggatcaataaagtgtttgccgaagtgctgccttcacataaggtggcgaaagtgcaggagctgcaaaacaagggaaagaaggtggcgatggtgggagatggagtgaacgattccccggcgttggcccaggctgacatgggtgtcgccatcggcaccggtacggacgttgcaatcgaagccgccgatgtcgtactgatccggaatgacctgctcgatgtggtcgcatcgatccacctttccaaacgcacggtcaggaggatccgcatcaacctggtcctcgcactgatctataatctcgtgggaatcccgatcgccgccggtgtgttcatgccgattggcatcgttctgcaaccatggatgggatccgcggcgatggcagcgtcctcggtgtccgtggtgctcagctcactccagctgaagtgctacaagaagccggacctggagcggtacgaggcacaagcacacgggcatatgaagccgctgactgcgtcccaggtgtcagtgcatatcggtatggacgacagatggcgggattcaccgcgcgcgactccctgggaccaagtcagctacgtgagccaggtttcgctctcgtcgctcacctcggacaagccgtccagacacagcgcggcggcagatgacgacggggacaagtggagcctgctcctcaacggccgggatgaagaacagtacatc

SEQ ID NO: 280115 - DNA, 4395 bp, Artificial Sequence
  derived and/or modified sequence
atgcctgagcaggagagacaaatcaccgcacgcgaaggggccagccgcaaaatcctgagcaagctctcgctcccgaccagggcatgggagcctgcgatgaaaaagtcctttgccttcgataacgtggggtacgaagggggacttgatggtctgggaccttcaagccaggtggctaccagcactgtgcggatccttggaatgacctgtcagagctgcgtcaagagcattgaagatcgcatttcgaatctgaaggggatcatctccatgaaggtgtcacttgaacagggttccgcaacggtcaaatacgtgccttcggtcgtgtgccttcagcaagtgtgtcatcagataggagacatgggtttcgaagcaagcatcgcagaaggaaaggccgcatcgtggccatcaagatctctccccgcacaagaagcagtcgtcaagttgcgtgtggagggaatgacttgtcaaagctgtgtgagctccatcgaaggtaaggtgagaaagctccagggcgtggtgcgcgtgaaagtgagcctgagcaaccaagaggctgtgatcacctaccaaccttacctgatccaacccgaagatcttagggaccatgtgaatgatatgggttttgaggcagcaattaagagcaaggttgcccccctctccctcggtccgattgatatcgaacggctgcaatccactaatcccaaacgtccattgtcgagcgcaaaccaaaacttcaataacagcgaaaccctgggtcatcagggatcccacgttgtgaccctgcaactcagaattgatggaatgcattgtaagtcgtgcgtgctgaatattgaagagaacattggtcaactcctgggtgtgcaatccattcaggtgtcccttgagaacaaaaccgcgcaggttaagtacgatccttcctgtacgtcgccagtcgctctgcagcgtgccattgaagcacttccaccaggtaacttcaaagtgtcgttgccagatggcgcagaaggttcgggaaccgaccacagatcaagctcatcgcattcgccaggctcacctcccagaaatcaggtgcaagggacttgttccaccacgcttatcgcaattgccggaatgacctgcgcttcgtgtgtgcattcaattgaaggtatgatcagccaacttgaaggtgtccagcaaatttccgtgtccctcgccgagggaactgccactgtgctttacaatccttcagtgatttcccctgaagaactgagagcggcaattgaggacatgggattcgaggcctccgtggtgtccgagtcgtgctccactaatcctctggggaaccattcagccggcaactccatggtccagaccaccgatgggacccctacctccgtccaggaggtggcccctcatactggtcgccttcctgccaatcacgcacctgatattctggcaaagtcgcctcagtcgactagagccgtggcaccgcagaagtgttttcttcagatcaaaggtatgacttgcgcatcgtgcgttagcaacattgaacgcaacctgcaaaaggaagcgggagtgctctccgtgctggtcgctctgatggcaggtaaggcagaaatcaagtacgacccagaagtcatacaacctcttgaaatcgcccagtttatacaggatcttggttttgaagcggcggtgatggaagattacgcaggatccgatggtaacatcgaactcaccatcactggaatgacttgcgccagctgtgtgcataacatcgaatccaaacttacgcgcactaacggtattacttacgcaagcgtcgcactggcaacctcgaaggcactcgtgaagtttgacccagagattatcggtccccgggacatcattaagataattgaggaaattgggttccacgcatcgctggcacaacggaatcctaatgcacaccatctggaccacaaaatggagatcaaacaatggaaaaagtcattcctctgtagcctcgtctttggcataccggtgatggcacttatgatctacatgctgattccttcgaatgagcctcaccagtcaatggtgctggatcataacataattccaggacttagcattctcaatctgattttctttattctttgcaccttcgtgcagctgctgggaggttggtatttctacgtccaagcatacaaaagcctgaggcaccgaagcgcaaatatggatgtgctcatagtcctggctacttcaatcgcatacgtgtatagcctggtgatcctggtggtggccgtcgcagagaaggcagaaaggtcacctgtgactttctttgacactccaccgatgcttttcgttttcattgcacttggtcgctggctggagcaccttgccaagagcaaaacctccgaggcacttgcgaaacttatgtcgcttcaggccactgaagcaactgtggtaacccttggtgaagataatctgattattcgggaggaacaagtgccgatggaacttgtgcagcgcggagacatagttaaggtcgtcccaggtggcaagtttcctgtggatggaaaggtgttggaaggtaacactatggcagatgaatcgcttattaccggagaagccatgcctgtcaccaagaaacccggctcgactgtgattgcgggttcgatcaacgcacacggttccgtcctgattaaggcaacccatgtcggtaacgacaccacccttgctcaaattgtgaagctggtcgaagaagcacaaatgtccaaggcgcccatacaacagctggctgatagattctccgggtacttcgtgccattcatcataatcatgtcgactcttactctggtggtgtggattgtgataggattcatcgactttggcgtcgtgcaaaggtactttcctaacccaaacaaacacattagccaaactgaagtgattatcagatttgcctttcagacctcaatcacggtgctgtgtattgcctgcccttgtagcctgggactcgcaactcctaccgcagtgatggtcggtaccggtgtggcagcacaaaacgggatactcattaaaggtggaaagcctctcgaaatggcacataagattaagaccgtgatgttcgataaaaccggtactataactcatggcgtccctcgggttatgagagtccttctccttggtgacgtggcaacgctgcctctccgcaaggtgctcgccgtcgtgggtacggcagaggcatcatctgagcatcccctcggagtggctgtgaccaagtactgtaaggaggagctgggtaccgaaacccttggatactgtactgatttccaggctgtgcccggatgtggaatcgggtgcaaagtctcgaatgtcgagggaatccttgcacactccgagaggccactgtccgcaccggcctcccacctcaacgaagccggttcacttcccgccgaaaaggacgctgtgccccagaccttctcggtgcttattggaaatagagagtggctcagacgaaacggactcaccatcagcagcgatgtgtcagacgcaatgactgatcatgagatgaaaggacaaactgccattttggtcgctatcgacggtgttctgtgcgggatgatcgctatcgcagacgccgtcaaacaagaagcagcactggcagttcatacccttcaatcgatgggtgtggacgtggtcctgattaccggggataatagaaaaaccgctagagcgatagcaacccaggtcggtattaacaaagtgtttgcagaagtgctcccctcacacaaggtggccaaggtgcaggaactccagaataaaggaaagaaggtggccatggtcggcgatggagtgaacgattcacctgcccttgcccaagccgacatgggagtggcgattggtacgggcaccgacgtggctattgaggcagcagatgtcgtgctgatacggaacgacttgctggacgtggtcgcatcgattcatttgtcgaagagaactgttagacggattcgcatcaatctggtgcttgcgctgatttacaatcttgtgggaattcctatagcagcaggagtgtttatgccgatcggaattgtgctccaaccctggatgggctccgcggcgatggcagcaagctctgtctcagtggtgctctcttcgttgcagctcaagtgctacaagaagcctgatcttgaaaggtacgaggcacaggctcatggtcacatgaaacctcttactgcctcacaagtctcggtccatatcggtatggatgatcgttggcgcgactcgccaagagcaaccccgtgggaccaagtcagctacgtctcgcaagtctcgctgtcctcgctgacctctgacaagccttcgagacactccgctgcggcagatgacgatggagacaagtggagcctgctcttgaacggtcgggacgaggagcagtatatt

SEQ ID NO: 280116 - DNA, 4395 bp, Artificial Sequence
  derived and/or modified sequence
atgccagaacaggagcgccagattaccgccagagagggagccagccgcaaaattctgtctaagctgtcgctgcctacccgggcttgggagccagcaatgaagaaatctttcgcatttgataacgtgggctacgagggcggcctggacggattaggaccaagcagccaagttgctactagcacggttcgcattttgggcatgacttgtcaatcgtgtgtgaaaagcatcgaggaccgtatctccaacctgaagggaattatcagcatgaaggtgagcctggagcaaggctcggcaaccgtgaaatatgttccgtctgttgtgtgtcttcagcaggtctgccatcaaattggcgatatgggcttcgaagcctctatcgccgaaggcaaagccgcatcatggccatcacggagcctcccggcccaggaggccgttgtcaaactgcgcgtagagggaatgacctgtcaaagctgtgtgtcctccatcgaaggtaaagtacgtaaactgcagggtgtggtcagggttaaggtaagcctgtcaaaccaggaggccgtgatcacgtatcagccttatttgatacaacctgaagatctgcgcgatcacgtgaacgatatgggcttcgaagcagccatcaaatctaaggttgcaccactgtcgctcggtccgatcgatattgagcgacttcagtctacgaatcctaagcgacctctgtcgtctgctaatcagaacttcaataattccgaaaccctcggacaccaaggtagccatgtggtcaccctgcagctgcgcatcgatggaatgcattgcaaaagctgtgtgttgaacatcgaagagaatatcggccagctgctgggtgttcaatctatccaggtctcgctggagaataaaaccgcgcaggttaaatatgaccctagctgtaccagcccggtggcgctgcaacgcgccatcgaagccctgcctcctggtaattttaaggtgagcctgcctgacggagcagagggttctggtaccgatcacagatccagcagctcccacagcccgggttctccgccgcgtaaccaggtacaaggtacctgtagcacaaccctgatcgccatcgctggcatgacttgcgcctcatgtgttcattccatcgaaggcatgatctctcagctggagggggtccagcaaattagcgtttctctggcggagggcaccgcgaccgttctgtataatccgagcgtgatcagccccgaggaactgcgcgcagcgatcgaagacatgggctttgaggcctctgtggtgtcggaatcctgcagcactaacccgctgggcaatcactctgcgggtaatagcatggtacagaccacggacggtacccctacgtccgttcaggaggtggcgccgcacacaggtcgcctgccagcaaaccatgccccggatatcctggctaagagccctcaatccacgcgcgccgtcgcgccgcagaagtgctttctgcaaattaaagggatgacttgcgctagttgcgtgtctaacatagagcgaaatctgcagaaggaagcaggcgtgctgtcagtcctggtggctctgatggcgggaaaagctgagattaagtacgatcccgaggtgatccagccgttagagatcgctcagtttatccaagatctgggcttcgaggccgcggtgatggaggactacgcgggttctgacgggaacatcgaacttacgattacggggatgacatgtgcatcctgtgtccataacatcgagtcgaagctgactcgcaccaatggtattacatacgcgagcgtggcactggcgacgagtaaggcgctggttaagtttgatccagaaatcattgggccgcgagatattataaagattatcgaggaaattggttttcacgcttccctggcacaaaggaatcccaacgcgcaccacttggaccataaaatggaaattaaacaatggaagaagtccttcctgtgctccctggtgttcggtatcccggtgatggcactgatgatctatatgctgatccctagcaatgagcctcaccagtcgatggttctggatcataatatcatcccggggttgtcaattctcaacctgatcttttttatcctgtgcaccttcgtccagctgctggggggctggtatttctatgtgcaagcttacaagagtctgcgccaccgctcagcaaatatggacgttctgatcgtactagccactagtattgcgtacgtgtacagcctggtgatcctggttgtcgcggtagccgaaaaagcagaaaggtccccagtaactttcttcgacaccccaccaatgctatttgtcttcattgcactgggacgctggctggagcatctggccaagagcaagacctcagaagcgctggcaaaactgatgtctctgcaggcaaccgaagccaccgtggtgacgctgggtgaggacaacctcattattcgcgaggaacaggtcccaatggagttggttcaaaggggcgacattgtcaaagtcgtcccaggcggcaaattccctgtcgatggtaaagtcctcgaggggaacactatggcagacgagagtctgattaccggcgaagctatgccggtcacaaagaagccgggatccacggtgattgctggcagcattaacgcccacggtagcgtgttgatcaaggccactcacgtgggcaatgatacgaccctggcacaaattgttaagctggtcgaagaagctcagatgagcaaggcgcctattcagcaattggcggaccgtttcagcgggtatttcgtgccgtttatcataattatgagtactctaacattggtcgtgtggatcgttatcggttttatcgatttcggtgtcgtgcagcgttacttccccaacccgaataaacacattagccagaccgaagttattatccgcttcgcgtttcaaaccagcattaccgtgctgtgtatcgcgtgtccttgctcactgggtttggccactccgactgccgttatggtaggcaccggcgtcgcagcgcagaatgggattttgattaagggtggcaagcctctggaaatggcacataaaataaaaacggtcatgttcgacaagacgggtactattacccatggtgtcccacgcgtgatgcgcgtgttgctgttgggcgacgtggccaccctgccactgcgcaaggttctcgctgttgttggcaccgccgaagccagctctgagcatccgctgggtgttgctgtcaccaaatattgcaaggaggagttgggtacggaaactttgggttactgcacagattttcaggcagtcccaggttgtggcatcggctgcaaggtgagcaacgtggagggtattctcgcccacagcgagcgcccattgtcggcgccggcgtcccatctgaatgaagccggcagccttcctgctgagaaggatgccgtgccccagacgtttagcgttctaatcggtaaccgcgagtggctacgccgtaatggactgaccatcagctctgacgtttcggacgccatgactgaccatgagatgaaaggtcaaaccgctatcctcgtggctatagacggagtgctgtgtggcatgattgccattgccgacgctgtgaaacaagaggctgccctagcagttcacacgttgcaatccatgggcgtcgatgtcgtcctgatcacgggcgataaccggaagaccgcacgtgcgattgcaactcaagtgggcataaataaggtctttgcagaagtgctgccatctcacaaagtggctaaggtccaagagctccagaataaaggcaagaaggtggcaatggtgggtgatggcgtgaacgactccccagcgctggcgcaggcggacatgggcgttgccattggtaccgggacggacgtcgcaattgaggcggctgacgttgttctcattcgaaatgacctgctggatgtggtggcaagcatacacctgagcaaaaggacggtacgacgcatccgcatcaacctggtactggctctcatatataatcttgtaggtatcccgatagctgcaggggtcttcatgccaattggcattgtgctgcagccgtggatgggctcggccgcaatggcggcatcatctgtcagcgtagtcctctccagcctgcaattgaaatgctacaaaaagccagacctggagcgctacgaggctcaggcccatggccatatgaagcctctgaccgccagccaggtatccgtacatatcggcatggatgatcgctggcgcgactcgccgcgggcgactccttgggaccaagtgagctacgtgtctcaagtgtctctgagcagtctgactagcgacaagcctagcagacattccgctgccgcagacgatgacggtgataagtggtcccttctgctgaacgggcgtgatgaggaacaatatatt

SEQ ID NO: 280117 - DNA, 4395 bp, Artificial Sequence
  derived and/or modified sequence
atgcctgaacaagagcggcagattactgcccgagagggagcctcacgcaagatcctctctaaactcagcctccccacgagagcatgggagccagctatgaaaaagagctttgccttcgacaacgtggggtacgaaggtggtctggatggtctggggccatctagccaagttgcaaccagtactgtgcgaattttggggatgacatgccagtcttgtgtaaagtctatcgaagatagaatctccaatttgaaaggcattattagtatgaaagtttctcttgagcaagggagtgcaaccgtcaagtacgtgcccagcgtcgtttgcctgcagcaggtgtgtcatcagatcggcgatatgggctttgaggcttctatagcggaaggcaaggctgcatcatggccttctaggagcctccccgcccaagaagccgtcgtgaagttgcgggtggagggtatgacatgtcagagctgcgtgagctctatcgaaggaaaggtccgcaaactgcagggagttgttcgcgtgaaggtgtccctgtccaatcaagaagccgttataacgtaccaaccctatttgatccaacctgaggacttgagagaccacgtgaatgacatgggcttcgaggcagctatcaagtctaaggtggcccctctcagcctgggtcccatcgatatcgagcggctgcaatctaccaatcccaaacgccccctgagctccgcaaatcagaacttcaacaacagtgaaacccttggacaccaaggctcacacgtagtgacgctccaactccggattgacggtatgcattgcaagtcatgcgtgctgaacatcgaggagaatattggtcaactcttgggtgtccagtctatacaggtgtcactggagaacaaaacagcacaggtgaaatatgacccgtcatgcacgtcccctgtcgcccttcagagggctattgaggccttgccacctggtaactttaaggtgtccctcccagacggcgctgaaggttctggaactgatcaccgctcaagctccagtcacagcccaggttcacctccccgaaaccaggtacaggggacgtgttcaacgacactcattgctatagcaggtatgacatgtgctagttgtgtgcactctatcgaaggaatgatctcccagctggagggtgtgcagcagatctccgtgtcactggccgagggaacagcgaccgtgctgtataatccatcagtgatcagcccagaagagctgcgcgcagccattgaagacatgggatttgaggcctctgtcgtctccgaaagctgctctaccaaccctttgggcaaccacagcgccggcaacagcatggtgcagactactgacggaacgccaacatccgtgcaggaggtcgctccgcatacaggtcgactccccgccaatcatgcccctgacatactggcgaagtcccctcagtcaacgagagccgtcgctccccaaaaatgtttcctgcagattaagggcatgacctgtgcatcctgtgtatcaaacatcgaacggaacctgcagaaggaggcaggagttctgtccgtgctcgtggccctgatggccgggaaggcagagatcaagtacgatcctgaagtgattcagccgttggagatcgcacagttcatccaggatctgggatttgaagctgccgtaatggaagactacgccgggtcagacggcaatattgaactgactattactggaatgacctgtgcttcttgtgttcacaacatcgaatctaagctgacgaggactaacggtattacctacgctagcgtggcattggcaacttctaaagccctcgttaagttcgacccagagattatcggcccaagagatatcataaaaatcattgaagagattggttttcatgcgagcctggcccaaaggaatcccaatgcccatcacctggaccataaaatggagatcaagcagtggaagaagtctttcctgtgctcactggtattcgggatcccagtgatggctctgatgatctatatgttgatcccatctaacgagccgcaccaatccatggtacttgatcacaacatcattcccggtttgtctatcctgaatctgatattcttcattctttgcacctttgttcagctccttggcggatggtacttctacgtgcaagcctacaagtcactgaggcacagaagtgcaaatatggacgtgttgattgttctggcgacgtctattgcctacgtttattcactcgtgattctggtggttgctgtggcagagaaagctgagcgcagtcccgtgacgttctttgatacacctcctatgctgttcgtctttatagctctggggagatggctggagcatttggcgaaaagcaaaacctccgaagcgttggctaaacttatgtcactgcaggctacggaggcaactgtcgtgaccttgggcgaggacaaccttattattcgagaagagcaggtgcctatggaattggttcagcgcggagatatagtgaaagtcgtaccgggcggcaagttcccggtggatggtaaagtgctggagggcaatacaatggccgacgagtctctgattactggcgaagctatgcctgtgactaagaagcccgggtctaccgtaatcgctggctctattaacgcccatggttctgtgcttattaaggccacacacgttggaaatgacaccacactggcgcagattgtgaaattggttgaggaggcccagatgtccaaagcccctattcagcagttggccgataggttctccggatactttgtccctttcattattataatgtcaacgctcactctcgtggtttggatcgtaatcgggtttatcgattttggcgtggttcagaggtacttccctaacccaaacaagcatatctctcaaactgaagtcattattcggtttgccttccagacctctataaccgtgctctgtatagcatgtccctgtagcctggggctggccaccccgacggcagtgatggtagggacgggagtggctgcccagaacggcattcttattaaagggggcaaaccacttgagatggctcacaagataaaaacagttatgttcgacaaaacagggaccattacccatggggtgcctcgcgtgatgcgcgtcctcctgttgggggacgtcgctacactgcctctccgaaaggtgctggctgtggtggggaccgcggaggcgtctagcgaacaccctctgggggttgccgtcaccaagtattgtaaagaagagctgggcactgaaaccctcgggtactgtacagatttccaagccgtgccaggatgtggcattgggtgtaaagtgtccaatgtcgaaggcatcctcgcgcacagcgagcgaccgctgtcagctccagcaagtcatctgaacgaggccggctccttgccagccgaaaaagacgccgtgccacagactttctcagttttgattgggaatcgagagtggttgaggcgcaatggcctcacaataagctctgatgtaagtgacgccatgacggatcatgagatgaaaggacagaccgctatccttgtcgcgattgacggggttttgtgcggaatgatagctatagccgatgcagttaaacaggaagccgctctggcagtccacacattgcagagcatgggtgtggacgtggtgcttataacaggggataataggaaaacagccagagccattgccacacaggtgggtatcaacaaagtcttcgcagaggtgctcccttcccacaaggtggctaaggtgcaggagctgcagaataagggaaagaaggtggcaatggtcggcgacggcgtcaatgattcaccagccctggcgcaggccgacatgggggtggccatcggtaccgggacggacgtggccatcgaggccgctgacgtcgttctcatcaggaatgatctgttggacgtcgtggcgtccatccacctgtccaagaggacagtcaggaggatccgcattaatttggtgctggcccttatatacaaccttgttggcatcccaatagccgcaggagtgtttatgccgatcggtatagtattgcagccctggatggggtcagccgcaatggcagcatcatccgtctccgtagtattgtcttccctgcaactgaaatgttacaaaaagcccgatctcgagagatatgaggctcaggcacacggccacatgaagcccctgacagcctcccaggtgagcgtccatatcggaatggatgatcgctggagagatagccctcgagctacgccatgggatcaggtgtcttacgttagccaggtgtcattgtccagcctcaccagcgacaagcccagcaggcatagtgctgccgccgacgatgatggggacaaatggtccctgttgctgaacggaagggatgaagagcagtacatc

SEQ ID NO: 280118 - DNA, 4395 bp, Artificial Sequence
  derived and/or modified sequence
atgccggagcaggagagacagatcactgcacgagaaggcgcgtcacggaaaatcctgtccaagctgtccctgcctactagagcctgggagcctgcgatgaagaagagcttcgccttcgataatgtgggatacgagggagggctcgatgggctgggcccgtcatctcaagtggcgacctcaaccgtgcgcatcctgggcatgacgtgccagtcatgcgtgaagtcgatcgaggacagaatatcgaacctgaaagggattatctcgatgaaggtgtctctcgagcagggcagcgctacggtgaaatacgtcccaagcgtggtctgcttgcagcaggtgtgtcatcagatcggtgatatgggctttgaagcatccatcgccgaaggcaaagcagcctcatggccgtcccgcagcctgcccgcacaagaggctgtggtcaagctgcgggtggaaggcatgacgtgtcaatcatgcgtgtcctccattgaaggaaaggtccggaagctccaaggagtcgtgcgggtgaaggtgtcgctctctaaccaggaggcggttatcacctaccaaccgtacctgattcaaccggaagatctgagggatcacgtgaacgacatggggtttgaagcagctattaagtcaaaagtggctccactctcgctggggccgatcgatatcgaacggctgcagtcgacgaacccgaagcggccactgtcctcggccaaccagaatttcaacaattcggaaactttgggacaccaaggaagccatgtggtgactcttcaactcagaattgatggaatgcattgcaagtcgtgcgtcctcaatatcgaagagaatatcggacaactgctcggagtccagagcattcaggtatctttggagaacaagactgcacaggtcaagtacgatccgtcgtgcacctccccggtcgccctccaacgcgccatcgaagccctgccacctggtaactttaaggtttccctgcctgacggagccgaaggttccggaactgatcacagatcatctagctcgcatagccctggctccccgcctcggaaccaagtccaggggacctgcagcactactctcattgctattgcaggaatgacgtgcgcttcgtgcgtgcactccatcgagggtatgatctcacagctcgaaggagtgcagcagatttctgtgtcccttgcggagggcaccgcgactgtgctctacaacccgtcggttatttcgccggaagagctccgggccgctatcgaagatatgggatttgaagccagcgtggtttcagaatcgtgttcgaccaacccgcttggcaaccattcggcgggaaattcgatggtgcaaacgacggacggtactccgacttcggtgcaggaggtggctcctcacactggtaggctgccggccaaccatgcacctgacatcttggctaagtcgcctcagtcaactcgcgcagtggcgccgcaaaagtgtttcctgcagatcaagggcatgacctgtgcctcctgcgtgtcgaatatcgagcggaacctgcagaaagaggccggagttctgtcggtgctggtggcactcatggcaggaaaagccgaaatcaagtacgacccggaggtcatccagcccctcgagatcgcacaattcatccaagacctcgggttcgaagctgcagtgatggaagattacgctggatccgacggaaacatcgaactcacgattaccggtatgacctgcgcctcatgcgtgcacaacatcgaatcgaagctcacccggactaacggcatcacctacgctagcgtcgccctggcgacttcaaaggccctggtcaagttcgaccctgagatcatcggccctagggatatcattaagatcatcgaagagattggctttcacgcaagcctcgcgcaacggaatccaaatgcccaccatctggaccataagatggaaatcaagcagtggaagaagtcctttctctgctcgcttgtgttcggaatcccggtgatggccttgatgatctacatgcttatcccttcgaatgaaccgcatcagtccatggtgctggaccacaatatcatcccgggtctgtccattctgaacctcatctttttcatcctgtgcaccttcgtgcagctgttgggaggatggtacttctacgtgcaggcgtacaagtcactgcggcacagatctgctaacatggatgtcctgatcgtcctcgcgacttccatcgcttacgtgtactctctcgtgatcttggtggtagcggtcgcggaaaaagcggagcgctcgccagtgactttcttcgacactccgccaatgctcttcgttttcatcgcgctgggacgctggttggaacatctggcgaaaagcaaaacctcggaagcgctggccaaactgatgtcgctgcaagcaactgaagccaccgtcgtgacgctgggagaggataacctcatcatccgcgaagagcaggtgccgatggaactggtccaaagaggagacatcgtgaaagtggtgcccggaggaaagttccccgtggacggcaaggtcttggagggcaacactatggcagacgagtcgctgatcaccggtgaagccatgccggtgaccaagaagccggggtcgacggtgatcgccggctcaatcaacgcacacggatccgttctgatcaaggccactcatgtgggaaacgatacgaccttggcacaaatcgtcaagctcgtcgaggaagcacaaatgtccaaggcaccaatccagcagctcgccgatcgcttcagcggctacttcgtgccgttcatcattatcatgtccactctgactctggtggtgtggatcgtgattggcttcatcgatttcggagtggttcagcgctacttcccgaacccgaataaacacatctcgcagaccgaggtcatcatccggttcgccttccagacctcaatcaccgtgctgtgcatcgcgtgtccctgctcacttggcctcgctacgccgaccgccgtcatggtgggcaccggggtagcagcgcaaaatggcatcctcatcaagggcggaaaaccgttggagatggcgcacaagattaagaccgtcatgtttgacaaaactggcaccatcactcatggagtgcctcgggtgatgagggttctcctgctgggcgatgtcgcgactctccctcttagaaaggttctggccgtggtgggaaccgcagaagcgtccagcgaacatcctttgggagtggctgtgaccaagtactgcaaggaggaactcggaactgaaaccctgggctattgcaccgactttcaggcagtgccgggctgcggaattggttgcaaagtgagcaacgtggaaggaatcctggcgcactcggagcggccactgagtgctccggcatcccacctgaacgaagccggatccctcccggccgagaaggacgccgtgcctcaaactttcagcgtgctcatcggtaacagagagtggctgcgccggaacggccttacgatctcatccgacgtgtcagatgccatgaccgaccacgaaatgaagggccaaaccgcgatcttggtggcgatcgatggtgtgttgtgtgggatgatcgcgatcgccgatgcagtcaaacaagaagcagctctggccgtccatactctgcaatcgatgggcgtcgacgtcgtcctgatcaccggcgacaaccgcaagaccgcccgcgcaattgccacccaggtcggaatcaacaaggtctttgcagaggtgctcccatcgcacaaggtggccaaggtgcaggaacttcagaataaaggcaaaaaggtggccatggtgggagatggagtgaatgactccccggctctcgcccaggcagacatgggagtggccatcggaacggggactgacgtggctatcgaggcggcggacgtggtgctgatccgcaacgatttgctggacgtggtggcctcgatccacctctcgaagagaaccgtgcgcaggatccggatcaatctggttctcgcactcatctacaacttggtgggaatcccaatcgctgcgggcgtgttcatgcctatcggaattgttctgcaaccatggatgggctcggccgcaatggccgcctcgtcagtgtcagtcgtgctgtcaagcctgcaactgaaatgttacaagaagccggatttggagcgctacgaagcgcaggctcacggacatatgaagccactcaccgcttcgcaagtgtctgtgcatatcggcatggacgacaggtggcgggatagcccgagagcgaccccgtgggatcaagtctcctacgtgtcccaagtctccctttcatcccttacttcggacaagccctcgaggcattcggctgcggccgacgacgacggggacaaatggagcctcctgctgaacggacgggatgaagagcaatacatt

SEQ ID NO: 280119 - DNA, 4395 bp, Artificial Sequence
  derived and/or modified sequence
atgccggaacaagagcgccaaatcaccgcccgcgagggcgcatcccgcaagatcctgtcgaagctgtcgctgcctacgcgcgcctgggaacccgccatgaaaaagtcgttcgcctttgacaacgtgggctacgagggcggcctggatggattgggaccgtctagccaagtcgccacttcgactgtcagaatcctcggaatgacctgccagtcgtgcgtgaaatccatagaggatcgaataagcaacttgaagggaatcatctcgatgaaggtgtcattggaacagggatccgcgaccgtgaagtacgtgccgtcagtcgtctgcctgcaacaggtttgccatcagatcggggacatgggctttgaggcgagcatcgcggaaggcaaggccgcctcgtggccaagccgctccctgccggcacaggaagccgtcgtgaagctccgggtcgagggcatgacctgccaatcgtgcgtctcgtcaatcgaagggaaggtgcggaagctccagggagtggtgcgcgtgaaagtgtcactgtcgaaccaagaggcggttatcacttaccaaccctaccttatccagccagaagatctgagggatcacgtcaacgatatgggatttgaggccgcgatcaagagcaaggtcgcccctctctcgcttggaccgatcgacatcgaacggctccagagcaccaacccgaaacgccccctctcctcggccaaccagaactttaacaactcagagactctgggccaccaaggatcccacgtggtcaccctgcaacttagaatcgatggaatgcactgcaagagctgcgtgctcaatatcgaggagaatatcggtcagctccttggagtccaatcgatccaggtttcactggagaacaagaccgcccaggtcaaatatgacccgagctgcacctcaccggtcgctctgcagcgggcgatagaagccctgccaccaggcaactttaaagtgtccctcccggacggggccgagggatcaggaactgaccaccggagctcgtcctcgcactctccgggaagcccaccgcggaaccaggtgcaggggacttgctcgaccaccctgatcgctatcgcagggatgacgtgcgcatcgtgcgtgcactcgattgagggaatgatttcacaactggaaggagtccaacagatcagcgtgtcgctcgcggaggggacggcgaccgttctttacaatccatccgtcatctccccggaggaacttagagctgccatcgaagatatgggattcgaggcgtcggtggtgtcggagtcatgctcaactaatccgctgggcaatcattctgcgggtaactccatggtgcaaaccaccgacggaacccccacctctgtgcaggaggtggccccgcacactggaagattgccggcaaaccacgcccctgacatcctggcgaagtcaccgcagagcacccgcgcagtggcgccgcagaaatgcttccttcagataaaaggcatgacgtgtgccagctgcgtgagcaacatcgagcggaatctccaaaaagaggcaggcgtgctgtctgtcctggtcgcactgatggcggggaaggcggaaatcaagtacgacccggaggttattcagccgttggagatcgctcagtttatccaggatctgggctttgaagcggctgtcatggaagattacgcaggctccgatggcaacatagaactgaccatcactggtatgacttgtgctagttgcgtccacaacattgaatccaaactgactaggactaacggaatcacttacgctagcgtggccctcgccacctccaaggcactggtgaagttcgacccggagattattgggccacgcgacattatcaagatcattgaagaaatcgggttccacgcttcgctggctcagagaaatccaaatgcgcatcacctggaccataagatggaaatcaaacagtggaagaagtccttcctttgctcactcgtgttcggaatccctgtgatggcgctgatgatctacatgttgatcccatcgaacgaaccgcaccagtcgatggtcctggaccacaacattatcccaggattgtccattctgaatctcatcttcttcatcttgtgcactttcgtgcagctgctgggtggttggtacttctacgtgcaggcctacaaatcgctccggcatcggtccgcaaacatggatgtcctgattgtgctggctacctcgatcgcttacgtctactcactggtgatcctggtggtggcggtggccgagaaggccgaaagatcccccgtgacttttttcgatactccgccgatgctcttcgtgttcatcgctctgggacgctggctcgaacatttggctaagagcaaaacctccgaagcgttggcgaagttgatgtccctgcaggctaccgaagccaccgtggtgactctgggcgaggacaacctgatcatccgagaggaacaagtgcctatggaactggtgcagaggggagatatcgtgaaggtcgtgccgggaggcaaattcccggtggatggaaaggtccttgagggaaacactatggctgatgagtcgctgatcactggagaggccatgccagtgactaagaagcctggaagcactgtgatcgccggttccatcaatgcccacggatcggtgctcattaaagctactcacgttggaaatgataccaccctcgcccagatcgtgaagctcgtcgaagaggcgcaaatgtcgaaagcgccgatccagcaactggcagatcgcttctcgggatacttcgtgccgttcatcatcattatgtcaaccctgactttggtggtgtggatcgtgatcggattcattgacttcggcgtggtgcagcggtacttccctaacccgaacaagcacatttcacagaccgaggtcatcattaggttcgcgttccagacctcgatcaccgtgctctgcatcgcctgtccatgttccctggggctggcgactccaactgcggtcatggtaggaaccggcgtggctgcacaaaacggaattctgatcaagggcggaaaaccgctggaaatggcgcacaagatcaaaaccgtcatgttcgataagactggaactatcacgcatggcgtgccccgcgtcatgagggtcttgctgctgggcgacgtggcaactctcccactgcggaaggtcctggccgtggtgggaactgccgaagccagcagcgaacatccgttgggagtggccgtgaccaagtattgtaaggaggaactgggaaccgaaacgctgggctactgcaccgattttcaggcggtcccggggtgtggaatcggatgcaaggtgtcgaacgtcgaaggcattctggctcattccgaacgccctctctcggcgcctgcctcacatctcaacgaagcaggctccttgccggccgagaaggatgcggttccgcagaccttttcggtgctgatcggaaaccgggaatggctgcggagaaatggactgaccatcagctccgacgtctcggacgcgatgaccgatcatgaaatgaagggccagaccgcgattctcgtcgcgatagacggagtgctgtgtggaatgatcgcgattgcggatgcagtgaagcaggaagctgccctggccgtgcatactctccaatccatgggagtcgatgtcgtgctgatcaccggagataataggaaaactgcaagagccatcgcgacgcaggttggaatcaacaaggtctttgcagaggtgctgcccagtcacaaggtggcaaaagtgcaagaactgcaaaacaagggaaagaaggtggcaatggtgggtgacggcgtgaatgactcgcctgccctggcccaagccgacatgggggtggcgatcggcactggaactgatgtggcgatcgaagccgctgatgtggtgctgatcagaaacgacctgctcgatgtggtggcttccatccacctcagcaagcggaccgtccggcgcatcagaatcaatcttgtgctcgccctgatctacaacctggtgggcatcccaatcgcggccggagtgttcatgccgatcggaatcgtgctgcagccgtggatgggttcagcagcaatggctgcttcatcggtgtcagtcgtcctgtcctcactgcagctgaaatgctacaagaagcctgacctggagcggtacgaagcccaggcccatggtcacatgaagccactgaccgcctcccaagtgagcgtgcacattggaatggacgacaggtggcgggattcgccacgggctactccatgggatcaggtcagctacgtgtcgcaggtgtccctgagctccctcacctcagataagccatcccggcactcggcagcggcagatgacgatggagacaagtggagcctcctgctcaacggacgcgacgaagagcagtacatc

SEQ ID NO: 280120 - DNA, 4395 bp, Artificial Sequence
  derived and/or modified sequence
atgcctgagcaagagaggcagatcacggcccgggagggggccagccggaagattctctctaaacttagtctgccgactcgggcgtgggaaccagccatgaagaagtcattcgctttcgacaatgtcggatacgaaggaggcctggatggtctgggaccgtcctctcaggtcgccacctcgacggtgcgcatcctggggatgacctgccaaagctgtgtcaaatccatcgaggatcggatcagcaatttgaagggaatcatcagcatgaaggtgtcacttgagcagggctccgcgaccgtcaagtacgtcccatccgtggtctgcctccaacaggtgtgtcaccagatcggagacatgggattcgaggcctcaattgcggagggcaaggccgccagctggccaagcagatccctcccagcgcaagaagctgttgtgaaactccgcgtggagggcatgacttgccagtcgtgcgtctcctcgatcgaaggaaaggtccggaagctccagggggttgtgcgcgtgaaggtgagcttgtccaaccaagaagccgtcatcacctaccagccatacctcatccagcctgaagatctgagagatcatgtgaacgacatgggctttgaggccgctatcaagtcaaaggtcgccccactgtcgctgggaccaattgatatcgaaagactgcagtcaactaaccccaaacgcccgcttagctccgccaatcaaaacttcaacaactcggaaactctgggccaccaaggctcccacgtcgtgactctgcagctccggatcgatggaatgcattgtaaatcctgcgttctcaacatcgaggagaatatcggtcagctgctcggcgtgcaatcgatccaggtcagccttgagaacaaaaccgcacaagtgaaatacgacccgtcctgcacttcaccagtcgcactgcagcgagcaatcgaggcgctcccgccgggaaacttcaaagtctcactcccagatggggccgaaggatccggtacggaccataggagcagctcgtcgcactccccggggtcgcccccgcggaaccaagtgcaaggaacttgttccactaccctcatcgcgatagccggaatgacctgcgcatcctgcgtccattcaatcgaaggaatgatctcgcaactcgaaggagttcaacagatcagtgtgtcgttggcggagggaaccgctaccgtgctgtacaatccatccgtgatcagcccggaagagctccgggccgccattgaagatatgggattcgaagcctcggttgtgtcagaatcctgcagcaccaaccccctgggaaaccactccgccggcaactccatggtccaaactaccgacggcacccccacctcggtgcaggaagtagccccgcacacggggcgcctgcccgccaatcatgcaccggacatcctggcgaaatcaccgcagtcgacccgcgcggtggcgccgcagaagtgcttcctccagatcaagggaatgacctgtgctagctgcgtgagcaacatcgagcggaatctgcagaaggaggccggagtgctctccgtgctcgtggcattgatggctggaaaggcagaaatcaaatacgaccctgaagtgattcaaccactggaaatcgcgcaattcatccaggacctggggttcgaggctgctgtcatggaggactacgcggggtcggatggaaatatcgaactgaccattaccggaatgacttgcgcttcatgtgttcacaacatcgaaagtaaactgactcggactaacggaatcacctatgctagcgtcgctctcgccacgagcaaggctcttgtgaagttcgacccggagatcatcggaccaagggacatcatcaagattatcgaggaaatcggctttcatgcgtcactggcccaacgcaacccgaacgctcaccacctggaccataagatggagatcaagcaatggaagaagtcgtttctctgtagcctcgtgtttggtatccccgtgatggcactcatgatctacatgcttattccgtcgaatgaaccgcaccagtcaatggtcctcgatcacaatatcatccccggcctgagcatcctgaatctcatcttcttcatcctgtgcacttttgtgcagctcctcggaggttggtatttctacgtgcaggcgtacaagtcgctgagacacaggtctgcgaacatggacgtactgatcgtgcttgccaccagcatcgcatacgtctactcactggtcattctggtggtcgctgtggcggaaaaggccgagagatcgcctgtgactttctttgacactcctcctatgttgtttgtgttcattgctctgggtcgctggctcgagcacctggctaaatcaaagacttcagaagccctggccaaactgatgtcgctgcaggcgactgaggccaccgtcgtcactctgggagaggacaacctgattatacgggaagaacaagtgcctatggaactggtgcaacgaggcgacatcgtgaaggtcgtgcctgggggaaagttcccggtggacggaaaggtcctggaaggaaacaccatggccgacgagtccctgattactggcgaggcaatgccggtgactaagaagccgggatcgactgtcatcgctggatccattaatgctcatgggagcgtcctgatcaaagccactcacgtcggtaatgacactaccctggctcagattgtgaagctcgtggaagaagcacaaatgtcgaaggcgcctatccagcagcttgctgacagattttcaggctacttcgtgccgttcatcatcatcatgtcgaccttgacccttgtagtgtggatcgtgatcggattcatcgacttcggagtcgtccagcgttacttcccgaatccgaacaagcacatcagccagaccgaagtgatcattcggttcgcgttccaaacctcaatcacggtgctgtgcatcgcatgcccgtgctcgctcggccttgcgacccctacggccgtgatggtgggaaccggggtagcggcccagaatgggatactgatcaagggcggtaagccgctggaaatggcccataagataaagaccgtgatgttcgataaaaccggcaccatcactcacggagtgccgcgcgtgatgcgcgtgctgctgcttggagacgtggctaccctcccactgaggaaggtgctggcggtggttgggactgcagaagcatcctccgagcaccccctgggcgtcgccgtgaccaagtactgcaaggaagaactgggaaccgagactctgggatactgcactgatttccaagcagtgccgggctgcggcatcggttgcaaggtgtccaacgtggaaggaatccttgcacactccgaaagacctctgtcagcacctgcctcacatcttaacgaagccggatcactgcccgccgagaaggacgccgtgccacagaccttttccgtgctgatcggcaatcgcgagtggctgcgccgcaatggtcttactatttcgtccgacgtatctgatgccatgactgatcacgagatgaaggggcagaccgccatcctcgttgccatcgatggagtcttgtgcggaatgatcgcgatcgcggatgcagtgaagcaggaagcagcactggccgtgcatacgttgcaaagcatgggagtcgatgtcgtgctgatcaccggagataatcgcaagaccgcccgcgctatcgcgactcaggtgggaatcaacaaggtgtttgccgaggtcttgccatcccacaaggtggcgaaagtgcaggaactccagaacaaggggaaaaaagtggcgatggtgggcgacggcgtcaacgactcgccagccttggcccaggccgacatgggtgtggccattggaactggtactgacgtggccatcgaggctgcggacgtcgtgttgattaggaacgacttgctggatgtagtagcgagtattcatctttcgaaaagaaccgttcggcgcatccggattaacctggtgctggccctcatctacaacctcgtaggaatcccgatcgcagcgggagtgttcatgccaatcggcatcgtcttgcaaccttggatgggttcagcggcaatggcagcctcatctgtctccgtggtgctgtccagccttcagctcaagtgttacaaaaaaccagatctggaacggtatgaagcgcaggcacacggccatatgaaaccgctcaccgcttcgcaagtttcggtgcatatcggcatggacgaccgatggcgcgactcgcctagagcaacgccatgggaccaggtgtcctacgtgtctcaggtgtcgttgtcgagcctcacgagtgataagccgtctcgtcactccgccgcagccgacgatgatggggacaaatggtcactgctgctcaacggtagagatgaggaacagtacatt

SEQ ID NO: 280121 - DNA, 4395 bp, Artificial Sequence
  derived and/or modified sequence
atgcccgagcaggaacggcaaatcaccgccagggaaggggccagtcgtaagatcctaagtaaactaagcttgccaacccgcgcttgggagcctgcgatgaaaaagagctttgccttcgacaacgtgggatatgagggcggcttggacggacttggaccaagcagccaggttgctaccagcaccgttaggatattgggaatgacttgccaatcatgcgttaaaagcatcgaagacaggatttctaatctaaaggggattatctcgatgaaggtctcactggaacaggggtctgctactgtgaaatatgtcccgtctgtggtctgcctgcaacaggtttgtcatcagataggggacatgggcttcgaagcatccatcgcagagggaaaggctgcttcttggccaagtcggtctctgccggctcaagaagcagtcgtgaaactgcgggtggagggcatgacttgtcagagctgcgtgagttctattgaaggcaaggtgcgcaaactgcaaggcgtggtgagggttaaggtgtccctgtctaatcaggaggctgtgatcacctaccagccatatctgattcaacccgaagatctgcgcgatcatgtaaatgatatgggattcgaagccgctatcaaatcgaaggtggcgcctttgtcccttggccctatcgacatcgagcgactacagtccactaacccaaaacggccactcagttctgctaatcagaacttcaataattcagaaacattggggcaccaaggcagccacgtcgtaacgttgcagcttcgcattgacggtatgcattgtaagagctgtgtcttaaatatcgaagagaacatcggccaactcctgggtgtgcagagtattcaggtctccctcgagaacaagacagcccaggttaaatatgacccctcctgcactagccctgtcgcgctacagcgggctatagaggctctccccccagggaactttaaggtttctctgcccgacggcgctgaaggctctgggacggaccatcgctcttcatcttcacatagccctggatctccccctagaaatcaggtccaggggacttgtagtactactttgatcgctatagctggaatgacctgtgcatcttgtgtccactccattgaggggatgatctctcagctggagggcgtgcagcagattagcgtctctctagcagagggaacagcgacggttctgtataaccccagcgtgatcagcccggaggaactgagagcagctatcgaggacatgggctttgaggcttctgtggtgagtgagtcatgttccaccaatccactgggcaaccattccgctgggaatagtatggtccaaacaaccgacggaacaccaacaagcgtgcaggaagtggcccctcatacaggccgacttcctgctaatcacgcaccagatatcctcgcgaagagtccacagtctacacgggcagttgccccccagaagtgttttctgcagataaaagggatgacctgcgcgtcatgcgtgagcaatatcgagcggaacctgcaaaaagaggcaggagtactgagcgtgttagtggcactgatggcaggtaaggcagagatcaagtatgatcccgaagtgatccagcccctcgaaatcgcccagtttattcaagacctcggctttgaagccgcggtaatggaggactacgccgggtccgacggaaatatcgagctgacaatcaccggcatgacttgtgcctcctgtgtgcataacatagaaagtaaactgacacgtactaacgggataacctatgcgtccgtggctctagcaacaagcaaagctctggtgaagtttgatccagaaatcatcggaccgagggatataataaagattattgaggagattggattccacgcaagtttagcacagcggaacccaaacgcacaccacctagatcacaagatggagatcaagcaatggaagaagtccttcctctgttctcttgtcttcggcattcccgtgatggctctcatgatatacatgttgatcccgagcaacgagccccaccaatccatggtccttgaccacaacatcattccgggcctcagcatcctcaacctcatattcttcattctgtgcacctttgtgcagcttctaggtggatggtatttctacgtgcaggcttataaatccctgcgtcaccgctctgcgaatatggatgtgctgatcgtgttggccacctctatagcctatgtctatagtctggttatccttgtcgtggccgttgctgaaaaagcggagcgctcacccgtcactttcttcgatacacctcccatgctgtttgtgttcatagcattgggccgttggctggagcacctagcaaaatccaaaaccagcgaagctttggcaaagctgatgagcctgcaagctacagaagcaaccgttgttactctcggcgaggataacctaatcatcagggaggaacaggtaccaatggagctggttcaaaggggtgatatagttaaggtggttccgggcgggaagtttcccgtggatgggaaagtgctggaaggtaacaccatggccgacgagagtttgatcaccggggaggctatgcccgttacaaagaagccgggaagcacagtcatcgctgggagcatcaacgctcatggtagtgttctgattaaggctactcacgtcggcaatgacaccacgcttgctcagatcgtgaaactcgtcgaggaagcccaaatgtcgaaagccccaatccagcagctggctgacaggtttagcggatacttcgtcccatttatcataatcatgtctacattaacactcgtggtttggatcgtgattggctttatcgacttcggggttgtacaaaggtattttcccaaccctaataagcatatatcccaaaccgaggttatcatcaggtttgctttccaaacttcaatcaccgtcttatgtatcgcctgcccatgttcactcggactagccacaccaacagctgtgatggttgggacgggggttgcagcccaaaatggtatcctgatcaaaggcggcaaaccactcgagatggcacataagatcaaaactgtgatgttcgataaaacaggcacgatcacccacggcgtgcctcgcgtaatgagagtattgctgctgggcgacgtggccactctccctttgaggaaagtgctagccgttgtgggtaccgcggaggcttcatctgaacaccccctcggggtggctgttaccaaatactgcaaagaggagctcggtaccgagaccttaggctactgtacagattttcaggccgttcccggttgcggaatcggctgcaaggttagcaatgtagaggggatcctggcccatagcgagcgtcccttgtctgctccagcctctcatctgaatgaggctggcagtctgccagctgagaaagacgctgtgccccaaacctttagcgtgctcattggcaatcgagagtggctgcgccggaacgggcttactattagctccgacgtgagcgacgcaatgacggaccatgaaatgaagggccagacggcaattctcgttgccattgatggggttctgtgcggcatgattgccatagccgacgctgtgaaacaggaagccgctcttgccgttcacaccttgcagagcatgggggtcgatgtagtgttgatcacaggagacaatcgcaagactgcacgggccattgccacccaggtgggaatcaacaaggtctttgccgaagtcctgccctcacataaggtggccaaggtccaggagctccagaataagggcaagaaggtggccatggtgggcgatggcgtaaatgatagtcctgccttggctcaggctgatatgggtgtagctatcggcacgggcaccgatgtggcaatcgaagcagccgatgtcgttttgatccgaaatgacttactggacgtggttgcaagcatccacctgtctaaacgaacagtaaggagaatccgaataaatctggtacttgccctcatttataatctagtgggtattcctatcgcagcgggcgtttttatgcccattggaatcgtcctgcagccttggatgggctctgctgcaatggctgcatcttccgttagcgtagtgttgtcatccctacagctgaagtgctataagaaacccgacttggaaagatacgaggcacaagcccatgggcatatgaaaccgctcacagcaagccaggtcagtgttcacattgggatggacgataggtggagagactccccaagggcaactccatgggatcaggtctcttacgtttcccaggtaagcctcagctccctgacttcggacaagcccagtcggcacagtgccgcggctgatgatgacggggacaaatggtcgcttctgctcaacgggcgtgacgaagagcagtatatc

SEQ ID NO: 280122 - DNA, 4395 bp, Artificial Sequence
  derived and/or modified sequence
atgccagaacaggaacggcaaattaccgcgagagaaggggcatcgcgcaagattctgagcaaactttcccttcctaccagagcctgggagccagcgatgaaaaagagctttgcattcgacaacgtggggtacgaaggtggacttgatgggctgggcccttcctcccaagtggcgacctccaccgtgcgcattcttggcatgacttgtcaaagctgtgtcaagtcgattgaagatcggatctcaaacctgaagggaattatctcaatgaaagtgagcctcgagcaaggatccgccaccgtgaagtacgtacctagcgtcgtgtgcctgcaacaggtgtgtcatcagattggtgacatgggttttgaggcatcaattgccgaaggtaaggctgcatcgtggccatcccgctctctgcccgcacaggaggcggtggtgaagctccgagtcgagggaatgacgtgtcaatcatgcgtgtcatccattgagggaaaagtgagaaagctccaaggtgtcgtcagggtcaaggtgtcacttagcaatcaggaggccgtgatcacctaccaaccatacctgattcaaccggaagatcttagagatcacgtgaatgacatgggctttgaagcagcaattaagagcaaggtcgcaccgctgagcttgggtcctatcgacatagagcgcctccaatcaacgaatcctaagcggcccctcagctctgcgaaccagaatttcaacaactccgaaacccttggtcaccagggttctcatgtcgtgaccctgcagcttagaatagacggcatgcattgcaagtcgtgtgtactgaacatagaagaaaacattggacagctgctcggagtgcaatcgatccaagtgtcacttgaaaacaagactgcccaagtgaagtacgatccaagctgtacctcccctgtggcgcttcagcgagcaattgaagctctcccccctggtaatttcaaggtcagccttcctgacggcgcagaaggaagcggcactgatcatcgctcgtcctcgtcgcatagcccagggtcgcctcctcgaaaccaagtgcagggaacctgttcgaccacccttatagctatcgcgggaatgacttgtgcttcgtgtgtgcattcgattgaaggcatgatcagccagcttgaaggagtccagcagatctccgtctcacttgcggaggggactgcaactgtcctttacaacccttcagtgatatctcctgaagaacttcgggcagcaatcgaagatatgggattcgaagcgtcggtcgtgtcagaaagctgctccactaatcctttgggtaatcactcggccggaaactcaatggtccaaaccacggatggtaccccaacttcagtccaggaggtggcaccacacaccggtcgtctgcccgcaaaccacgcccctgatatccttgcaaagtccccccaaagcactcgcgccgtggcaccacagaagtgctttctccagattaagggcatgacctgtgccagctgtgtcagcaacatcgaacggaatcttcagaaagaagcgggcgtgctttcggtcctcgtggcgcttatggcagggaaggctgagataaagtacgatcccgaagtaattcaaccccttgaaattgcgcagttcattcaggatctgggtttcgaagcagctgtgatggaagattacgccggatcagatgggaacattgaacttacgataactgggatgacctgtgcgtcatgcgtgcacaatatagagagcaagctgactcgcaccaacggaatcacttacgcatccgtggcccttgccacctccaaggcactcgtgaagttcgatcccgagattatagggcctagagacataatcaagatcatcgaggagatcggttttcatgcatcactggcacaaagaaatcctaatgcccaccatctggaccacaaaatggagataaagcagtggaagaagagttttctgtgctcacttgtttttggtattccggtcatggcattgatgatctacatgctgataccgtccaatgaaccgcatcaatccatggtgctcgaccacaacatcattccaggtctttcgatactgaacctcattttctttatcctgtgcacttttgtccagctgcttggcggctggtacttttacgtccaggcctacaagtctctgcggcatcgttcagccaacatggatgtgcttattgtgttggccacctccattgcatatgtgtactccctcgttatcctcgtcgttgcagtcgcggagaaagcagaaagaagccctgtgacgttttttgataccccgcccatgttgtttgtgtttatcgcactcggcaggtggcttgaacatctggcaaaatccaaaacctctgaagcgctggcaaagctgatgtccctccaagcgaccgaagccaccgtggtcactctgggggaggacaacctcattatccgagaagagcaagtccctatggaacttgtgcagcgcggggatatcgtgaaggtagtgcccggaggaaaattccccgtggacggaaaggtgcttgaaggaaacactatggcagacgaatcgcttattactggtgaggccatgcctgtgactaaaaagcctgggtccaccgtcattgcaggctcaattaacgcccatggatccgtgttgattaaggctacccatgtaggaaacgataccactcttgcacaaattgtgaaacttgtcgaggaggcacaaatgtctaaggctcctatacagcaactcgctgatcgcttttcgggatacttcgtgccttttatcatcattatgagcaccctgaccctcgtagtttggattgtgattgggtttattgatttcggagtcgtgcaacgatactttccaaatccaaacaagcatatctcgcaaaccgaagtgataatcaggtttgcatttcaaacctccattactgtcctttgcattgcatgtccctgttcgttgggtcttgctactccaactgccgtgatggtgggtacgggggttgcggcacaaaacggaatactgattaaaggaggcaagccactcgagatggcacataagattaagacggtgatgtttgataaaaccgggaccataactcacggtgtgcctcgagtgatgagagtgctgctgctgggcgatgtggccaccctccccctccgaaaggtgttggcagtggtgggaactgcggaggcatcatccgaacatcctcttggggtggcagtgacgaagtattgtaaagaagaactgggaactgaaaccttgggatactgcactgattttcaagccgttcctggttgtggaatcggttgtaaggtgtccaacgtggaaggaattctggcgcacagtgaacgtccactgtcggcacctgcatcgcatttgaatgaagcaggctcacttccggcagaaaaggatgctgtgccacaaactttctcggtcctcatcggaaatagggagtggctccggaggaacggcctgactatttcgtccgatgtttcggacgcaatgactgaccacgaaatgaagggtcagactgcaattcttgtcgccatcgacggggtcctttgcggcatgatcgcaattgcagatgcagttaaacaagaagccgcactggcggtccataccctgcagtcgatgggagtggatgttgtgctgataaccggagataatagaaaaactgccagagcgatagccactcaggtgggcattaacaaagtgttcgcagaggtcctcccttcacataaggtggctaaagtgcaagaactgcagaataagggtaagaaggtggcaatggtaggggacggcgtgaacgattcgccggcccttgcacaggcagacatgggagttgccatcgggaccggaacggacgtggccattgaagccgcagacgtggttttgatccggaacgatttgctggatgtggtcgcatccatacacttgtcgaagaggaccgtcagaagaattagaatcaacctggttctcgccctgatctataacctcgtgggcattccaatagcagcaggtgtgttcatgccgatcggtattgtcctccaaccatggatggggtcggcggcgatggcagcttcgagtgtgtctgtggtcctgagctccctccaactcaaatgttacaaaaagccggacctggaacggtacgaggcacaagctcacggtcatatgaaaccactcactgcatcccaagtctctgtgcatattggcatggatgatcgttggcgcgactcgccgcgggctaccccgtgggatcaggtgtcgtacgtgtcgcaggtgtcgctttcttcccttacttccgacaagcctagcaggcatagcgctgcggcagatgacgacggcgataagtggtcactgctgttgaatggtcgtgatgaggaacaatacatt

SEQ ID NO: 280123 - DNA, 4395 bp, Artificial Sequence
  derived and/or modified sequence
atgccggaacaagaacggcaaatcaccgcaagggagggggcctcgaggaagatactgtcaaaactgtcgctgccgactcgcgcatgggaaccagcgatgaaaaagagctttgcattcgataatgtcggatacgagggcggactggatggactgggtccgtcatcacaggttgccactagcacggtcaggatcctcggaatgacttgccaaagctgcgtgaagtcaatcgaggacagaatctcgaacctgaagggcatcatctcgatgaaggtgtcccttgaacagggatctgccaccgtgaagtacgtgccttctgtggtctgcctgcaacaggtgtgccaccagattggagacatgggtttcgaagcgtccatagcagaaggtaaagcagcctcctggccatctcgaagcctcccggcccaagaggccgtggtcaagctgcgcgtagagggaatgacgtgtcaatcatgcgtctcatccatcgagggcaaagtgcgaaaactgcagggcgtcgtgcgcgtcaaagtgagcttgtctaaccaggaggctgtgatcacctaccagccgtacctcatccagccggaagatctgagagatcacgttaatgacatgggattcgaggcggcgatcaaatccaaggtggccccgctgtcactgggccccatcgatatcgaacgcctccagtccactaacccgaagcgcccgctgtcctccgcaaatcagaatttcaataactccgaaaccctcggccaccaaggatcccatgtggtcaccctgcagcttcgcatagatggcatgcactgcaaatcctgcgtcctcaacatcgaagagaatatcgggcagctcctgggagtgcagtcgatccaggtgtctctggaaaacaaaaccgcccaggtcaagtacgacccgtcctgcacctcgcccgtcgctttgcagagagccattgaggcgctcccaccaggaaactttaaagtgtcacttcccgatggagctgaagggtcgggaaccgatcaccgcagcagctcaagccactcccctggctcacccccacggaaccaagtgcaaggaacttgctcaactaccctcatcgcgatcgctgggatgacctgcgcaagctgcgtgcactccatcgagggtatgatcagccagctcgagggagtgcagcagatctcagtgtcactcgcggagggaaccgccactgtcctgtacaatccatcagtcatctcgccggaggagctgcgtgctgcaattgaggacatgggcttcgaggcttccgtggtatccgagtcttgctcgaccaacccgcttggaaaccactctgcgggtaactcgatggtgcagactacggacggaactccgacctcggtccaagaagtggcgccgcacaccgggaggctgccggcgaaccatgccccggacattcttgccaagtccccacagtcaacccgggccgtggccccgcaaaaatgcttcctgcagattaaggggatgacttgcgcgtcgtgtgtctcgaatatcgaaagaaatctgcagaaggaagcaggagtcctctctgtcctcgtcgccctgatggcgggaaaggccgaaatcaagtatgatccagaggtgatccagcccttggaaatcgctcagttcatccaggacctgggatttgaagcggccgtgatggaggactacgcgggatccgatggtaacatcgagctcactatcaccggtatgacctgtgcctcatgcgtgcacaatattgagtcgaaactcactagaaccaacggcatcacttacgcctcagtggccctggcgacctccaaggcactcgtgaagtttgatcccgagatcatcggcccgcgcgacattatcaagattatcgaggagattgggtttcacgcctcgctggcgcagagaaatccgaacgcccaccatctggatcacaagatggaaatcaagcagtggaagaagagcttcttgtgttccctggtgttcggaatcccggtgatggccctgatgatctacatgctcatcccgtccaatgaaccccatcagtcaatggtgctggaccataacattatcccgggcctgagcatcctgaacctgatcttcttcattctgtgcacctttgtgcaacttctcggcggctggtacttctatgtgcaggcttacaagtctctgcgccaccgcagcgcaaacatggacgtgctcattgtgttggcaacctcaatcgcgtacgtgtacagcctcgtgatcctggtggtcgccgtggcagagaaggctgaacgtagccctgtgaccttcttcgacacccctcccatgctcttcgtgtttatcgctttgggacgctggctggagcacctggccaaatcaaagacttcagaggctctggcgaagctcatgtcgctgcaggcgacggaggccactgtggtgaccctcggagaagataaccttatcatccgggaagagcaggtcccaatggaactcgtgcaacggggagatatcgtgaaggtcgtgccgggcggaaagtttcctgtcgatggtaaggtgctcgaaggcaacaccatggctgatgagagcctgatcaccggggaagctatgccagtgaccaagaagcccggtagcaccgtgatcgccgggtcgatcaacgcgcatgggtccgtccttatcaaagcgactcacgtgggaaatgacactactttggcgcagatcgtgaagctcgtcgaagaagcccagatgtctaaggctccgatccaacagttggcagaccggttttccggatacttcgtgcctttcatcattatcatgtcaaccctcaccctcgtggtgtggatcgtgatcggcttcatcgacttcggcgtggtccagcgctacttccctaatccgaacaaacatatttcccagaccgaggtcatcatcaggtttgctttccagacctcgatcactgtgctctgcatcgcgtgtccttgctccctcggactggccaccccgaccgcggtaatggtgggcactggggtcgcggcacagaatggcatcctgatcaagggaggaaagcctcttgaaatggcacacaaaatcaagaccgtgatgttcgataaaaccggaactatcacccacggcgtgccacgggtgatgcgggtgctcctgctgggagacgttgccacgcttccactgcgcaaggtcctggcagttgtgggaactgccgaagcctcgagcgaacacccgctgggagtggctgtgaccaagtattgcaaagaggaactgggaaccgagactctgggctactgcaccgatttccaggctgtgccgggttgcggaatcggatgcaaggtgagcaatgtcgaaggcatcctggctcattccgaacgccccctcagcgccccagcctcacacctgaacgaagccgggtcccttccggctgagaaggacgccgtcccccagacgttcagcgtgctgattggtaaccgagaatggctgcggcgtaatgggctcactatctcgtcggatgtttcagacgccatgactgaccatgaaatgaagggccaaacggcgattctcgtggcaattgacggcgtgctgtgcggcatgatcgcaatcgcggacgccgtgaagcaggaagccgcgctcgcagtgcacaccttgcagtccatgggagtggacgtcgtgctgatcaccggtgacaatcgcaagactgcgcgcgcaatcgcgactcaggtcggaattaacaaagtgtttgcggaggtcctgccatcacacaaagtcgcaaaggtccaagagctgcaaaacaaggggaagaaagttgcaatggtgggagatggcgtgaatgactcgcctgctctggcgcaagcagacatgggagtggcgatcggcactggtaccgacgtggcaatcgaagcggcggatgtcgtgctgattaggaacgacctcttggacgtggtggcctcgatccacctctcgaaacgcactgtccggcgcatcagaatcaatttggtacttgccctcatctacaacctggtgggaatcccaatcgccgctggggtgttcatgcctatcgggatcgtcctccagccgtggatgggctcggcggccatggctgcgagcagcgtctcggtggtgctgagcagcctgcaactgaagtgctataagaagcctgacctggaaagatatgaagcccaagcgcacggacatatgaaaccactgactgccagccaggtgtccgtccacatcggcatggacgaccgctggcgggactccccgcgggctaccccctgggaccaagtgtcctacgtctcccaagtgtcgctgtcgagcttgacctccgacaagccgtcgcggcactcagcggcagcggacgacgacggtgacaagtggtcccttctgctgaacggaagggacgaagaacagtacatc

SEQ ID NO: 280124 - DNA, 4395 bp, Artificial Sequence
  derived and/or modified sequence
atgcctgagcaagagcggcagataacagctcgtgagggagcatctcggaagatcctctctaaattgagcctacccacccgcgcatgggagccagccatgaaaaagagttttgccttcgataacgtgggctacgaagggggactagatgggctgggcccatctagccaggtggccacaagcacagtcaggattcttgggatgacctgtcaatcatgcgtgaaatctatcgaagaccggatcagcaacctcaaagggatcataagtatgaaggtgagcctggagcaagggtccgccactgtgaaatacgtcccctcagtggtctgcctgcagcaagtgtgccaccagatcggggatatgggattcgaggcgtccatcgctgaggggaaagccgcaagctggccttcaaggtctctgccggcccaggaggccgtagttaaactgagggtggaaggaatgacgtgccagtcctgcgtgagcagtatcgaaggcaaagtccgcaaattacagggagttgtccgggtcaaggtatctctctccaatcaggaagccgtgatcacctaccaaccctaccttatacagccggaggacctgcgcgaccacgttaacgatatgggctttgaggcggcgataaagtccaaggtcgcgcccctgagtttaggcccaattgacatagagcggctgcagtcaacgaaccccaaaaggccattatcttcagccaaccagaactttaacaacagcgaaacactgggccatcaggggagtcatgtcgtcacacttcagctccgtattgatggcatgcattgcaaatcctgtgtactgaacatcgaggagaacattgggcagctgctgggcgttcagtcaattcaggtctcccttgagaacaagaccgcacaggtgaagtacgatccgtcctgcacgtctccggtggcactgcagagggccatcgaggcactgccgcccgggaacttcaaggtgagtctacccgacggggctgaaggctccggcacagatcaccgaagtagttcttctcacagtcctgggagtccaccgcgcaaccaggtacagggaacatgttctactactttgattgcgatagcaggcatgacatgcgcctcctgtgtgcactctatcgagggaatgatctcccagttggagggcgtgcagcagatctccgtgtctctcgccgaggggacagcaactgtgctgtacaaccccagcgtgatctctcctgaggagctgcgagccgctatcgaagacatggggttcgaagcttcagtcgtcagtgaaagctgctcaaccaaccctttagggaaccactctgcagggaactctatggtgcagactacagatggtacgcccacgtctgtacaggaggtagcacctcatacagggcgcttgcccgcgaaccacgcccctgatatcctggcaaaatctcctcaatcaactcgggcagtcgccccccagaaatgtttccttcaaatcaaaggaatgacttgcgcctcatgtgtatcaaacatcgaaagaaacttacaaaaagaggctggagttctcagcgtgctggttgccctgatggccggaaaggccgagattaagtacgaccccgaggtcatccagcccctggaaatcgcccaattcattcaagatctcggtttcgaagctgccgtgatggaagactatgcagggtctgacggcaacatcgaactcaccatcaccggcatgacctgcgcttcttgcgtccacaacatcgaaagcaagttgacacggaccaacggcatcacctacgcgtccgtggcgcttgcaactagcaaagccctcgttaaattcgaccctgagataattggcccccgggacatcatcaaaatcatcgaggagataggcttccatgcatctttggcacagagaaatccgaatgctcatcacttggatcacaaaatggaaatcaaacagtggaagaaaagtttcctatgttcactggtgttcgggataccagttatggcactgatgatttatatgctgatcccctccaacgaaccccaccagtccatggtgttggaccataatatcatcccaggactgtccattctgaatctgattttctttattctttgcactttcgtgcagctcctgggcggttggtacttttacgtccaggcctataaaagtttgagacaccgatcggctaacatggatgtcctgatcgttctggcaaccagcatcgcctacgtgtacagtcttgtgattttggtggtcgcagtcgccgagaaggccgaacgtagccctgtgaccttctttgatacacctcccatgctgttcgtgttcatagcgttagggaggtggctcgagcatcttgcgaagagcaaaacctctgaggctctggccaagctcatgtccctgcaggctaccgaggctactgtggtcactttaggagaggacaacctcatcattcgggaagaacaggttcctatggagcttgttcaacgtggagacatcgtgaaggtcgtgcctggtggaaaattccctgtcgacggcaaagtcttggagggtaacacaatggcagatgaatccttgatcacgggggaggccatgcctgtgaccaagaagccagggagcacagttattgcaggtagcatcaatgcccacggaagtgtgctgatcaaggccactcacgttgggaacgataccacactggcacaaatcgtgaaactcgtcgaggaggcccagatgagcaaggcacccattcaacagttggccgatcgattttcgggttacttcgtgcccttcattataatcatgtccactcttacactcgttgtgtggatagtcatcggcttcattgacttcggggtggtgcaaagatatttccctaaccccaataaacatatttcccagaccgaggtgatcatcagattcgcattccagactagcataacagtgctgtgcatagcctgcccttgcagtctaggcctggctaccccaactgccgtgatggtggggaccggagtcgccgcccagaacggtatccttattaaggggggcaagcctctcgagatggctcataagataaagaccgtgatgtttgacaagactggcaccattacacacggggttccaagagtgatgcgggtcctgctgcttggcgatgttgcaaccctgcctctgcggaaagtgcttgccgtagtcggcaccgcagaggcaagcagcgagcacccgctgggagtcgctgttaccaaatactgtaaggaagagctggggactgagacccttggttactgcacagactttcaggccgtgcctggctgcgggattggatgcaaagtgtctaatgtggaagggatcctggcccattccgagcgtcccctgtccgccccagctagccacctgaacgaggccggctctcttccagcagaaaaagatgccgtgccccagacattcagtgtcctaatcggcaatcgagaatggctgcggaggaacgggttaaccatatccagcgacgtctccgatgccatgactgaccacgagatgaagggccagaccgccattcttgtcgcaatcgatggcgtgttatgtggaatgatcgccattgcagacgccgtgaagcaggaggccgccctcgcagtgcataccctgcagtccatgggagttgatgtggtgctgattactggggataaccgcaagacggcccgcgccatcgctacacaggtgggaattaataaagtctttgctgaagtcttgccatctcataaggtagccaaagtccaggagctgcagaacaaagggaagaaagtcgctatggtgggcgacggcgtcaatgatagtccagccctagcccaggctgacatgggggtcgcaattggcacaggtactgacgtggcgatcgaggccgccgatgtcgttttaatccgaaacgacctgctcgacgttgtggccagtatacacctgagcaaacggactgttagacgaatccggatcaacctcgtgttagcgttgatctacaatttggtcggaattcccatcgccgctggtgtgtttatgccaatcggtattgtgctgcagccatggatgggtagcgcggctatggccgccagcagtgtgtccgtcgtcctgagttctttgcagctcaaatgttacaagaagcccgaccttgagcggtacgaggctcaggcccacgggcacatgaaaccgctcaccgcatctcaggtgtcagtccatatcggcatggatgataggtggcgggactcccctagggctaccccttgggatcaggtctcctacgtgtcccaggtctctttgagtagtctgacctcagataaaccatcccgacattcagcggccgccgacgacgacggcgataagtggagcctcctactgaacggcagggatgaggagcagtacatt

SEQ ID NO: 280125 - DNA, 4395 bp, Artificial Sequence
  derived and/or modified sequence
atgccggagcaggaacgccagataacagctcgagagggggcctctcgaaagatcctgtccaagttgagtctgcctacccgggcatgggagcctgccatgaaaaaaagcttcgcattcgataatgtggggtatgagggggggctcgatggactcgggcctagctctcaggtcgcgacttctactgtccgcattctgggaatgacctgccagagttgcgttaagtctattgaggatcggattagcaatctaaaaggcatcataagcatgaaggtcagccttgaacagggttctgcaaccgtaaaatacgttccgtctgtcgtctgcctgcagcaagtatgccaccagataggcgatatggggttcgaggctagtatcgcagaaggcaaagcggcaagttggccgagtagaagcttacccgcccaggaagccgtcgtaaagttgcgcgttgagggtatgacttgtcagtcatgtgtttcgagtatcgaagggaaggtacgaaagttgcagggggtggttcgggtcaaagtcagcctctcgaatcaggaggcagtgatcacataccagccatatctcatccagcctgaagatctacgagaccacgtgaacgatatgggcttcgaagcagccattaaatcaaaggtggctcccctttcactgggtcccattgacattgaacgtctccaaagcacgaatccaaagcgccctctgtcatctgcaaaccaaaatttcaataatagcgaaactcttggccaccagggtagccatgtcgtaacactgcagttgcgcatcgacgggatgcactgcaagagctgcgtattaaacatcgaagaaaacatcggtcagctgctcggggtacagagtattcaggtttctctcgagaataagactgcacaggtgaagtatgatcccagctgtacctctccagtcgccctccagagagcgatagaagctctgcctcccggaaattttaaggtctccctgcccgatggagcagagggttcaggcacagatcacaggtcttcttcgagtcacagccccggatcaccaccacggaaccaagtccagggcacttgcagcaccacactcatcgctattgcagggatgacttgcgcttcatgcgtccactctatcgagggcatgatctcacagctggagggtgtgcaacagatttccgtgtcattggctgagggaactgccactgtcctttataatcctagtgtgatctccccagaagagctgcgcgctgcgatcgaggacatgggattcgaggctagtgtagtctcagaatcgtgttccaccaatcctctcgggaaccatagcgccgggaattccatggtccagacaacagacggaacacctacatctgtgcaggaggtggcacctcacaccgggcgactgcctgccaaccatgcgccggacatcctggccaagtcgcctcagagtactagggctgttgcaccccagaaatgcttcctgcagattaaggggatgacctgcgcctcatgtgtgtccaacattgagaggaacctccaaaaggaggccggcgtactgtccgtgctggtcgccctgatggccggtaaggccgagattaaatacgacccagaagtgatccagccattggaaattgcccagttcatccaggatctagggttcgaagccgctgtaatggaggactatgccgggagcgatgggaatatcgaactgaccataactggcatgacatgcgctagctgcgtacacaatatagagtcaaagctaactcgcaccaacgggattacctacgctagtgttgcattggcaacctccaaggccctcgtgaagttcgatccagaaataatcgggcccagagacatcatcaaaatcattgaagagatcgggtttcatgcatctctggcacagagaaaccccaatgcgcatcatctggatcataagatggaaatcaagcagtggaagaagtccttcctctgctctctcgtttttgggattcctgtgatggcccttatgatctatatgttgataccctcaaatgagccccaccaaagtatggtcttggaccataacatcatccctggattgagcatcctcaacctgatcttctttatactttgtacatttgtgcagctcctaggcgggtggtatttttacgtgcaggcttataaatccctccgtcataggtctgctaacatggacgtcttgatcgtgttagcaaccagtattgcatacgtctattccctagtcatactagtagttgccgtggctgagaaagcagagcgatctcccgttacctttttcgacacacccccaatgctgttcgtgttcattgctctgggaaggtggcttgagcatctcgctaagagtaagactagcgaagcactcgcaaagttaatgagccttcaggccaccgaggcaacagtagtcactcttggggaagataatcttattatacgggaggagcaggtgcccatggagcttgtgcagcgcggagatatcgtgaaagtcgtcccaggcggaaagttccccgtggacggaaaggtgctcgagggaaacaccatggcagatgaatccctcatcaccggggaagcaatgccggtgacaaaaaaacctggctctacagtgattgcagggtctattaatgcacacggctccgttctgatcaaggccacccacgtgggcaatgatactaccctggcccaaatcgtgaagctggtggaggaggctcagatgtcgaaagcacctatccagcagctggcggaccgctttagtggatacttcgttccttttattattatcatgtccaccctgaccttagttgtatggatcgttattgggttcatcgatttcggagtggttcaacgctattttcccaatcctaataagcacatatcccagactgaagtgataatacggttcgcgtttcagaccagtatcacagtcctctgtatcgcgtgcccatgtagcctaggactggccacaccgaccgctgtgatggtcggcactggagtggctgcccagaatggcattctgattaaaggcggcaagcccctggagatggcacataaaattaaaacagtgatgttcgacaagacgggtacaatcacgcatggagttccccgcgtgatgagagtgctgctgcttggcgacgtagcaaccctccctctccgcaaagtcctagccgtggtaggtactgccgaagcctcatcagaacatcctcttggagtggctgtcaccaagtactgcaaggaagagctgggaaccgaaacgttggggtactgcacagacttccaggcagtcccaggctgcggcatcggctgcaaagtgtcaaatgtggagggcatattggcacatagcgagcggccactttcagcgcctgcctcacatctgaacgaagccggcagtcttcccgcggaaaaggatgccgtcccccaaactttcagcgtactcattggtaatcgagagtggcttagaaggaacgggctcacaataagcagcgatgtgtccgatgccatgacggatcatgagatgaagggccagacggccattcttgtggcaatcgacggcgtcctctgtggaatgattgctatagccgatgcagtcaagcaggaggccgcactagccgtgcacacgctgcaatcaatgggtgtggatgtggtgcttataacaggagacaacaggaagacagcccgggcaattgccactcaagtgggcattaataaggtcttcgcagaggtgttgccttcccacaaggtggccaaggttcaagagttgcaaaacaagggcaaaaaggtcgcaatggtgggcgacggggtgaatgatagccctgccctagcccaggccgatatgggggtggctatcggaactgggacagacgtagccatagaggcagcagatgttgtgctgatccgcaacgatttgctggatgttgtggctagtattcacctctccaagcggactgtgaggagaatcagaatcaacctggttttggctctcatctacaacttggtaggtatacccatcgccgctggcgtctttatgcctattggaatagtgttgcagccctggatggggtccgcggcaatggccgcctcatccgtgtctgtggtcctgagctccctacaactaaagtgttacaagaaaccagatcttgaaaggtatgaggcacaggcccatggtcatatgaaacccttgacagcctcacaggtatccgtgcatattggaatggacgatcgatggagggacagccctcgcgcaacaccctgggatcaggtgtcatacgtgagccaagtctccctgtcttccctaacttctgacaagccaagtcggcattcggccgctgctgatgacgacggagataagtggtctctactgcttaatgggcgtgacgaggaacagtatatc

SEQ ID NO: 280126 - DNA, 4395 bp, Artificial Sequence
  derived and/or modified sequence
atgcccgagcaagagagacagatcacagccagagagggggcctctcggaagatccttagcaaactatccctgcctactagggcctgggagcctgccatgaagaagagctttgccttcgataatgttggctacgagggtggcttggacggtctcggcccctccagtcaggtcgccactagtactgtacggatcctgggcatgacctgccaatcttgcgttaagagtatcgaagatcggatttccaacctgaaaggcattatctccatgaaggtgagcctggagcagggctccgctaccgtcaagtatgtaccctctgtggtgtgccttcagcaggtctgtcaccagattggagatatgggcttcgaagcatccattgccgagggcaaggctgcaagttggccatcccgatctctccccgcccaagaggccgtggtgaaattaagagtggaagggatgacttgccagagctgcgtcagttcaatcgaaggcaaagtgcggaaactacagggggtggtccgagtaaaggtgtccctcagcaaccaggaggcagtaatcacctaccagccttatcttattcagcccgaagaccttcgcgaccacgtcaacgatatggggtttgaagccgcaatcaaaagtaaggttgcccccctatctcttggaccaattgacatcgaacgcttgcagtccaccaatcccaaaaggccactctcgtccgctaaccaaaattttaataacagcgagactctgggacaccaggggtctcatgtggtgactttacagctcaggattgatgggatgcattgtaaatcctgcgttctcaatatcgaggaaaatattggccaattgctgggggtgcaatctattcaagtgtcgctggaaaacaagacggcgcaggtaaagtatgacccttcttgtacatcacccgtcgcactacagagagcaatcgaggccctacctccaggaaactttaaagttagtctgccagatggtgcagaaggttcaggtactgatcaccggtcgagctcttctcactcacccggatctcccccgcgcaaccaggtccagggaacctgcagtaccacgctcattgccattgccggaatgacctgcgcctcatgtgtgcatagcatcgagggcatgatttcccagctggagggagtgcagcaaataagtgtgtcccttgccgaaggcacagccaccgtcctgtataatccctccgtgatcagtccagaggagttgcgcgcggccatcgaggacatgggcttcgaagcgtcggtggtgagcgagtcctgtagcaccaaccctctggggaatcattccgctggtaactccatggtgcaaacaactgacggcacccctacaagcgtgcaagaagtggccccccatacaggacgattgccagcaaaccatgctcccgatatactcgcaaagtctccccagagtacccgtgccgtggctccacagaaatgtttcttgcagatcaagggaatgacttgcgcaagttgtgtgagcaatattgagcggaacctccagaaggaagctggggtgctcagtgtgctggtggccttgatggccgggaaagcagagattaagtacgatccagaagtgattcagccattagagattgctcagtttattcaagatctgggcttcgaggcggccgtgatggaggattatgcagggtccgatggcaacatcgagctgacgattactggcatgacatgtgcaagttgcgtccacaatattgagagcaagttgacacgcacgaatggaataacgtatgccagtgtggccctcgctacttctaaagccctggtgaagtttgaccctgagatcatcgggcccagagatatcattaaaataatcgaggagataggttttcatgcttctttggcacagaggaatcccaacgcccaccacctggaccacaagatggagatcaagcagtggaagaaatctttcctatgttccctggtctttggcatcccggtaatggctctgatgatatacatgctgatcccgagtaacgagcctcaccagagcatggttctcgatcacaatatcatcccaggtctgtccattcttaatctgatcttctttatcctttgcacgttcgtgcagcttctggggggctggtatttttatgtgcaggcatataaaagccttcgccaccgtagcgctaatatggacgtgcttatcgtgctggccactagtatcgcttacgtgtacagcttagtgatcctggtcgtggccgtcgcagaaaaagctgaacggagtccagtgacgttctttgatactccacccatgctgttcgtgttcatcgctcttggacggtggctcgagcacttggccaagagcaagacaagcgaggcactggcaaagttgatgagtctgcaagctacggaagccactgtagtgacactgggggaggacaacttgatcattcgcgaggaacaagtgcccatggagctcgtacaaagaggagatattgttaaagtggtccctggtgggaagttccccgttgacggtaaggtgttagaagggaatacgatggcagacgagagcctgataacgggggaggctatgcctgtcacaaagaagcctggttccaccgtaattgccggatctattaacgcccatgggtctgtcttgattaaggcaacccatgtgggaaacgataccacattggctcagattgtgaaactggtggaagaagctcaaatgtccaaggcccctatccagcagctggcggaccgattttccggatattttgtgcccttcatcataatcatgtcaacccttacccttgtagtgtggatcgtaattgggttcattgattttggagtcgtccagcggtatttccccaatcccaataaacacatctcccagactgaagtgataatcaggtttgcatttcagactagtattactgtattgtgtattgcatgcccttgctccctgggattagctaccccgaccgccgttatggtgggaacaggtgttgctgcacagaacggcattctgattaaaggaggcaaacccctcgagatggctcacaagataaagacagtgatgttcgacaagacagggacaatcactcacggagtcccccgggtcatgcgcgtgttgctactgggcgatgtcgctactcttcccctccgaaaggtgctcgcagttgtgggaactgccgaggcttcctctgagcacccactaggagtggctgtgaccaagtattgcaaagaggagctgggcacggaaacattaggttactgcaccgacttccaggctgtgccgggctgtggaatcggttgtaaggtatcaaacgtggagggcatcctcgctcactcagagcgaccgttgagtgcacccgcatcgcacctaaatgaagcaggctccctaccagccgaaaaggacgctgtgccacagacattttctgttctgattggtaaccgcgaatggctgcggcggaatggcctcacaatatcaagcgatgtatcagatgccatgaccgaccatgaaatgaaggggcagactgccattctggtcgcaatcgatggcgtactgtgtggtatgattgccattgccgatgccgtgaaacaagaggccgcccttgccgtgcacaccttgcagtccatgggagttgacgtggtcctgattactggggataatcgtaaaaccgcccgcgcgattgctactcaggtggggataaataaagtgttcgccgaggtgttgcccagccataaggttgcaaaggtgcaggaactgcagaataagggaaaaaaagttgcaatggtgggagacggggtcaacgacagtccggcactggcccaagccgacatgggagtagcgatcggaactggaaccgatgtggccatcgaagccgccgatgtggtcctgatacgaaacgatctgctggatgttgtggcttcaatccacctgtctaagagaacagtgagacgtatcagaataaacctggtcctggctttaatctataatttggtcgggattcccatagctgctggagtgtttatgccaattgggatagtactccagccatggatgggatcagcagccatggcagctagcagcgtcagtgtcgttttgagctctctgcagctgaaatgctataagaagccagacctggaacgttacgaggcgcaggcccatggacacatgaaacctcttactgccagtcaagtgtctgtacacatcggaatggacgacagatggagggactcacccagggcaaccccctgggatcaagtgtcttacgtgtcgcaggtctcactatcttcactgacctcagataagccgagccggcattcagccgctgcagacgatgacggcgacaagtggagcctgcttttgaatggccgcgacgaagagcagtatatt

SEQ ID NO: 280127 - DNA, 4395 bp, Artificial Sequence
  derived and/or modified sequence
atgccagagcaagaaagacaaatcaccgcaagggaaggtgcatccagaaagatactttctaaactgtcccttccaacaagagcctgggagccagccatgaaaaagtcattcgcgttcgacaatgtgggttatgagggtggactggacggactcggaccctcttctcaggtggcaacgtccaccgtcagaatcttgggcatgacttgtcagtcctgtgtcaagagcattgaggacaggattagtaacttgaagggaataatctccatgaaggtcagccttgaacaaggtagcgccaccgtcaagtacgtgcccagtgttgtctgtctgcagcaggtgtgccaccagataggcgacatgggtttcgaggcaagtatcgcagagggaaaagccgcctcctggccttcaaggtcactccccgcacaagaggcggttgtgaaactcagggttgagggtatgacctgccagagctgcgtttcaagcatcgagggcaaagtgagaaaactgcaaggagtggtgagggtaaaggtgagcctgagcaatcaagaagcagtgatcacgtaccaaccctacttgatccaacccgaggacctgagggatcacgtgaacgacatgggttttgaagccgccatcaagtccaaggtagcacctctcagcctgggcccaatcgatatagaaagactgcaatcaaccaacccaaaaaggcctcttagttccgctaaccaaaatttcaacaattccgaaacgctgggtcaccaaggttcccatgtggtcacattgcagctgcgcattgacggcatgcattgtaagagttgcgtgcttaacatcgaggaaaacattggacaactcttgggcgtgcagtcaatccaggtcagtttggagaataaaacagcacaagtcaagtatgatcccagctgcacaagtcctgtcgctcttcagagagccatcgaagctctgcccccgggcaatttcaaggtcagcctgcctgacggcgcggaaggctcaggcacggatcacaggtcctcttccagccatagccccggttcccctcctagaaaccaagtgcagggcacctgtagcaccacactgatcgccatcgcaggtatgacatgcgctagctgtgtccacagtatagaaggtatgattagtcaattggaaggcgttcagcagatttcagtgtccctcgcagaaggtaccgctaccgtactttataatcccagcgtcattagtcctgaggagcttagggctgcgattgaggacatgggtttcgaagcgtcagtggtgagtgaatcctgttctaccaaccccctcggcaatcactccgctggtaactccatggtccagaccacagatggaactcctacaagcgtccaggaggtagctccacacaccggaaggctgccagcaaaccatgctccggacatcctggccaagagcccccaaagcaccagagctgtcgctccccagaagtgctttctccagattaagggcatgacatgtgcctcttgtgttagtaacattgagagaaatttgcaaaaggaggctggcgtcttgtctgtacttgtggccctcatggctggaaaagcggaaatcaagtatgaccctgaagttatccagccccttgaaatcgctcagttcatccaggatctcggctttgaggcagccgtcatggaggattatgcaggttctgacggcaacattgagctcacaatcactggcatgacttgcgcgtcctgtgtgcacaatatcgagagtaaactgacaagaaccaacggaattacttatgcaagcgtcgctctggcaacaagcaaggccctggtcaagttcgatccggagatcattggccctcgcgacatcataaagatcatagaggaaatcggtttccacgcctctttggctcagcgcaatccgaacgcccaccacttggatcacaaaatggaaatcaagcagtggaagaagagctttttgtgtagtctggtttttggcatacccgtcatggcgctcatgatctacatgctgatcccatctaacgaacctcaccagtccatggtgttggaccacaatatcatcccaggattgagcatcctcaacttgatatttttcattttgtgcaccttcgtacagctgctgggaggctggtatttctatgtacaagcctacaaaagcttgcgccatcgctctgctaatatggatgtcctgatagtgctggccacttccattgcgtatgtgtatagcctcgtgatcctggtagttgctgtggcagagaaggccgaacgctcccctgtgacattcttcgacacccctcccatgttgttcgtattcatcgcattgggtaggtggctcgaacaccttgccaaatcaaaaactagtgaagcactggccaagctgatgtcattgcaagccactgaggccacagtcgtcactctgggcgaggacaatttgatcatcagagaggaacaggtccctatggagttggttcagaggggtgacattgtcaaggttgtgccaggcggtaagtttccagtggatggtaaggtcctcgaaggcaacaccatggcagacgagagccttatcacaggtgaagccatgcccgtcacaaagaagcccggtagcaccgttattgcgggttccatcaatgcacacggctctgtgctgataaaggctactcatgtcggaaatgataccacgttggctcaaatcgtcaagctggtggaagaagcgcagatgagcaaagcccctatccagcagctcgcggacagatttagtggatacttcgtgccattcattatcatcatgtccacactgacccttgttgtgtggattgtgatcggtttcatcgacttcggagtcgtccagcgctatttccccaaccccaacaaacacatcagccaaactgaggtcattatcaggttcgcctttcaaacttccatcacggtgctttgcatagcttgcccttgttctctgggcttggcgacacccactgccgtgatggtgggcactggtgtggccgctcagaacggtatcctgattaaaggaggtaaacctcttgagatggcccataagatcaaaacggtcatgttcgacaaaactggaactattacccacggcgtgcccagggtcatgagggtcctgctgctgggcgacgttgctacgttgcccctcaggaaggtcctggccgttgtcggaaccgcggaggcatctagcgaacatcccctgggtgtcgccgtgaccaagtactgcaaagaggagctgggaacagaaactcttggatattgcacagacttccaggcagttccaggttgcggtatcggatgcaaagtatccaatgtcgagggcatcctcgcgcactccgagaggccgctctcagctccagctagtcacctgaatgaagccggatcacttcccgctgagaaagacgcagtcccccagactttcagcgtcctgataggcaacagggaatggctcaggagaaatggcctgaccattagctccgacgtatctgatgccatgacagatcacgaaatgaagggccaaacagctatcctggtcgccattgatggcgtcctttgcggcatgatagccatcgccgatgcagttaaacaagaggctgcactcgcagtccatactttgcagagcatgggcgtggacgttgttctgatcaccggcgataaccgcaaaacggccagagcaatagccacacaggtaggcatcaacaaggtctttgctgaagtgcttccttctcataaggtcgccaaagtacaggagctgcaaaacaaaggtaagaaggttgccatggttggagacggagtaaacgactctcccgctctggcccaggctgatatgggtgttgccattggtactggtacagacgtcgccatcgaagccgcagacgtagtcttgatccgcaatgaccttctggacgtagttgcctcaatccatctgtcaaagcgcaccgtgaggagaattaggattaatctggtgctggcattgatttataacctggtcggtattcccatcgcagcgggagtattcatgcccatcggcattgttctgcaaccttggatgggatccgcggccatggccgcttctagcgtgtctgtggtgctgagctctctgcagctgaaatgttataagaaacctgatctcgaaaggtacgaggctcaggcacacggtcacatgaagcccctgaccgcctcccaggtgagcgtgcacatcggaatggatgatcgctggagggatagtcccagggccacgccatgggaccaagtctcctatgtgtctcaggtgtctctgtcttctttgacctcagacaagccttccaggcattctgctgccgcggacgatgacggcgataagtggtccctccttctgaacggaagggacgaagagcagtacatt

SEQ ID NO: 280128 - DNA, 4395 bp, Artificial Sequence
  derived and/or modified sequence
atgccagaacaggagaggcagatcacggcgcgggagggagctagtaggaagatcttatcgaagttatccctacctacgcgcgcttgggaacctgctatgaagaagtcgttcgctttcgacaacgtcgggtacgagggcggcttggacgggcttggaccaagtagtcaggtcgccacttctactgtgcggattctcgggatgacatgccagtcctgcgtcaaatctatcgaggaccgaatatctaacctgaagggcatcattagcatgaaggtctctcttgagcaggggtcggccactgtgaaatacgtgccaagcgtggtgtgcctgcagcaagtgtgccatcagattggtgacatggggttcgaagcgagcatcgcagagggaaaggccgcctcgtggccctccagatctttgccagcccaggaggcggtcgtgaaactgagggtggagggcatgacctgccagtcttgcgtctctagcatcgagggtaaggtaaggaagcttcaaggggtggtgcgggtgaaggtcagcctgagcaatcaggaggcagtgataacctaccagccttacttgatccagccagaggatctccgcgatcacgtcaacgacatggggtttgaggccgcaattaagtctaaggttgccccgctgtccctggggccaattgatatcgaaagactccagagtactaatccgaagcgtccactatctagcgctaatcagaacttcaacaattccgaaactctcggtcatcaggggtcgcacgtggtcacgctgcagctgagaattgatggaatgcattgtaaatcgtgtgtgctgaatatcgaggaaaacatcggccagctgctgggagtgcaaagcattcaggtttccctcgaaaacaagacagcacaggtgaaatacgacccctcttgcacttccccggtagccctgcagagagcgatcgaggcactgccccctgggaattttaaggtttccttgcccgacggcgcagaggggtccggaacggaccatcggtcctcaagctcccattctccagggagccctcctaggaatcaggtgcagggaacctgctctaccactttgattgcgatcgccggaatgacatgtgcgagctgcgtccactcaattgagggcatgatatcccagcttgagggtgtgcagcagatcagtgtgtctctggccgagggcaccgccaccgtgctctacaaccccagtgtaattagcccggaagagctcagggcagctatcgaagacatgggatttgaagccagtgttgtgtccgagtcatgctccacgaatcccttaggcaaccattctgcaggtaacagcatggtgcagacaaccgacgggacaccgacctccgtacaggaagtcgcccctcataccgggagactgccagcgaatcatgctcctgatattcttgcaaaatcaccccaatccacaagggctgtagcgccacagaaatgtttcctgcagattaaaggaatgacatgtgccagctgtgtgtccaatatcgagagaaatctgcaaaaggaagccggggttctttctgttttggttgccctgatggctggcaaggccgaaatcaagtacgatcctgaggtgattcaaccactcgagatagcccagttcatccaggacctgggttttgaggcggctgttatggaagattacgctggtagtgacgggaacatagagctgaccattaccggaatgacttgcgcctcttgcgtccacaatatcgaatccaagctcacacgaacaaatggaataacatacgcctccgtagccctggcaacttccaaagcactggtcaagttcgatcccgaaatcatcggcccacgggatatcatcaaaattatcgaggaaatcgggttccacgcgtccctggcccaacgaaaccctaacgctcatcatttggaccataaaatggagatcaaacagtggaagaaatcatttctctgcagcctggtgtttggtatacccgtcatggcgcttatgatctatatgctcatcccatcaaatgagcctcaccagtcaatggtcttggaccataatatcatacccggattgtccattctgaatctgatattctttatcctgtgcacttttgtgcagctattggggggctggtacttttatgtccaagcttacaagagtctcagacacaggtccgccaacatggacgtcttgattgtgctggcaacctctatcgcttacgtgtactctctggtcattctcgtggtggccgtggccgaaaaggcggagcggtctcccgtaactttttttgatactccccccatgcttttcgttttcattgcgctcggccgctggctggagcatctagcaaagagcaagacctctgaggctctggccaagctgatgtccctacaagctacagaggcaaccgtggtaaccctcggcgaggataacctcattattagggaggagcaggtccccatggagctcgtgcaacgcggggacatcgttaaggtcgttccaggcggcaaatttccagtggacgggaaagtgcttgagggcaacactatggctgatgagtccctgataactggcgaggcaatgcctgtgactaagaagcctggctcaaccgtgatcgcgggtagcataaacgcgcatgggtcggtactgataaaggcaactcacgtcggaaacgatacaactttagctcaaatagtcaagctggtggaggaggcccagatgagtaaggctccgatccagcagctcgccgatagattttcaggatatttcgtcccctttatcataatcatgtcgaccctcactcttgtggtatggattgtgattggttttattgatttcggtgtggttcagagatactttcccaacccaaataagcacatcagccagaccgaggtgatcatacgcttcgctttccaaaccagtataaccgtgctctgtatcgcttgcccctgctctctgggcttagctactcccactgccgtgatggtgggaacgggagtcgccgcccaaaacggcattctgatcaaaggtggaaaacctctcgagatggcacacaagatcaagactgtgatgtttgataagactggtaccattacccatggtgtgcccagagtgatgcgagtcctgctcctgggggatgtcgcaaccctgcctctacggaaggtcctagccgtcgtaggaactgccgaggccagtagcgagcacccgttaggtgttgccgtgacaaaatactgcaaggaggaattaggtacggagaccctgggatattgtacagactttcaagccgtgcccggttgcggcattggctgtaaagtaagtaacgtcgagggcatcctggcccacagcgaaagacccctcagcgcaccggcttcacatctgaacgaggctggatctctgcctgcagagaaagacgcagttccacaaacattctcagtcttgattggaaacagagagtggctgcgcagaaatggactgacaatatcatcggacgtgtctgacgcaatgactgaccatgaaatgaagggacagactgcaatcttagttgccattgacggcgtgctgtgcggcatgatcgccatcgctgatgccgtgaagcaggaggcagcgctagcggtacacactctgcaatctatgggtgtggacgtggttctgattacaggcgataacaggaagacggcgagggccattgccacacaagtcggtattaataaggtgttcgctgaggtgttaccctcccacaaagtggcaaaagttcaggaactgcaaaacaaaggaaagaaggtagcaatggttggcgacggagtgaacgacagccccgccctggcccaggccgacatgggcgtagccattggaacgggaacagacgtagctatcgaggctgctgatgtggtactgattcgaaatgatcttttggatgtcgtggctagtattcacctaagtaagcgaacggtgcggaggatccgcattaatctcgtgctggctcttatatataatctggtgggtatccctattgcagccggggtcttcatgccaattggtattgtgctgcagccttggatggggagcgccgccatggcagcctcttcggtttcggttgttctgagctccctccagctgaagtgctacaagaagcccgacctggagaggtatgaggctcaggctcatgggcatatgaaaccactgactgcgtcgcaggtctccgttcatattggcatggacgaccggtggagggattccccccgcgctaccccttgggaccaggtgagctacgtgtcccaggtgtcactgtctagcctgaccagcgataagccatcaaggcacagcgccgcagcggacgacgacggtgacaagtggtcgctgctgctcaatgggcgtgacgaggagcagtacata

SEQ ID NO: 280129 - DNA, 4395 bp, Artificial Sequence
  derived and/or modified sequence
atgcctgagcaggagaggcaaatcacagcgagagaaggcgcctctagaaaaattctatccaagctcagcttgccaacacgagcttgggaaccggcgatgaaaaagtcgttcgcgttcgacaacgtaggctacgagggggggttggacgggctgggacctagcagtcaggtggccacctccactgtaaggatccttggcatgacttgtcagtcctgtgtgaagtctatagaggatcgcatttctaacctcaaagggattatctctatgaaggtgtccttagagcagggatccgccacggtgaaatacgttcctagcgttgtgtgtctgcagcaggtctgccaccagattggagacatgggctttgaggcatcaattgccgaaggcaaggcagcctcatggccctctagaagccttccggcacaggaggctgtcgtcaaacttagagtggaaggtatgacatgtcagtcttgtgttagctccatcgaggggaaggtcagaaagctgcagggggtcgtgcgggttaaggtgtccttatcaaatcaggaggccgtgatcacttaccagccttacctgattcagcccgaggacctgcgcgaccacgtgaacgacatgggttttgaggccgccatcaaaagcaaggtggccccgttgagccttggccctatagacatagaacggttgcaatccactaacccgaagcgcccactttcttccgcgaatcagaattttaataacagcgaaaccctcggccaccaaggttctcacgttgtcactcttcaactgcgaatcgatgggatgcattgcaagtcgtgtgtactgaatatcgaggagaacattggccagttgcttggtgtgcagagcattcaggtgagtttggagaacaaaacggcccaggtcaaatatgacccttcttgcacttctccggttgccctgcagagagccatcgaggccctcccccctggcaatttcaaagtaagccttcctgatggtgccgaagggtcaggaacagaccaccgctccagcagcagtcatagtcctgggtctcccccccggaatcaggttcaaggtacatgttcgactactctgattgcaattgccggtatgacatgcgcatcttgtgtgcattccatcgagggaatgatctcccagctggagggcgtgcaacagatctctgtcagcctagccgagggtaccgcgactgtgctgtataatccatccgtaatttctcccgaggaactacgagctgccatcgaagatatgggcttcgaggcttctgtggtgtccgaatcttgttcgacaaatccattgggcaatcactctgcgggcaactcaatggtgcagacgaccgatggaacgccaacatctgtgcaggaggtagccccacatactggcagattacctgcaaaccacgcacctgacatcttggccaaatctccccagtctacccgggctgttgccccacagaagtgtttccttcagataaagggtatgacctgtgcgagttgcgtgtcaaatatagagagaaatctacagaaagaagccggcgtgctttctgtgcttgtggccctgatggcagggaaggccgaaattaagtatgatcccgaagtgatacagcctcttgaaatcgcacagttcatccaggacctcggcttcgaggctgcagtgatggaggattatgccggctccgatgggaatatcgaactgaccataaccggcatgacctgcgcctcctgcgtgcacaacatcgaatcaaagctgacgaggaccaacggcatcacgtacgccagcgtcgcccttgcaacatctaaagcgctcgtgaagttcgaccccgagataatcggccctagagatatcatcaaaatcattgaagaaatcggtttccatgcttccctcgctcagagaaatcctaatgcacaccacctcgaccataagatggagataaagcagtggaagaaatctttcctgtgctcactggtgttcgggatacccgtcatggcgctgatgatctatatgctaatccccagtaatgaacctcaccaatctatggtactggaccacaacatcatccctggtctgagtattctaaatttaatattttttattctatgcacatttgtgcagctgctgggtggctggtacttttatgtgcaagcctataagtccctgagacacaggagtgccaatatggatgttcttatcgtactggccacaagtatcgcgtacgtgtatagcctggtgatccttgttgtggctgtagctgaaaaggccgaacgaagccccgtgaccttcttcgatacgcctccaatgctctttgtgtttattgcacttgggcgatggctggagcacctagccaaatccaaaacgtcggaggcactggcaaaattgatgagcctccaggcaaccgaagctactgtagtgacactcggggaagacaaccttattatacgcgaggagcaggtgccaatggagcttgtgcagaggggcgacatcgtaaaggttgtgccagggggtaagttccccgttgatggtaaagtattggagggaaacacgatggctgatgagtccctgattaccggcgaggccatgcctgtcaccaaaaaaccagggtcaacagtgatcgctggatccatcaatgctcatggcagcgtccttatcaaggcgactcatgtcgggaatgacaccacacttgcacagatcgtgaaactggttgaggaagcacaaatgtccaaagctcccatccagcagctcgctgacaggttctccgggtattttgtgccttttataattataatgtctactctgacactggtggtgtggatcgttatcggatttatcgactttggtgtagtgcaacgctacttccccaatcccaataaacacatttcccagaccgaagtcatcatccggttcgcttttcagacttctataactgtgttgtgcatagcctgcccgtgcagtctgggtctggctacacccactgcagtcatggtcggtaccggggtggccgctcagaatggaattcttatcaagggcgggaaacctctggagatggctcacaaaatcaagacagtaatgtttgacaagaccggcaccatcacacatggcgtgcctcgagtgatgcgagtgctgctcctgggggatgtagctactctgccgctccggaaggtgttggccgttgtgggaaccgcggaagctagctctgagcatcccctgggtgtggctgtgacgaagtactgcaaagaagagctgggtaccgaaacattgggctattgtaccgacttccaggctgtgccaggatgtggcatcggctgcaaggtgtctaatgtggagggaatcctagcccatagtgagagaccactgagtgctcctgccagccacctgaatgaagccggaagtctgccagcagagaaagacgcagtgccacagacattctcagtcctcatcggcaaccgggagtggctgaggaggaacggactgaccatcagttccgacgttagcgacgcaatgacagatcatgagatgaaaggccaaaccgctatcctggtggcgattgacggagtgctatgcggaatgatagcgatcgcggatgctgtgaagcaagaagccgccctggccgtccataccctacagtctatgggagtggatgtggtactgatcactggcgataacagaaagacagctcgggccatagcaacgcaagtaggaatcaacaaagtgttcgccgaagtgctgccaagtcataaggtggctaaggtccaggagttgcaaaataaaggaaaaaaagtggcgatggtgggggatggagttaatgattccccagcccttgcccaggcggatatgggcgtcgccatcggaactggaacagacgtggccatcgaagcagctgatgtggtgctcatccgcaatgacctcctcgatgtcgtggcgtccatccatcttagcaagaggactgttagaaggattagaatcaatttggtcctggccttgatatacaatcttgtgggcatcccaattgcagccggcgtgttcatgcctataggcatcgttctgcaaccatggatgggatctgctgcaatggctgcttcatcagtaagtgtagtgctgtcaagcctacaacttaaatgctataaaaagccagacctggagcgctatgaggcccaggctcacgggcacatgaaaccactgacagcctcacaggtcagtgtgcacataggtatggatgaccggtggagagactccccaagggccacgccctgggaccaggtttcatatgtgtctcaggtcagcttgtcttcactcacaagcgacaagccctcacgccactccgctgctgctgatgatgacggggataaatggagcctcttactgaatggaagagacgaggagcagtacatt

SEQ ID NO: 280130 - DNA, 4395 bp, Artificial Sequence
  derived and/or modified sequence
atgcccgaacaagaacgccagatcacggcccgagaaggcgcatcgcgtaagatattgtcaaaactgagcctgcctacaagagcgtgggaacctgctatgaaaaaatccttcgcttttgataacgtcgggtacgagggcggactggatggactcggcccatcctctcaagtggctacctcaactgtgagaatcctagggatgacctgccaatcttgcgtcaagtccatagaggatcgaatatccaaccttaagggaatcatctctatgaaggtgtccctggagcagggatccgctacagtgaagtacgtaccttcggttgtgtgcctccaacaggtgtgtcaccaaatcggggatatgggtttcgaggcctccattgctgagggaaaggccgcgtcttggcctagcagatcactgccggcgcaagaggccgtcgtgaaactacgagtggagggaatgacgtgtcagtcctgtgtcagttctattgaaggcaaagtgcgaaagctgcaaggagtcgtgcgagtgaaggtttctctgtccaatcaggaagcagttatcacgtaccaaccgtacctgatccagcccgaggatctccgagaccatgtgaatgacatgggttttgaggcagctataaagagtaaagtggccccactgagtttgggtcctattgatatagaacgcctacaaagtactaatccaaaaaggccgctgagcagtgccaaccagaacttcaacaattcagagacacttggccatcaggggtcgcatgtggttaccctgcagctgcgtatcgatgggatgcactgcaagagttgcgtgctcaatatcgaagaaaacatcggccagctcctcggggttcaatcgatccaggtatccttggagaataagacagcacaggtgaagtatgaccctagttgcacttccccggttgctctgcagcgcgcgatcgaagcattgcccccagggaatttcaaagtgagcttgcctgatggcgccgagggctctggaactgatcaccgctcttctagcagccattctccgggtagcccaccccggaaccaggtccaggggacttgctcaacaacactcattgccatcgccggaatgacttgtgcaagctgtgttcactctatcgagggaatgattagccagttagaaggcgtccagcagattagtgtgtctctggccgaaggcacggctacagttctctataaccccagtgtcatcagcccggaggaactacgggccgcaatcgaagatatgggctttgaggcctcggtggtgtccgaaagctgctctaccaaccccctcgggaatcactccgctggaaactctatggttcagaccaccgatggcacccccacttccgtgcaggaagtagcaccacataccgggcgcttgcccgccaatcacgccccagatatcctggccaagtctccccagtccacccgcgcggtggcaccacaaaagtgctttttgcagatcaaaggcatgacctgtgctagctgcgtgtctaacattgagcgtaatctacagaaggaggccggggttttgtcagtgctagtggcactgatggccggtaaggctgaaataaaatatgaccctgaggtgatccagcccttagagattgcacagtttatccaggatcttgggtttgaggccgccgtgatggaggactatgcgggctctgacggcaacatcgagcttactataacgggcatgacgtgcgcttcctgtgtacacaacatagagagcaagctgaccagaaccaatggaataacctacgcctccgtggcactggctactagcaaggcactggtcaaattcgacccagaaatcatcggaccccgagacatcataaagatcatcgaggagattggttttcacgcctctctcgctcaacgaaatccgaatgcccaccacctggaccacaagatggagatcaaacagtggaagaaaagtttcctgtgctccctcgttttcgggatcccagtgatggcactgatgatctacatgttgatcccgagtaacgagcctcaccagagcatggtccttgaccacaatatcataccaggcctctccattctgaacctcatcttttttatactgtgtacctttgtccagttgctgggcggctggtacttttacgttcaagcgtacaaatccttgaggcatcgttccgccaatatggacgtgcttatagtattagcaaccagcattgcttacgtgtattctttggttatactggtcgtggccgtggccgagaaggcggagaggtccccggtgacattttttgacacacctccaatgctcttcgtcttcatcgctctcgggcgatggctagaacatcttgcgaagtcaaaaacctctgaggcgttagccaaactgatgagtttgcaggctacagaagctaccgtggtgacattgggcgaggataatctgatcatcagagaggagcaggttccaatggaactggttcagcgtggtgatattgtcaaggtcgtgccagggggcaaattcccggtggatggcaaagtcctggaggggaatactatggccgacgaatctctgattacaggcgaagctatgccagtgactaagaaacccggttcgacagtgatagcagggagcatcaacgcccacggatcagtgttgattaaggccacccacgtgggtaatgacacaactctggctcagattgtgaagctggtggaggaggcacagatgtccaaggcaccaatccagcagctcgccgaccggttctccggttattttgtgccatttatcatcattatgagtacactgacattggtggtgtggatcgttattgggtttattgattttggggtggtgcagcggtactttccaaaccccaataaacatatcagtcagactgaagttataattcgctttgcatttcagaccagcatcaccgtcctgtgcattgcctgcccctgttctctgggactcgcgacgcctaccgccgtaatggtaggcaccggcgttgccgctcagaacggcatactgataaagggcggtaaaccactcgagatggcccacaaaatcaagaccgtcatgtttgacaagactgggacaatcactcatggtgtacccagggtcatgcgcgtgctcctgttgggtgacgttgccactttgccgctgcgaaaagtgctggctgtagtcggaacggccgaggcctcgtcggagcaccctctgggagtggccgtgactaaatattgtaaagaagaacttggcacagaaacgctaggctattgcaccgattttcaggccgtgccaggatgcggcatcggatgtaaagtgtctaacgtagagggaatcctggcacattcggagagaccactgtccgcccccgcttcccatttaaacgaggctggctccctccctgcagagaaagacgctgtcccgcagacgttttccgtcctgatcgggaatagagagtggctgagaaggaacggtctcacaattagcagcgatgtttccgatgcaatgactgaccatgagatgaaggggcagaccgccatcctcgttgctatagatggggtgctgtgtggcatgattgctattgctgatgccgtgaagcaggaagctgctctggccgtgcatacactccagtcaatgggagtagacgtggtgctgattacaggggataacagaaagactgctagagctatcgctacccaggttgggatcaacaaagtcttcgcagaagtgctaccctcccacaaagtggccaaggtccaggagctgcaaaacaagggaaagaaggtggcaatggttggcgacggagtaaacgattcccccgccctggcacaagcggatatgggtgtcgctattggcaccggcacagacgtggccatagaggctgcggacgtcgttttgatccgaaatgacctgctggacgtggttgcttctatacacctctcgaaaagaacagtacggcggatccgtattaatctggtgcttgccctgatctataatttggtgggcatccccatcgcggccggtgtgttcatgcctatcggaatcgtattgcagccttggatggggtcagccgcgatggctgctagctccgtcagcgtggtcctctcaagcttgcagttaaaatgctacaagaaaccagatctcgaacgttacgaagcacaggcccacggtcacatgaaaccccttaccgcttctcaggtatcagtacacattggtatggatgatcggtggcgggattctccaagggccacgccctgggaccaggtctcatatgtgtcacaagtgtcattaagctcccttacctccgacaagccttcccggcactctgcagctgctgatgacgatggtgacaagtggtcgctgttgctgaacggacgggacgaggagcagtacatt

SEQ ID NO: 280131 - DNA, 4395 bp, Artificial Sequence
  derived and/or modified sequence
atgccagagcaagaaagacaaataactgctcgagagggtgcaagtagaaaaattctttctaaattatctcttcctactagagcttgggaaccagcaatgaaaaaatcttttgcatttgataatgttggatatgaaggaggtttagatggtttgggaccatcttctcaagtcgcaacatctactgttagaattttgggtatgacatgtcaatcatgtgttaaatcaatagaagatagaattagtaacttgaaaggaattatttctatgaaagtgtctttagagcaaggatcagcaacagttaaatatgttccatcagtagtatgtcttcaacaagtatgtcatcaaattggagatatgggattcgaagcatcaattgcagaaggaaaagctgcttcatggccatcaagatcattgccagcacaagaagcagttgttaaattacgtgttgaaggaatgacatgtcaatcttgtgtttcttcaatagaaggaaaggtaagaaagttgcaaggtgttgtaagagttaaagttagtttgagtaatcaagaagcagttattacttatcaaccatatcttattcaaccagaagatttaagagatcatgtaaatgatatgggatttgaagctgcaattaaatcaaaagttgcaccattaagtcttggacctattgatattgaaagattacaaagtacaaatccaaaaagacctttatcatctgccaaccaaaattttaataattctgaaactttgggacatcaaggatctcatgttgttactttacaattaagaattgatggaatgcattgtaaaagttgtgttttaaatattgaagagaacataggacaacttcttggagtacaatctattcaagtaagtcttgaaaacaagacagcacaagtaaaatatgacccatcatgcacatctccagttgcacttcaacgagctattgaggcacttccaccaggtaatttcaaagtaagtttaccagatggagcagaagggtcaggaacagatcatagatctagttcatctcattcaccaggatcaccaccaagaaatcaagttcaaggaacatgttcaacaacattaattgctatcgcaggaatgacttgtgctagttgtgttcattcaattgaaggaatgatttcgcaattagaaggtgttcaacaaattagtgtatcattagcagaaggtactgcaactgttctttataacccatctgttatttcaccagaagaattaagagcagctattgaagacatgggttttgaagcatcagttgtttcagaatcatgttcaactaatccattaggtaatcattctgcaggtaattcaatggttcaaacaactgatggtacaccaacatcagttcaagaagttgcaccacatacaggaagattaccagcaaatcatgctccagatatattggctaaatcaccacaatctacaagagctgtagcaccacaaaaatgttttttacaaattaaaggaatgacttgtgcatcttgtgttagcaacattgaaagaaatttacaaaaagaagctggagttctttctgttcttgttgcattaatggcaggaaaagcagaaattaaatatgatccagaagttattcaaccacttgaaattgctcaattcattcaagatttaggttttgaagctgctgtaatggaagattatgctggatcagatggaaatatagaattaactattacgggtatgacatgtgcatcttgtgttcataatattgaatccaaacttacacgtactaacggaataacttatgcttctgttgcattagctacttcaaaagctttagttaagttcgacccagagattattggaccaagagatattattaaaattattgaagaaataggatttcatgcaagtcttgctcaaagaaatccaaatgcacatcatttagatcataagatggaaattaaacaatggaaaaaatcttttctttgttctttggtttttggaattccagtaatggcacttatgatatatatgttaattccatcaaatgaacctcatcaatcaatggtattggatcataatattattccagggttatcaattttaaatcttattttctttattttatgtacattcgttcaattattaggaggatggtatttttatgttcaagcatataagtcccttagacataggagtgcaaacatggatgttttaattgttcttgcaacaagtattgcatatgtttatagtttagttatattggtggtcgcagtagcagaaaaggcagaacgttcaccagttactttttttgatacaccaccaatgttatttgtgtttattgcattaggtagatggcttgaacatttagcaaaatcaaaaacttcagaggctttagcaaaattaatgtcattacaagctactgaagcaacagttgttacattaggagaagataacttaattattagagaagagcaagttccaatggagcttgttcaaagaggagacatagttaaggtagttccaggaggaaaatttccagttgatggaaaagtcttagaaggtaatactatggctgatgaatcacttattacaggagaagctatgcctgttactaaaaaaccaggatcaactgttattgcaggatcaattaacgcacatggaagtgttttaataaaagctacacatgttgggaatgatacaacattggcccaaatagttaagttagttgaagaagcacaaatgtctaaagctccaatacaacagcttgcagatagattcagtggatattttgttccatttattataataatgagtacattaacccttgtcgtatggattgttattggatttattgattttggagttgtgcaaagatattttccaaatccaaataaacacataagtcaaacggaagttattattagatttgcctttcaaacaagtattacagttttgtgtattgcatgtccttgtagtttaggacttgctacaccaacagcagttatggttggtacaggtgtagctgctcaaaatggtatcttaattaaaggaggtaaaccattagaaatggctcataaaattaaaacagttatgttcgataaaacaggaacgatcactcatggagttccaagagttatgagagttcttttattaggagatgttgcaacattaccacttcgaaaagtattagcagttgttggtacagctgaagcaagttcggaacacccacttggagttgctgttactaaatattgtaaagaagaattaggaactgaaactctaggatattgtacagacttccaagcagttccaggatgtggaataggatgtaaagtttctaatgttgaaggtattttagcacattctgagagaccactttcagctcctgcatcacatcttaatgaagcaggatcattaccagcagaaaaagatgcagttccacaaacattttcagtcttaataggtaatagagaatggttaagaagaaacgggttaaccatttcatcagatgtttcagatgcaatgactgatcatgaaatgaaggggcaaacagctatacttgttgctattgacggtgtattatgtggaatgattgcaattgcagatgcagttaaacaagaagctgctcttgcagttcatactcttcaatctatgggagtcgatgttgttctcattacaggtgataatagaaagactgctagggcaattgcaactcaagttggaattaataaagtatttgcagaagttttaccaagtcataaagttgctaaagtacaagaattacaaaataaaggaaaaaaagttgcaatggttggtgatggtgttaatgattcaccagcacttgctcaagctgatatgggtgttgcaattggaacaggaactgatgttgctatagaggcagctgatgttgtacttataagaaatgatttattagatgttgtagcatcaattcatttatcaaaacgtactgttagaagaattagaattaatcttgttttagctcttatttataatcttgtaggaatccctatagctgctggtgtatttatgccaatcggaattgtattacaaccatggatgggatcagcagctatggctgctagttcagtttcagttgttctttcttcactacaacttaagtgttataaaaaaccagatttagaacgttatgaagctcaagcacatggacatatgaaacctttaacagcttcacaagtttcagttcacataggtatggatgacagatggagagattcaccaagagctacaccatgggatcaagtctcatatgtaagtcaagtttcattatcatcattaacttcagataagccatctagacattctgcagctgctgacgatgacggagataagtggtctttattgttaaatggaagagatgaagaacaatatatt

SEQ ID NO: 280132 - DNA, 4395 bp, Artificial Sequence
  derived and/or modified sequence
atgcctgagcaggagaggcagattactgccagagaaggggcctcacggaagattctaagtaagctgtctctcccaacacgagcatgggaacccgccatgaaaaaaagcttcgcattcgataacgtcggttacgaaggtggtttggacgggctcggaccgtctagccaagtggcgaccagcaccgtgcgaatccttggtatgacgtgtcaaagctgcgtaaagtcgattgaagatcggatttccaatctgaagggcatcatatccatgaaagtctcccttgagcaaggatccgccacagtcaagtatgtaccgtctgtcgtttgccttcaacaggtgtgccaccagattggagacatggggtttgaagcatccatcgccgagggcaaggccgcaagctggcccagccggtcactccctgcacaggaggcagtggtcaagctcagagtcgagggaatgacttgccagtcttgtgtaagcagcatagaaggtaaagttcgcaagttgcagggggtggtcagggtcaaggtcagcctgtccaatcaggaggccgttattacttaccagccatacttaatccagcctgaagatttaagggatcatgtcaacgatatggggtttgaagcggctatcaagagcaaagtggctccactgtcccttgggccaatcgacatagaaagactccaatctacaaaccctaaaagacctctgagcagtgccaatcaaaacttcaataactccgaaaccctgggacaccagggctcacacgtggttaccttacaactccgcatcgatgggatgcattgtaaaagctgcgtactgaatatcgaggaaaacattggccaactgcttggcgttcagtccattcaagtaagtttggagaataaaaccgcccaggtgaagtatgatccctcttgcacttcccccgtggccctccagagagccatagaagctcttccgcccggcaactttaaagtatccctcccggatggcgcggaagggtcaggcaccgaccaccgctctagttcttcacacagtccgggctctccaccacggaaccaagtgcaaggtacgtgctctaccacgctcatagcaattgcgggcatgacgtgtgccagttgcgtacatagcatcgagggaatgattagccagttggaaggggtacagcagattagcgtgagcctcgccgagggcaccgctactgtgctctataatccatccgtgatcagtccagaggaactccgcgcagcaattgaggacatgggctttgaagctagcgtagtgagcgagagctgctccaccaaccccttggggaaccacagcgctggaaattcaatggtacaaacaacagatggtacaccgacatccgtgcaggaggtggcaccccacaccggtcgacttccagccaaccatgcccccgacatcctggccaaatctccacagagtacccgcgcagtcgcccctcagaaatgtttccttcagatcaaaggaatgacctgcgcgtcatgtgtgtccaacatcgaacggaatctccagaaagaagcaggagtcctgtcggtgctcgtcgctctgatggctgggaaagccgagataaagtacgaccccgaggtaattcagcctcttgaaatcgcgcagttcatccaggacctaggctttgaggcagcggtcatggaggattacgccggctctgacggcaatattgagctcactatcactggcatgacgtgtgcctcatgtgtccacaatatcgaatcgaagctaacacggaccaacggcattacctacgcctctgttgcactggctacttcaaaggcactggtgaaatttgatcctgaaatcataggacctagggacatcatcaagatcatcgaagagattgggttccacgcctccctcgctcagagaaatcccaacgctcaccatttagaccacaaaatggagataaagcagtggaagaaatctttcctgtgctctctggtgtttgggatcccagtgatggcgctgatgatttacatgctaatcccatctaacgagccgcaccaatccatggtgctggaccataatataataccgggtttgtctatcctgaacctcattttcttcatcctctgcacgttcgtgcagctgctcggaggatggtatttttatgtgcaggcctacaaatccctgagacaccgcagcgcaaacatggatgttctcatcgtgctggcgacgtcaattgcatatgtctattccctggttatccttgttgtggctgtggcggaaaaggccgagcgctcacccgtaacttttttcgacacgccccccatgcttttcgtgtttattgccctcggtaggtggttggagcacctcgcgaaatcaaaaactagtgaagcacttgccaaattgatgtcgctccaggcgactgaggccaccgtcgtgactctaggcgaagataatcttatcattcgggaggaacaggtcccaatggagcttgtgcagaggggagatatcgtcaaggtggtgccaggcggcaaattccccgtcgacggtaaggtgctggagggcaatacaatggccgacgaaagtctgattacgggcgaagcaatgcccgtgaccaagaaacccgggtccacagtgattgccggaagcatcaatgcccacgggtctgtgctaatcaaggctactcacgtagggaacgacaccacactggcccaaattgttaaattggttgaagaggcccaaatgagcaaggcaccgatccagcagctggctgacaggttcagtggttattttgtcccttttatcattattatgagtactctaactctggtggtctggatagttatcggttttatcgactttggagtcgttcagcgctactttccgaatccaaataaacatatatctcagactgaggtcatcattaggtttgctttccaaacttccataactgtgttgtgtatcgcctgcccatgtagcttggggctggcaacaccgaccgcagtcatggtggggaccggagttgctgctcagaatggcatccttattaagggtggaaaacccctcgaaatggcccacaaaattaaaacggtgatgtttgataagactggaaccataacgcacggcgtaccacgcgtgatgcgggtattactactcggggatgtggccacactgcccctgaggaaggtcctggcagtggtgggtacggccgaagcctccagcgagcatcccctcggggtagccgtcacgaagtactgtaaagaggagctgggaactgagacacttggttattgcactgactttcaggctgttcccggttgtggcattggatgtaaggtaagcaacgtggagggaatactggctcactcagagaggcccttgagcgcacccgccagtcatctgaacgaggctggtagcctgcctgctgaaaaagacgcagttccacagaccttcagcgtattgataggtaatcgggagtggttacgcagaaacggcttaacaatctcttctgacgtttccgacgccatgacggatcacgagatgaaaggccagaccgcaatcctggtcgcaatcgacggcgtgctgtgcgggatgatcgcgatagcggacgcagtgaagcaggaagccgcactggccgtgcacacacttcaaagcatgggagtggatgtggtccttatcacaggcgataatcggaagacagctcgtgcaatcgctacccaggtgggaattaataaagtgtttgccgaagtgctcccaagccataaggtggctaaggtgcaggaattgcagaacaagggaaagaaggtggcaatggtaggggacggagtcaacgatagccccgctctcgcccaggccgatatgggcgtggcaatcggcaccggcactgatgtggcgatagaggccgccgacgtagtcctgatccggaatgacctgctggacgttgttgcttctatccacctgtccaagcggacggtgcgtcgaattcggatcaatttggtgctcgctttgatttacaacttggtcggtattcccattgcagctggggtcttcatgccaattggcattgtactacagccttggatgggctccgcagccatggcagcctcctccgtgagcgtggtcctgagctccctgcagctgaaatgttataagaaacctgacctagagcgttatgaagctcaggcccatggccatatgaaaccattgaccgcatcccaagtcagcgtgcacattgggatggacgaccgctggcgtgattctccgagggccacaccgtgggatcaagtcagttacgtaagtcaggtgagcctgtccagtctcacgtctgacaaaccttcccgccacagcgcggctgctgacgatgacggggataaatggagcctcctgcttaatggcagagacgaggagcagtacatt

SEQ ID NO: 280133 - DNA, 4395 bp, Artificial Sequence
  derived and/or modified sequence
atgcctgagcaggaaaggcagatcacagctcgggaaggggcatcaagaaaaatcctatctaaactgtcactccccactagggcttgggaaccagctatgaagaaaagttttgccttcgataacgtgggatacgaaggagggcttgatggactcgggccttcaagtcaggtggccacatcgacagtgcgcattcttgggatgacatgtcaatcctgcgtgaaaagtatagaggataggatatcaaacctcaaaggaataatctctatgaaggtctccctagagcaggggtctgccacagttaagtacgtgccttccgtggtttgtttgcagcaggtgtgtcatcagataggagatatgggattcgaagcatctatagctgaaggaaaagcggcctcttggccatctaggtcactcccagctcaggaggccgtggtaaaattgcgcgtggaagggatgacatgtcagtcctgtgtctcgtccattgagggaaaggtcaggaaactacagggagttgtgcgagtaaaagtcagtttgtctaatcaggaggcagtcatcacttaccagccttatctcattcagcctgaagatcttagggaccatgttaacgatatgggattcgaggccgctatcaagtcaaaagtcgcacctttatccctcggaccaattgatatcgaaagattacagtctactaaccctaaaaggcccttatcttcggccaaccagaattttaataactcagaaacactgggacaccaggggtcacatgttgtgacacttcagcttagaatagatggaatgcattgtaagtcatgtgtattgaatatagaggaaaacatcggacaactcctcggggtgcagtcgatacaggtcagtctagaaaataagacagcacaggtaaagtatgatcccagttgcacaagtcccgtcgcactccagagggccattgaagcactgccccctggaaacttcaaagtgtctctgccagatggggctgaaggatcaggaactgatcatcgatcctccagtagtcattcccctgggagtcccccccggaatcaggtccaggggacttgttccactacactgatagccatagcagggatgacatgtgctagttgtgttcattccatcgaggggatgatctcacagctggaaggggtccagcagatatctgtatctcttgcggaagggacagctacagtattgtacaaccctagtgtcatctctcctgaagagcttcgggctgcgatagaagatatggggttcgaagcgagtgtggttagtgaatcctgttccactaatccccttgggaatcattccgccggaaacagtatggtgcagactactgatgggacaccaacatccgtccaggaagttgcgccccatactggaaggcttcctgcaaatcatgcgcccgatatactcgcaaagagtccacagtctactcgggctgttgccccacaaaaatgctttctccagattaaaggaatgacatgtgcctcctgtgttagtaacatagaacgaaatctacagaaagaagcaggagtgctgtctgtcctggtagctctcatggctgggaaggccgaaatcaaatatgacccagaagtcatccagccactcgaaatcgcccagtttatccaagatcttgggtttgaggccgccgtaatggaggactacgctgggtccgatggaaatatcgagcttacaattactgggatgacgtgcgcttcttgtgttcataatattgagtctaaactaactaggactaacggaatcacttatgcgtccgtcgccctggccacttcgaaagctctcgtgaaatttgatcccgaaatcatcgggcctagagatattatcaaaatcatcgaagaaataggatttcacgcaagtctcgcccagaggaaccctaatgcacatcatctcgaccacaaaatggaaataaagcagtggaaaaaatcattcctctgttcactagtattcgggattcctgtgatggctctgatgatctacatgctgatcccctccaacgagcctcaccagtccatggtgctggaccacaacatcattccaggactgtccatccttaacctaattttcttcatcctttgcacatttgtgcaactgctagggggatggtatttttatgtgcaggcctacaaatccctccgccacagatcagctaacatggatgtgttaattgtgcttgccacatccatagcctacgtctattctcttgtgatacttgtggttgctgtggcagaaaaagccgaaaggtctcctgtaacattctttgacacaccccccatgctctttgtttttatagccctgggaaggtggctagaacatctcgccaaaagtaaaacatctgaagcactggcaaaattgatgtccctgcaggctactgaagccacagtggtcactctaggggaagataacctaataatccgcgaagaacaggtacccatggaacttgttcagcgcggggatatcgtaaaagtggtgccaggagggaaattccctgtagatggaaaagtcctagaaggaaacactatggctgatgaatctctgataacaggagaggctatgcctgtgacaaaaaaaccaggatcaacggtcatcgccgggtctataaatgcacacggaagtgtcctgatcaaagcaactcacgtcggaaatgatacaactctagctcagatcgtgaaactcgtcgaagaagcccagatgtctaaagcaccaatccagcagctagcggataggttttccggatactttgtacctttcattatcataatgtctacactgacattagtggtctggatcgtgataggatttattgattttggggtggtgcagagatatttcccaaacccaaacaaacacatcagtcagacagaagtcataatcaggtttgctttccagacatctatcactgttctctgtattgcctgcccctgctcactagggttagcgacacccactgctgtaatggtgggaacaggagtcgccgcacagaatgggatacttattaaagggggaaaacccctcgaaatggcccacaaaatcaaaactgtcatgttcgataaaacagggacaataactcatggagtgccccgagtaatgcgagtgctcttgcttggagatgttgctactctcccactccggaaagtgctcgccgtggtggggacagctgaggcctcctccgaacaccccttaggggtggctgtaactaagtattgtaaggaagaactgggaactgaaactctagggtattgcactgattttcaagctgtccctgggtgtggaatagggtgtaaagtatctaacgtggaggggattttggcacattctgaaaggcccctctccgcacccgcttcacacctaaacgaagccggatccttacccgccgaaaaagacgccgtcccacagacattctcggtcctgatagggaatcgagaatggctgcgcaggaacggactgacaatatcatccgatgtatctgatgctatgactgatcatgaaatgaagggacagactgccatcctggtcgctatagacggggtactgtgtgggatgatcgcaatcgccgatgcggtgaaacaggaagctgccctcgcggtgcatactctacagtctatgggagtggatgtcgttttaattactggagataaccgaaaaactgccagggccatcgccacacaggtgggaataaataaagtgttcgccgaagtcttaccttctcataaggtggctaaagtgcaggaactacagaataaaggaaaaaaagttgcaatggtcggggatggagtgaacgatagtcccgccctcgcacaggctgatatgggggtggctattggaacagggactgatgtggccattgaagcagccgatgtcgttctgatccgcaacgatctcctagatgtagtcgcttctatacatctctctaagcgcactgtgaggagaatacgtataaatttagtcctggctttaatttacaaccttgtaggaattcccatagcagcgggggtctttatgccaataggaatcgtgctccagccctggatgggatctgctgctatggcggcgtcatccgtgtccgttgtgttgtccagtctgcagctaaagtgctataagaaacccgacctggaaagatatgaagcccaagcccacgggcatatgaaacccctgactgctagtcaggtgtccgtacatattgggatggatgatcggtggagggattccccacgggcaacaccctgggatcaggtgtcatatgtgtctcaggtcagtctctccagtcttacgagtgacaaaccctctagacattctgccgccgctgacgatgacggggataaatggtcattgttactgaacgggagggatgaagaacaatacatc

SEQ ID NO: 280134 - DNA, 4395 bp, Artificial Sequence
  derived and/or modified sequence
atgcccgaacaggagagacagataaccgccagagagggcgcatctagaaaaatacttagtaaacttagtttacctactagggcttgggagcccgctatgaagaaatcatttgccttcgacaacgtggggtatgaagggggcctggacggattgggccctagctcacaggtggccactagcactgtgcggatcctcggcatgacctgccagtcttgcgtcaaatcaattgaagataggatcagcaatctcaagggcataattagtatgaaagtgagtttagagcagggatctgctactgtcaagtacgtcccgtccgtagtttgtctgcagcaagtatgccatcagattggggatatggggtttgaggcctcaattgctgagggaaaggccgcatcttggcccagtaggtccctgccagcccaggaggctgtagtaaagctgagggttgaaggtatgacttgtcaaagctgcgtgtccagtatcgagggcaaggtgagaaagcttcagggagtagtacgagttaaggtctccttgtccaaccaggaagcggtcatcacatatcaaccctacctgatccagcctgaggatctgagggaccacgtgaatgatatgggctttgaggcagcgatcaaatctaaagtagcacccctgtctctgggtcctatcgatatcgagcgtctacagagcactaatccgaagagacctctttcatctgctaatcagaatttcaacaactctgagaccctcgggcatcagggatcccacgtcgttacactccaacttcgaatagacggcatgcattgcaaatcgtgtgtcctgaatattgaagagaatatcgggcaactcctgggggttcagtctatacaggtgagcttagaaaacaagacggcccaggtaaaatacgatcctagctgcacatccccagtggcccttcaaagggccattgaagccttacccccgggcaacttcaaagtgtctctccctgatggggccgaaggaagcggaaccgaccaccgttcaagttcttcgcacagtccagggtccccgccgagaaatcaagttcagggcacatgttccactactctcattgccattgccggaatgacatgtgcttcttgcgttcattcgatcgaaggcatgatcagtcagctggaaggggtccagcagattagcgtgtcgctagctgagggaaccgctactgtactctacaacccttctgtgatttcacccgaagagcttagagccgctatagaagacatgggatttgaagcctctgtcgtgtcagaatcttgttccacaaacccacttggaaatcacagcgctgggaactctatggtgcagacaaccgatggcacccccacgagcgtgcaggaggtagcacctcacacaggccgactgcctgccaaccacgcccccgacatactggcaaagtcccctcagtcaactagagcagtggctcctcagaaatgttttcttcagatcaagggcatgacctgcgcctcatgcgtgagtaacattgaaaggaacctccaaaaggaagctggcgtcctgagcgtcttggtggccctgatggcaggaaaggctgaaatcaagtacgacccagaggtcatccagccactcgagatcgcccagttcatccaggatctggggttcgaagcggcagtcatggaggactacgccggctccgacggcaatatagagctgacaattacggggatgacatgtgcctcctgcgtccacaacattgaatccaagctaactagaacaaacgggataacgtatgcttctgttgcgctagccacatcaaaagcgctcgtgaagtttgatcctgaaattataggacctcgagatattatcaagatcatcgaagagattggcttccacgcttccctcgcacaaagaaatcctaatgcccaccacctcgaccacaaaatggagattaagcagtggaagaaaagcttcctgtgctccctggtgttcggtatccccgtaatggccctcatgatatacatgctcatcccttctaacgagcctcatcagagcatggtcttagatcacaatatcattcccggactgtccatattaaatcttatcttcttcattttgtgcactttcgtgcagttgttgggcggatggtacttttacgtgcaagcgtacaagagcctgaggcacaggtccgctaatatggacgtgttaattgtactcgcgacaagtatcgcctacgtttacagtctggtgattcttgtggtggcggtcgctgaaaaagcagaaagatccccagtcacgttcttcgatactccaccgatgctctttgtatttatagctttgggtagatggctggaacacctagctaagtccaagacttccgaggcattggcgaaattgatgtctcttcaggcaaccgaagctactgtggttacccttggcgaagacaatctcataataagggaagaacaagtgcccatggaactcgtccagaggggggatatagttaaagtggtgcccggcggcaaatttcccgtggatgggaaggtcctagaaggaaatacgatggctgacgaatctttgattactggcgaagcaatgcctgtaactaaaaaacctggctctactgtgatagctggctctattaacgcacatggctccgtgctgatcaaggcaacccacgtgggaaacgatacgactctcgcccaaatcgtaaagcttgtagaagaggcccagatgtccaaagctcccatccagcagttagctgacagattctcagggtacttcgtgccgtttatcataatcatgtccaccctcactctcgtggtatggatagtgatagggtttattgattttggcgtcgtccagcgctatttcccaaatcctaataagcacatttcacaaaccgaggtgatcatcagatttgcttttcagacttctatcaccgtgctgtgcatcgcgtgcccgtgttctttgggactggcgactccaacagccgtgatggtaggcaccggagtggccgcccagaacggcattcttataaagggaggaaaaccgcttgaaatggcccataagataaagacggtgatgtttgacaagaccggaacgatcacgcacggggtaccccgtgtaatgcgggttctgttgctcggtgatgttgccaccctcccactgcgaaaggtgctcgccgtggtcgggacagctgaggcttcctcagaacaccccctaggggtcgctgtcacaaaatattgtaaggaggagctgggcacagaaacccttggctattgtacagacttccaagcagtaccagggtgcggtatagggtgcaaagttagcaatgtggaagggattcttgcccacagcgagaggccactgagtgctcctgcttcacaccttaatgaagcaggatcactgcctgccgagaaagatgccgtcccccagaccttttccgtgcttatagggaatagagagtggctgagaaggaacgggctgactatctctagcgatgtgtcggacgcaatgaccgaccacgagatgaaagggcagaccgctatactagttgctatagacggcgtgctgtgcggaatgatagcaatcgcggacgccgtcaagcaggaggcagccctagccgtgcatacactacagtctatgggggtggacgtcgtactgatcaccggcgacaaccgcaagaccgcacgagctatcgcaacacaagtaggcatcaataaggtgtttgcggaagtgctacccagtcacaaggtggccaaggtccaggaactgcagaacaaaggcaaaaaggtagcaatggtaggcgatggcgtaaacgactcccccgctcttgctcaggccgatatgggcgtcgccattggcactggaaccgatgtagcaattgaagcagctgatgtcgtacttatccgaaacgacctattggacgtcgttgcaagcatccacctgagcaaaagaacagtgaggagaatccgaattaatcttgttctggccctcatctacaatctcgtcggcatcccaattgctgccggggttttcatgccaattggaattgtactgcagccttggatgggtagtgccgccatggcagctagctcagtctcagtggttctgagctcactgcagctcaagtgttataagaaaccagatctggagagatatgaagcccaggcccacgggcacatgaaacccctgacagcctcacaggtgagcgtccatatcggcatggacgataggtggcgggattccccaagggccaccccctgggaccaggtgagctatgtgtcccaggtgagtttgtcgagcctcacatcggataagccaagtcggcactcagccgcagccgacgatgacggtgacaagtggtcgctgctgctgaatggcagggacgaagagcagtatatt

SEQ ID NO: 280135 - DNA, 4395 bp, Artificial Sequence
  derived and/or modified sequence
atgccggagcaggaacgccaaattaccgccagagaaggggcatccagaaaaatcctttcgaaattgtccttgcccactagggcgtgggaaccagcaatgaaaaagtccttcgcatttgacaacgtcggatatgaggggggtctggatggactgggcccttcgtcccaagtggctacttcgactgtgcgtattctcgggatgacctgtcagtcctgtgtgaagagcatagaggatcgaatctccaatcttaagggaattatcagcatgaaggtgtctctcgaacaaggaagcgcaaccgtgaagtacgtgccttcggtggtgtgccttcaacaagtgtgtcatcaaatcggtgacatgggcttcgaggctagcattgcggaaggtaaggccgcatcgtggccttcacggtccctcccagcacaagaggcagtggtcaagttgcgcgtggagggcatgacttgccagtcatgtgttagctcgatcgagggaaaagtgaggaaacttcaaggggtggtccgtgtcaaggtgtcgctctcgaatcaagaagccgtgattacttaccagccctacctgattcagcctgaagatttgagggaccatgtgaacgatatggggttcgaagcagctattaagtccaaggtcgcgccactgagcctgggtcccattgatatcgaaagattgcaatccactaatcctaagcggcctttgtcgagtgcaaaccagaacttcaacaattcagagactctcggacatcagggatcgcacgtggtgaccctccagcttcggatagatggtatgcattgtaaatcatgtgtccttaacatagaagagaacatcggacagctgttgggcgtgcaatcaatccaagtcagtctggaaaacaagactgcccaagtaaagtacgatccttcctgtaccagccctgtggcactccaacgcgcgattgaggcgctccctcccgggaatttcaaggtttcgcttcctgacggggcagagggatcgggtaccgaccatcggagctcgtctagccattcgcctggatcccctccccgtaaccaagtccaagggacttgctccactacccttattgcaattgctggtatgacttgtgcctcgtgtgtacattcaatagaaggaatgatcagccaacttgagggtgtgcagcaaatttccgtgagcctcgccgagggaaccgcgactgtcctttacaacccctcggttattagcccggaagaacttagagcagcaatcgaagatatgggtttcgaggcctcagtcgtgtcggaatcctgttcgaccaatccacttggtaaccattcggccggaaactcaatggtccaaacgactgatggtacccctaccagcgtccaggaggtggccccccatactggaaggctcccagcgaatcatgcaccagatatactggccaaatcgccccagtccactagagcagtggcacctcaaaaatgttttcttcagataaagggcatgacgtgtgcaagctgcgtatcgaatattgagagaaaccttcagaaagaagccggtgtgttgtcggtcctggtggcactgatggctggaaaggcagagattaagtacgacccggaagtgattcaacccctggagatcgcacagtttattcaggaccttggttttgaggctgcagttatggaggattacgccggcagcgacggcaatatcgagctgaccatcactggaatgacttgcgcctcctgtgtgcacaatatagaatcaaaactgaccagaactaacgggattacgtacgcatccgtcgcccttgcaacctccaaggccctcgtgaaattcgacccggaaatcatcggaccacgagacatcataaagatcattgaagagattggatttcacgcatcactggcacaacgcaacccaaacgcacatcacctggatcacaagatggaaatcaaacaatggaaaaagtcttttctgtgctccctggtctttggaattcctgttatggcattgatgatttacatgctcattccatccaatgaaccccaccaatccatggtcctcgatcacaatatcattcctggtctttccatcctgaacttgattttcttcatcctgtgcaccttcgttcagcttctgggcggttggtacttttatgtgcaggcatacaagtcactccggcataggagcgctaacatggatgtactgatcgtgctggcgacgtctatcgcgtacgtgtattccctcgtgatcttggtcgtggcggtggcggaaaaggcagaacgatcgccggtgacgttctttgataccccaccaatgctctttgtgtttatcgcgcttggaaggtggctcgaacatctggccaagtcgaaaactagcgaggctctggccaagctgatgtcccttcaggcaaccgaagcgacggtcgtgactcttggtgaggacaacctgattattcgtgaggaacaagtccctatggaattggtgcagcggggagatatcgtgaaagtggtgccaggaggcaagtttcctgtggatgggaaagtactcgaaggtaatactatggcagatgaatcactgatcaccggtgaagcaatgcctgtgactaaaaagccaggctctactgtgattgccggctccattaacgcccacggttcagtcttgataaaggcaacccatgtgggtaacgacactaccctggcacagattgtgaagctggtggaagaggcgcaaatgtcaaaggcaccaattcaacagcttgcggaccgattttccggttactttgtgccctttatcatcatcatgtcgacgcttactctggtcgtctggatcgtgatcggctttatagactttggtgtcgtgcagcggtacttcccaaatcccaacaaacatatttcacaaaccgaggtcattatacgttttgcgtttcagacgtcaattaccgtgttgtgcattgcatgtccgtgtagcctgggtcttgccacccctaccgcagttatggtgggaactggagtcgccgctcaaaacgggattctgattaagggaggcaaaccactcgaaatggcccataagatcaagaccgtgatgtttgataagacgggaaccattacccatggggtgcctcgcgtaatgcgcgtgctgctccttggagatgtggctactctgcctctcagaaaggtccttgcagtcgtcggtacggccgaagcaagctcggaacaccctctgggcgtggcggtgaccaaatactgcaaggaagaactgggtaccgagactttgggatactgcaccgattttcaggcagtgccggggtgtgggatcggatgtaaggtgtcgaacgtggaagggattcttgcgcactcagagaggccccttagcgctccagcatcgcatctgaatgaagccggctccctgcctgcagaaaaggatgcagtgccacagaccttttcggtcctgatcggcaatcgagaatggcttagaagaaacggacttaccatttcatcggacgtgtcggacgcaatgaccgatcacgaaatgaaggggcagactgcgatcctcgtggccatagatggcgttctttgtggtatgatcgcaattgctgatgccgtcaagcaggaagcagccctggcagtccacaccctgcaatcaatgggtgtcgatgtggtgcttattaccggagataacagaaagacggcaagagctattgcaactcaagtgggcattaacaaggtgttcgcagaagttcttccctctcataaggtggccaaggtccaagaacttcagaacaagggaaaaaaggtagctatggtcggagatggagtgaacgattcccccgcactcgcacaggcagacatgggagtggcaatagggaccggcactgatgtggcaattgaggcggcagacgttgtgctcatccgaaatgaccttctggacgtcgtggcaagtattcaccttagcaagcgcaccgtcagacggatacggatcaacctggttctggctctgatttacaatctcgtaggaatccctattgcagcgggagtattcatgccaataggaattgtgctgcaaccatggatgggctccgccgccatggcagcctcgtcagtctcggtggtgctgagcagccttcaacttaagtgctacaagaagcctgatttggaacgctacgaagcacaggcacatggacacatgaagccgctgactgcaagccaagtgtcagtgcatatcgggatggacgaccgctggcgggatagccctagagccaccccatgggatcaggtgtcatacgtgagccaagtgtccctctcctcacttactagcgataagccatcccgacattcagcagctgcagatgacgatggagataaatggtcccttctgcttaacggcagagacgaagaacagtacatt

SEQ ID NO: 280136 - DNA, 4395 bp, Artificial Sequence
  derived and/or modified sequence
atgccggagcaagaacgccagatcactgcccgcgaaggtgcctcacgcaagatcctctcgaaactgtcactgccgacccgcgcgtgggaaccagcgatgaagaaatcatttgccttcgacaacgtgggatacgaaggaggtctggatgggctgggaccaagctcccaagtggcaacctccaccgttcggatcctgggtatgacgtgccagtcttgcgtgaagtcgattgaggatagaatatcaaacctcaaaggtatcatctccatgaaggtgtcactggaacagggctccgctactgtcaaatacgtcccgtcggtggtgtgcctgcaacaggtgtgccatcaaatcggagacatgggctttgaagcctcgattgctgaaggaaaggctgcaagctggccatccagatccctccctgctcaagaggcagtcgtcaagctccgcgtggaaggaatgacctgtcagtcctgcgtgagctccattgagggtaaggtgaggaaattgcagggcgttgtgcgggtgaaagtctcgctgtcgaaccaggaagccgtgatcacctaccagccctacctcatccagccagaggacctccgcgaccacgtgaacgatatggggttcgaagccgctatcaagagcaaggtggcgccgctttcgctggggccaatagacatcgagcggctgcagtcgactaatccgaagcgcccactctcatcggccaatcaaaacttcaacaacagcgaaactttgggccaccaaggttcacatgtcgtgaccttgcaactgcggatcgatggaatgcactgcaagtcctgtgtcctgaacatcgaggagaacatcgggcagctccttggtgtgcagtcgatccaagtttccctcgagaataagactgcccaggtcaaatacgacccatcctgcacttcacctgtcgcgctgcagcgggcaatcgaggccctcccaccgggaaacttcaaagtctcgttgcccgacggagcggagggaagcggcaccgaccatagatcaagctcatcgcactcgcccggatcaccgccgcgcaaccaagtgcaagggacttgctccaccactctgatcgctatcgcgggcatgacgtgtgcaagctgtgtccatagcatcgaaggtatgatctcccaactggaaggggtgcaacagatctccgtgtcgctggcagaaggaaccgcgaccgtgctgtacaatccgtccgtgatctcaccggaagagctgcgagccgccatcgaggacatgggcttcgaagcatcagtcgtgtccgaatcatgttccaccaaccctctgggaaaccattccgcgggaaatagcatggtccaaaccactgacgggacccccacttcggtgcaagaagtggcgcctcacaccggccgactgccggccaatcacgctcctgacatcttggccaaatcgccacaatccaccagggcagtggccccgcagaagtgctttctgcagattaagggaatgacctgcgcctcatgcgtctccaacatcgaacggaatctgcaaaaggaggcgggagtgctctctgtgctcgtggcgctgatggcgggaaaagctgagatcaagtacgacccggaggtgattcagccccttgaaatcgcccagttcatccaggacctgggatttgaagccgccgtcatggaggattatgctggaagcgacggcaatatcgaactgactatcaccggaatgacttgcgcgtcctgtgtgcacaacatcgaatccaaactcactcgcactaacggaatcacctatgcgtccgtcgccctcgccacctccaaggctctggtgaaattcgacccagagatcattggaccgagagacatcatcaaaatcattgaagaaatcggttttcacgcgtccctggcgcagagaaatccgaacgcccatcatctggaccacaagatggaaatcaagcagtggaagaaatcctttctctgctccctggtgttcggcatccctgtcatggccctcatgatctacatgctgattccatctaacgagccccaccaaagcatggtgctggaccacaatatcattcccggactgtcgatcctgaacttgatcttcttcatcctgtgcaccttcgtgcagctcctcggcgggtggtacttttacgttcaagcgtacaagtccctgagacacagatccgctaacatggacgtgttgatcgtgctggctacctccatagcctacgtctacagcctggtgatccttgtcgtggccgtggcagagaaggcagaacgctctccagtgaccttcttcgatacgcctccgatgttgttcgtgttcatcgccctcggacgatggcttgagcatctggctaagtcaaagacctccgaggctctcgctaaacttatgagcctccaagccaccgaggccaccgtggtcactctgggggaggataacctgatcatcagggaggaacaggtgccgatggaattggttcaacgcggtgatattgtgaaggtcgtcccgggcggaaagttcccagtggacggaaaggtgctggaaggaaacactatggccgacgagtcattgatcacgggagaggccatgccggtcaccaagaaaccgggatccaccgtgatcgccgggtccatcaacgcacatgggtcagttttgatcaaggccacgcatgtcggaaatgacaccaccctggcccagatcgtgaaacttgtggaagaggcgcagatgtccaaggcaccaatccagcagcttgcagacagattctctggctactttgtgcctttcatcataatcatgagcactttgacgcttgtggtgtggatcgtgattggattcatcgactttggagtggtccagagatacttcccgaatcccaataagcacatctcccagacggaagtcatcatcagattcgcgttccagactagcatcactgtgctgtgtatcgcctgcccttgttcactcggccttgccaccccgaccgcagtgatggtgggaactggcgtggctgcccaaaacggaatcctcatcaagggagggaaaccgctggagatggcccacaagatcaagactgtcatgttcgacaaaaccgggactatcacgcatggtgtgccgcgggtgatgcgcgtcctgctcctgggtgatgtggccaccctcccgctgcgcaaggtgctcgccgtggtcggaaccgcagaagcaagctccgagcatccgcttggagtcgccgtcaccaaatactgtaaagaggagcttggcaccgaaaccctgggatactgcaccgatttccaagcagttcccggatgcggaattggctgtaaggtgtcgaacgtcgaaggtatcctggcacactcggaaagaccgctgtcagccccggcctcccacctcaacgaggccggatcgctgccagcagaaaaggatgctgtccctcagaccttctcggtgctgatcggaaatagggaatggctccgccggaacggtctgactattagctcggatgtgtcagacgctatgaccgatcacgagatgaaagggcagacggccatcctggtggccattgacggagtcctctgcggtatgatcgcaatcgctgacgccgtcaagcaggaagccgcgttggccgtgcacaccctgcagtctatgggtgtggacgtggtgcttattaccggagataatcgcaaaactgcccgtgccatcgccacgcaggtcggaatcaataaggtctttgccgaggtgctgccaagccacaaagtggctaaggtgcaagaactgcagaataagggaaaaaaggttgcgatggtcggggatggagtgaacgatagcccggctctggcccaggccgacatgggagtggccattgggactgggactgatgtggccatcgaagctgccgacgtcgtgcttatccgcaatgacctgctggacgtggtggcttccattcacttgagcaaaaggaccgtgaggcggattcgcatcaacctcgtgctggcactgatctataacctggtgggtatcccaatcgctgcgggcgtgttcatgccgatcggaatagtgctgcagccctggatgggaagcgccgcaatggccgcgtcgtcagtcagcgtggtcttgtcgtcgctgcagctcaagtgctacaagaagccggacttggaacgctacgaagcacaggcacatgggcatatgaagccgctgacggcatcccaggtgtcagtgcatattggcatggacgatcggtggcgtgattccccgcgtgcgactccgtgggatcaggtgtcatacgtgagccaagtgtctttgtcgagcctgacttcagacaagccgtcaagacattccgctgccgcagatgacgatggggacaagtggtcgctcctcctcaatggccgggatgaggagcagtacatc

SEQ ID NO: 280137 - DNA, 4395 bp, Artificial Sequence
  derived and/or modified sequence
atgccagaacaggagaggcaaattactgcaagagaaggagcgagcagaaagatactgagcaaactttcccttccaacgcgcgcgtgggagccagcaatgaagaagtccttcgcgtttgataatgtgggttacgaggggggtctggacggtcttggacctagctcccaggtggcgacctcgaccgtgagaattcttggtatgacgtgtcaatcgtgtgtgaagtccattgaagatagaattagcaacttgaaggggatcatttcgatgaaggtgagcctggaacaaggttcagcaactgtcaagtacgtcccgagtgtggtgtgtctgcagcaggtctgccaccaaattggggacatggggtttgaagcctcaattgccgagggaaaggcggcatcctggccatcgagatcgcttccggcgcaggaagcagtggtgaagctgcgcgtggaggggatgacctgtcagtcgtgcgtctcctccatcgagggaaaagtccggaagctgcaaggagtcgtgcgggtcaaggtttcgctgagcaaccaagaggccgtgatcacgtatcagccctaccttattcagcctgaagatctgcgggaccacgttaacgatatgggctttgaggcagcaatcaaatcaaaggtggcacctctgtccctgggcccgattgacattgaacgtttgcagtcgactaatcccaagcgtccactgagctcagcgaaccaaaactttaacaatagcgaaacccttgggcatcaaggttcacatgtggtgacgcttcagctcagaattgatgggatgcactgcaagtcatgtgtgcttaacattgaagaaaacatagggcaacttcttggcgtgcaatcaattcaggtgtcactggagaacaagactgcacaggtaaagtatgatccttcctgtaccagccccgtggctttgcagagagcaattgaggccctgccacctggtaacttcaaggtttccctcccagatggagcagaaggctcgggcactgaccatcgaagctcgtctagccactcccctggatcgcccccaagaaaccaagttcaggggacttgctccactaccctcatcgcaatcgcggggatgacttgtgctagctgtgtgcattcgatcgaggggatgatttcgcaactggaaggagtgcagcaaataagtgtgtccctggcggaaggtactgccaccgtcctgtataatcccagcgtcatcagcccggaagaactccgagcagcaatcgaagatatgggatttgaggcgtcagtggtgtctgagtcgtgttccactaatccccttggaaaccattcggcgggaaactcgatggtgcaaaccaccgatggaactccaaccagcgtgcaagaagtcgccccacacaccggacgcctcccagcaaatcatgcacccgatatcctcgcaaagtcgccacagtccacccgagcagtggctcctcagaaatgtttcctccagatcaaaggaatgacctgtgcttcctgcgtgtcaaacatagagagaaacctgcaaaaggaggcgggtgtcctctccgtgcttgtggctctgatggccggtaaagcagaaatcaagtacgatcctgaagtcattcaacctcttgaaatagcgcagtttattcaggatctgggttttgaggccgcagtgatggaagattacgccggcagcgatggcaatattgaactgactataactggtatgacttgcgcatcgtgcgtgcataacattgaaagcaagctgaccagaaccaacggcatcacttacgccagcgtggcactggcaacttcgaaggcactcgtcaagtttgatcctgagatcattggtcctcgggatatcatcaagatcattgaggagattggatttcatgcaagccttgcacaaaggaaccctaatgcgcatcaccttgatcacaaaatggaaatcaagcagtggaagaagtcatttctgtgctcattggtgtttggaattccggtcatggccctgatgatatacatgttgataccatcgaatgaacctcatcaatccatggtcctggatcataacattattcccggcttgtcgatcctgaacctgatattcttcattctctgtacttttgtgcaactcctcggaggctggtacttttacgtgcaggcatacaaatcccttagacatcgatcagccaatatggatgtgcttattgtgttggcaacctcgatcgcatacgtgtactcccttgtgattctcgtcgtggccgtcgcggaaaaagcggaacgtagccctgtgactttctttgacactccaccaatgcttttcgtgttcatcgccctgggtcgatggcttgaacatttggccaagtcaaagacttccgaggcacttgcaaagctcatgagcctgcaggcaacggaggcaaccgttgtgactctcggagaagataatctgattattcgggaagaacaagtccctatggaacttgtgcagcggggagatattgtgaaggtggtgcccggaggaaagtttccagtcgatggtaaggtgctggaaggtaacaccatggcagatgaatcgctcatcacgggagaagccatgcccgtaacgaaaaaaccgggttcgactgtgatcgccggttcaattaacgcacacggatcggtattgatcaaagccactcatgtgggtaacgacactacccttgcacaaattgtgaagctggtggaggaagcccaaatgtcaaaggcccctatccaacaattggccgataggttctcaggctactttgtgccgtttatcatcatcatgtcgacccttaccctggtggtgtggatagtcattggattcatcgattttggagtggtgcagcgctacttcccaaatcccaacaaacacatttcgcaaaccgaggtgattatacggtttgcgtttcaaacttcgatcaccgtgctgtgtatagcgtgtccgtgtagcttgggtttggcaacgcctacggcggtcatggtgggtaccggggtggctgcccagaatggaatcttgattaaaggtggcaagcctcttgaaatggctcacaagataaagactgttatgttcgataagaccggcaccattacccatggtgtgcccagagtgatgcgcgtcctcctcctgggagatgtggccactcttcctctgcggaaggtccttgccgtggtgggaaccgcagaagcaagctcagaacatccactgggtgtcgcagtgactaagtactgcaaagaagaacttgggaccgaaacgctcgggtactgtaccgactttcaggccgtgcctggttgcggtattggttgtaaggtgagcaacgtcgaaggaattcttgcccattctgagcggcctctgtcggcacctgcaagccacctgaacgaagcagggtccctcccagcagaaaaagatgcagtccctcaaaccttttctgtcctcatcgggaatcgcgaatggcttagacggaatgggctgaccatatcgagcgatgtcagcgatgcgatgaccgaccacgaaatgaagggtcaaaccgctatactggtggcgatagatggagtcctgtgcggtatgatagcaatagcagacgcagtgaagcaggaagcagcgctggcagtgcacactctgcaatcgatgggagtggatgtggtccttataaccggagataatcgtaagacggctcgtgcaattgcgacgcaggtggggataaacaaagtgttcgcagaggtgctgcctagtcataaagtggcaaaggttcaggagctccaaaacaagggcaagaaggttgctatggtcggggatggtgtgaacgacagccctgcacttgcccaagccgacatgggtgtcgccattggaacgggaactgacgtggcgattgaagcagctgatgtggtgctcatccggaatgatcttcttgacgtggtggccagcatacatctttcaaaacgtactgtgagaagaataagaatcaatttggtgcttgcactgatctacaatctggtgggaatccccatagcggcaggcgtgttcatgccaatcggaatcgtcctgcaaccttggatgggatcggcggcaatggcagcatcgtcagtgtccgtggtgttgagctcacttcagcttaagtgttacaaaaagccggatttggagaggtacgaagctcaagcacatgggcatatgaagccactcaccgcgagccaagtgagcgttcatatcgggatggacgatcgatggcgtgatagcccacgggcaaccccttgggaccaggtgtcctacgttagccaagtctccctgagctccctcacctcggataagccttcgagacatagcgcggccgcagatgacgacggtgataaatggtcccttcttctgaacggtagggacgaagagcaatacatc

SEQ ID NO: 280138 - DNA, 4395 bp, Artificial Sequence
  derived and/or modified sequence
atgccagagcaggagagacaaattactgccagagagggcgcatctcgtaaaatcctgtcgaaactttcccttcctactcgcgcctgggaaccagcgatgaagaagagcttcgcatttgataacgtgggatacgaaggaggtttggatggcctgggtccatcctcccaggtggctacctccacggtccgtattcttgggatgacctgtcagtcgtgtgtgaagtccattgaagatcggatatccaaccttaaggggatcatctcgatgaaggtgtctttggagcaaggaagcgcaactgtcaagtacgtcccttcagtggtgtgccttcaacaagtctgtcatcaaattggagacatgggttttgaagcatccattgcagaaggaaaggcggcctcctggccatcccgaagcctgcccgcacaggaagcagtggtcaagttgcgcgtggagggcatgacgtgccagagctgcgtgtcatcaatcgaaggaaaagtacgcaagctgcagggggtggtgagagttaaggtgagcctgtcaaatcaagaggcagtcatcacctaccagccttacctgatccaaccagaggaccttcgcgatcatgtgaatgacatgggctttgaggcagcgataaagtcgaaggtggcacctctgagccttggacctattgacattgaacgactgcaatcgactaacccaaagcgcccactctcgtcggcaaatcaaaacttcaataactcagagactctcggtcaccaagggtcccatgtggtcactcttcaacttcgtatcgacggaatgcattgcaagtcatgcgtgttgaatattgaagagaacatcggtcaattgcttggggtccaatcgattcaagtgagccttgagaacaagactgcacaggtcaagtacgatccttcctgtactagccctgtggccctgcaaagagccatcgaggcactgccccccggtaactttaaagtgtcgttgcctgatggtgcagagggctcgggtactgatcacagatcatcgtcgtcccattcgcctggttccccacctagaaaccaagtgcaaggaacttgttccactactcttatcgctattgcgggaatgacgtgcgcctcctgcgtgcactcgatcgaaggcatgatctcacagctggagggcgtccagcaaatctccgtaagtctggcagagggtacggcaacggtgctgtacaatccaagcgtcattagcccagaagaactccgggccgctattgaagatatgggattcgaagcgtcggtggtgagtgaatcgtgttccaccaatcccctcggtaatcattcggcgggcaactcaatggtgcaaactactgatggaacccccacctccgtgcaagaggtcgctccccatacggggagactgccagcaaaccatgcaccagacattcttgccaagtccccccaaagcactcgtgcggttgccccccaaaagtgttttctccagataaaggggatgacctgcgcaagctgtgtcagcaacattgagcggaatcttcagaaggaagcaggagtcctgagcgtgctcgtggcgcttatggccggtaaagcagaaatcaaatacgacccggaagtgattcaacctctggaaattgcacagtttatccaagatctgggtttcgaagctgcggtgatggaagattacgcaggatcggacggtaacattgagctcaccataaccggaatgacttgtgcttcatgtgtgcacaacattgagtcaaagctgacgagaactaatggcattacgtacgcatcggttgcacttgcgacctcaaaagcgctcgtgaagtttgatcctgaaatcataggaccacgcgacattatcaaaatcatcgaggaaattgggtttcatgcctcgcttgcacaacggaatcctaatgcacatcatcttgaccacaagatggagataaaacaatggaaaaagtcgtttttgtgcagcctggtgtttggtatcccagttatggctcttatgatctacatgctgatcccatcaaacgaaccacatcagtcaatggtcctggatcacaacatcatccccggacttagcattctgaacctgatattctttatactctgtacctttgtgcaactcctgggtggatggtacttctacgtccaagcgtacaaatcgttgcgacatcggtcggcaaatatggatgtgctgattgtgctcgccacctcgatcgcatatgtgtactcccttgtcatcctcgtcgtggcagtcgcagaaaaagcggaaagatccccggtgaccttttttgatacccctccaatgctttttgtgtttatagcactgggtcgctggctcgaacacctggcaaaatccaagacttcagaagcacttgcaaagttgatgagcctccaagcaactgaggcaactgtggttactctcggagaagataaccttatcattcgtgaggaacaggtgcctatggaactggtccagcgaggggatattgtgaaggtggtgccgggaggcaaatttccagtggacggaaaggtgttggagggtaacaccatggcggacgaatcccttattaccggtgaggcaatgcccgtgaccaagaaacccggttcaactgtgatcgcaggttcgataaatgcacatggttccgtgctgattaaagcaactcacgtgggtaatgataccactctggcacagattgtgaagttggtggaggaagcacaaatgagtaaagctcctatccagcagcttgccgataggtttagcggctactttgtgccattcatcattatcatgtccacgctgactctcgtggtttggatagtgatcggcttcattgatttcggggtggtgcaaagatacttccccaaccctaacaaacatatttcgcagaccgaggtgattatcagatttgcattccaaacctcgatcaccgtgctgtgtattgcgtgtccgtgttcgcttgggcttgcaacccctactgcagtgatggtgggaactggtgtggctgcacagaacgggattctgattaaaggcgggaaacctcttgaaatggcacataagatcaaaaccgtgatgtttgacaaaactggcaccatcacccacggggtccctagagtcatgcgagtgctgcttcttggggacgtggcaactctccctctgcgcaaggtgctggcagtcgtgggcaccgcggaggcgtcgtccgaacaccctctgggagtggcggtgactaagtactgtaaggaagaactgggcaccgagactctcggatactgtaccgacttccaagctgtgccaggttgcgggattggatgtaaggtgtcaaacgtggaagggatcctggcacattcggagcggcctcttagcgcgcccgccagccaccttaacgaggccggaagcctgccagcagaaaaagacgcagtgccccagactttctcagtgctgattggtaaccgggagtggctcaggcggaacggactgaccatttccagcgatgtctccgatgcaatgaccgaccatgagatgaaaggtcagactgcaatcctcgtagccattgatggagttctctgcggaatgattgcgattgctgatgccgtgaaacaggaggcagcgcttgctgtgcataccctgcagtcgatgggcgtcgatgtcgtgctgatcaccggagacaaccgcaagactgcacgcgccatcgcaacgcaagtgggcatcaacaaagtctttgcagaggtgctccccagccacaaggtggccaaagttcaagagcttcagaacaagggaaagaaagtggcgatggtcggggatggtgtgaacgactcgccggccctggcacaagctgatatgggcgtcgcgatcgggaccggtactgacgtggcgatcgaagcagcagatgtcgttcttattagaaacgacctccttgacgtcgtggcatcgatacacctgtccaaaagaaccgtgaggcgaatacggatcaaccttgtattggcgcttatctacaacctcgtcggaatacctatcgccgcaggtgtctttatgccaataggcattgtgctgcagccttggatgggaagcgcagcgatggcagcttcgtcggtgtctgtggtgctgagctcactgcagctgaagtgttacaaaaagcctgatctggaacggtacgaggcccaggcccatgggcacatgaaaccactgactgccagccaagtctccgtgcatatcggaatggatgacaggtggagggactcgccgcgggccaccccatgggatcaagtctcctacgtgtcgcaggtttccctttcatcccttacgtccgacaagccgtcgcggcactcggcagcagcagatgatgatggggacaaatggtcgcttcttcttaacgggcgggacgaagaacagtacatt

SEQ ID NO: 280139 - DNA, 4395 bp, Artificial Sequence
  derived and/or modified sequence
atgcccgagcaggaacgacagattacagctagagaaggtgccagtagaaaaatcctgtctaagctgtcactacccacgagagcctgggagccagcgatgaaaaaatctttcgccttcgacaatgtcggatacgaaggcggattagatggcctaggcccctcctctcaggtcgcgacctctaccgtgaggatcctcgggatgacatgtcagtcgtgcgtgaagagtattgaggatcgtatctcaaatctgaaaggcataatcagcatgaaagtgtccttggaacagggtagcgcaaccgtgaagtacgtacctagcgtggtttgtctacaacaggtctgccatcaaataggtgatatggggtttgaggcatccattgcagaggggaaggctgcaagctggccatcacgatctctgcccgcccaagaggctgtggttaaactccgcgtggaggggatgacctgccagagttgcgtctcaagcatagaggggaaagtccgaaagctgcagggcgtggtgcgtgttaaggtttctctttcaaaccaggaggccgtcattacgtatcaaccttatctcatacagcctgaggacttgcgggatcacgttaatgacatgggtttcgaggctgcaatcaagagtaaggtcgccccactaagtctgggcccaatcgacattgagcgcttgcagtctaccaaccccaagaggcccctgagtagcgcgaaccaaaactttaacaattcagagacccttggacatcagggatctcatgtcgtgacactgcagctgagaatcgatggtatgcactgcaagagttgtgtgctcaacatcgaagaaaacatcggccagctgctaggggttcaatctattcaggtatcgctggaaaacaagacagctcaggtgaagtacgatccatcctgcaccagccccgtggccctccagcgggctatagaggctctccctcccgggaactttaaggtgagccttccagacggcgccgaaggctcagggactgatcaccgatcttccagctcccacagcccaggttcccctccacgtaaccaggtgcagggtacctgctctacgactttgatcgccatagctggaatgacctgcgcaagctgcgtgcatagtatcgagggaatgatttcccaactagagggcgtccagcagattagcgtatctctggcagagggcactgccaccgtgctgtataacccatctgtgatcagtcccgaagagctcagagccgctatcgaggacatgggctttgaagcgagcgtggtcagtgaaagctgttcgacgaatcctctaggtaaccacagcgctggtaactccatggtccagaccaccgatggcacccctacctcggtgcaagaagtggccccccatacgggccgcctccctgcaaaccacgcgccggacattttggcgaagagcccacaatctacccgggctgtcgcaccccaaaagtgtttcctgcaaataaaaggtatgacctgcgcctcgtgcgtatcaaacatcgagcggaacctgcaaaaagaagcaggcgtcctcagcgtactcgtggcattaatggcgggaaaggctgaaattaaatatgaccctgaagtcatccagccattggagattgcccagttcattcaggacttgggatttgaggcggctgtgatggaggactacgcaggatccgatggaaacatcgagttgactatcaccggcatgacttgcgccagttgtgttcacaacatcgagagcaagctcaccagaactaacgggataacatacgctagcgtcgctcttgccactagcaaggctttggtgaaattcgaccctgagataataggaccgagggacatcataaaaatcattgaagagatcggattccatgctagtctagcacagcggaatccaaatgctcatcatttggatcacaaaatggagataaaacaatggaaaaagagctttctctgtagcttggtgtttggtatcccagtgatggccctgatgatttacatgttgataccttctaatgaaccgcaccagtctatggtgctcgatcacaatataatccccgggttatcgatcctgaatctgattttttttatcctctgcacgttcgtgcagcttctggggggatggtacttctacgtacaggcctataagtccctgaggcatcgcagtgctaatatggacgttttgatcgtcctggcaacatccatcgcctatgtgtacagcctggtgattctcgtggtggcagtggccgaaaaggccgaacgctccccagtgaccttctttgatacacctcccatgctttttgtgttcatagctctgggccgctggctggaacacctcgccaaatccaagacaagcgaggctctggccaaactgatgagcctccaggccaccgaggctacagtggtgacactgggcgaggataacctcatcatccgcgaggagcaggttccgatggagttagtgcaaaggggcgacatcgtgaaagtggtgcctggcggtaagttccccgtcgacgggaaagttcttgagggaaatactatggcagatgaaagtctcattactggggaagccatgccagtcaccaagaaaccagggagcacagtgatcgcaggaagcattaatgctcacggctcagttctgatcaaagctactcatgttgggaacgacaccaccttggcgcagatcgtgaaactagtggaggaggctcagatgtcgaaagctcccattcaacagctcgccgacaggttcagtggttacttcgtacccttcatcatcattatgtccaccttaacactggtcgtttggattgtcattgggtttatagattttggggtggtgcagcgatactttccgaatcccaacaaacatatttctcaaaccgaagttatcatcaggtttgcttttcagacttccattacggtgctctgcattgcttgtccttgctcactgggattggcgacccccacggcagtgatggtgggcaccggggtggcagcccaaaatggaatcttaataaaggggggcaaaccactggaaatggcacataagatcaagacggtgatgtttgataagactggcacgattactcacggtgtgccgagggtgatgcgggtgctcctgctcggggacgtcgcaacactcccgttgagaaaagtgttagcagtggtaggcaccgccgaggcatcttcagaacatcctctgggagtggcagttacgaagtactgcaaggaggagctggggacggaaaccctcggttattgtaccgactttcaggctgttcctggctgtgggatcgggtgtaaagtatctaacgtggaggggatcctggctcactcggaacgccctctgtcagcaccagcctcacacttgaatgaggcaggctcgctgccagcagagaaggacgcagtccctcagacattcagtgtacttatcggtaatcgcgaatggttaagacgcaacggattgactatatccagtgacgtgagcgacgcaatgacagatcacgagatgaagggtcaaactgccatcctcgtcgcaatcgacggagtactttgtgggatgatagctatcgccgacgctgtgaagcaggaggctgcactggcagtacacaccctccagagcatgggggtggatgtggttctgatcacaggggataaccggaagactgcgagagcgatcgcgacccaggtgggcatcaacaaagtgtttgcagaggttctgccaagccacaaggttgctaaagtgcaagagcttcaaaataaaggtaaaaaggtggccatggtaggggatggtgtcaatgatagcccagcacttgcccaggccgacatgggtgttgccataggtacagggactgatgtggccatcgaggctgctgacgtggtcctgatccgcaatgatctcctagacgttgtggctagtatccacctgtctaagaggactgtcaggcgcatcaggattaacctcgtgctggctctcatatacaacttagtaggcatcccgatcgcagcaggcgtgttcatgccaatcggcatcgtgctccagccctggatggggagcgctgctatggccgctagttccgtgtcagtggtgctgagttctctgcagttaaagtgttacaagaagcctgatctggagaggtacgaggctcaggcccacggacatatgaaacctctgaccgcctcacaggtttccgttcatatcgggatggatgacagatggagagactctccacgtgccaccccatgggatcaggtgtcgtacgtttcgcaggtctccctgtcttctctgacaagtgacaaaccgtccaggcactcagccgccgccgatgacgatggagacaagtggtctctcctgcttaacgggcgggatgaagaacagtacatc

SEQ ID NO: 280140 - DNA, 4395 bp, Artificial Sequence
  derived and/or modified sequence
atgccagaacaggagaggcagatcaccgcacgcgaaggcgcatccaggaagatcctttctaaactttccttgccaaccagggcttgggaacccgccatgaagaagagctttgctttcgacaacgttgggtatgaaggcggacttgatggcctcggcccttccagccaggtggccaccagcactgtaagaatcctgggcatgacttgtcaaagctgcgtgaaatccatcgaagacaggatttctaacctgaagggaattatctcaatgaaagtgtcactggagcagggaagtgctactgtcaagtacgtgccttctgtggtctgcctgcagcaggtgtgtcaccaaattggggacatgggctttgaagcaagtatcgccgagggaaaggcagcgagttggccttcaaggtccctgcccgcacaggaagccgttgtcaaactcagggtggagggcatgacttgccaaagctgcgtgagttcaatcgaagggaaggtgcgtaagttacagggcgtggtgcgcgtgaaggtctccctgtccaaccaggaggcagtgatcacctatcaaccctaccttatccagcccgaagatctcagagatcacgtgaacgacatgggatttgaagcagccatcaaatctaaagtggcacctctgagcttggggcctatcgacatcgagagattgcagagcacgaacccaaagcgcccactcagctccgccaaccagaactttaacaatagcgaaacactgggacaccagggtagtcacgtcgtaacactgcaactccgtatagacggcatgcattgtaagagctgcgtgctgaacatagaagaaaacatcggacagcttctcggagtccagtccattcaagtctcgttggagaacaaaaccgcccaggtgaagtatgatcccagttgtacatccccagtggcattacagcgcgccatagaggctcttcctccaggcaatttcaaggtgagccttcccgatggtgctgaaggatccgggactgatcaccgtagttctagctctcacagcccgggatctccccccaggaaccaggtgcaaggcacatgctctacaacactgatcgcgatagctggaatgacctgtgcaagctgcgttcacagcatcgaagggatgatctctcagttagagggtgtccaacaaatctcggtcagccttgctgaggggacagcaactgtgctttacaaccctagcgtgatttcacccgaggagctgcgcgccgcaatcgaggatatgggatttgaagcaagcgtagtgagcgaaagctgttccaccaaccctctcggaaatcacagcgctggtaactcgatggtccagaccacagacggcactcctacaagcgtgcaagaggtcgccccacacactggtcggctgcccgctaatcatgcacccgacattctggccaagagtccccaatctaccagggctgtggctccgcagaagtgctttctgcagataaaagggatgacctgcgctagctgcgttagcaacattgagagaaatctgcaaaaggaggctggcgtcctgtccgtgctggtcgccctcatggccggcaaagcggagattaagtacgaccccgaagttatccagccactggaaatcgctcagtttatccaagacctgggattcgaggctgccgtgatggaagactatgccggcagcgacggtaacattgaacttacaatcaccggaatgacctgtgcctcatgtgtgcacaacatcgagtctaaactgacccgcactaatggcattacctacgccagcgtcgcacttgcaacatccaaggccttggtgaagttcgatcccgaaattatcggccccagggatattatcaaaataatagaggagattggctttcacgcttctctggcccagagaaaccctaatgcccaccacttggaccacaaaatggagattaaacagtggaagaagagcttcttatgctctttagtgtttggaatacctgttatggcactcatgatctatatgctgataccgtctaacgagcctcaccagtctatggtcctggaccataacataatccctggcttgtctatactgaatttgatctttttcatcttatgcacattcgtgcaactccttgggggatggtacttctatgttcaggcctacaagagtctaagacacaggtcagccaacatggacgtgctgatcgttcttgcaacttcaatcgcatacgtctattctctggtgatcctcgttgtggccgtcgctgagaaagctgaaaggagtcccgtcacattctttgatacaccaccaatgttgttcgtttttattgcacttggacgctggctggaacacctggccaagtccaagacgtccgaggcgcttgccaaattgatgagcttgcaggcaaccgaagctactgtcgtgaccttaggagaagataatctaattatcagggaggaacaagtgcctatggagctggtccagcggggcgacatagtgaaagtggtgcccggaggaaagtttccagtggacggaaaggtcctggaggggaatactatggcggacgagagcctgattacaggagaagctatgccagtgaccaaaaaacctggatccactgtaattgctggaagcattaatgctcacgggtccgttttaattaaagcaacacatgtgggaaacgacacaacacttgctcagattgtcaagctcgttgaggaagcccagatgtccaaagctcccatccaacagcttgccgatcggttctctggatacttcgtcccattcatcattattatgtccacacttaccctcgtggtatggatcgtcattggcttcatcgactttggtgtggttcaaaggtacttcccgaaccctaataaacatatcagccaaactgaagtaatcatcaggtttgcatttcagaccagcattacagtcctttgtattgcatgtccttgttcactggggctggctacccccactgctgttatggtgggcaccggcgtggctgcccagaacggtatcctgattaaaggcggcaagcccctggaaatggcgcacaagatcaagacagtcatgttcgacaaaactggcactattacccatggtgtccccagggttatgcgcgtgctgctattgggggacgtggcgaccctgcctcttagaaaagttctggcagtggttggcaccgctgaggccagtagcgagcatcctctgggagttgcagtgaccaaatattgtaaggaagagctgggcactgaaaccctcggatattgcaccgactttcaggcagtgccgggctgcgggatcggctgtaaagtgagtaatgtggaaggcattctcgctcacagtgagcgccctctcagcgcccccgccagtcatttgaacgaggcaggcagccttccagcagagaaggacgctgttcctcagacatttagcgtgctcattgggaatcgggagtggctgaggaggaacgggctgaccatctctagcgacgtctccgatgctatgaccgatcacgaaatgaaggggcaaacagcgatccttgtcgccatcgacggagtcctatgcggcatgatcgcaatcgcagacgcagtgaagcaggaggccgctcttgcagtgcatacactgcagagcatgggagttgatgtcgtactaatcaccggggataacagaaagaccgcaagggccattgctacacaagtgggtatcaacaaggtgtttgccgaagtactacctagccacaaggttgcgaaggtgcaagaattacagaacaaagggaagaaggtggccatggtgggagatggggtgaacgattcccccgcgctggctcaggcagacatgggagtcgctatcggtaccggcactgatgtggcgattgaggcggctgacgtggtattgatcaggaacgatttattagatgtggtggcttctatccacctgagtaaaagaacagtaagaaggattaggatcaaccttgttctggcactgatctacaatcttgtcggcatccccatcgcggcaggggtttttatgccaatcggcatcgtactacagccgtggatgggaagcgcagcaatggcagccagcagcgtgtctgtggttctgagctctctgcaactcaagtgctataagaaacccgacctggagcgttacgaagctcaagcccatggtcacatgaaaccacttaccgccagccaggtctccgtgcatataggaatggatgaccgctggcgcgactccccgagggcaaccccctgggaccaggtctcttacgtttcccaggtgtctctgagctcattgacatccgataaaccatcgaggcatagcgccgctgctgatgatgatggggacaagtggtcactcctgctgaacggacgggacgaggagcagtacatt

SEQ ID NO: 280141 - DNA, 4395 bp, Artificial Sequence
  derived and/or modified sequence
atgccagaacaagaacgtcaaatcacggcacgcgaaggtgcgtcccgtaagatcctctcgaagttgtcgcttcctactcgggcatgggagcctgcaatgaagaagtccttcgcattcgacaatgtcggttacgagggcggacttgatggcctggggccctcatcgcaagtggccacctcaaccgtcagaatacttgggatgacctgtcaatcttgcgtgaagagcattgaggacagaatttccaatcttaagggaattatctcaatgaaggtttcactggaacaagggtccgcaactgtgaagtacgtcccttcggtggtctgcctgcaacaagtgtgccaccagattggagatatgggattcgaagcatccattgctgaaggaaaggcagcaagctggccatcgaggtcccttccggctcaagaagctgtggtgaagctgcgcgtggaggggatgacttgtcaaagctgcgtctcatccatagaaggcaaagtgcggaagctgcagggtgtcgtccgggtgaaggtgtcactgagcaatcaggaggcagtcatcacttaccagccatatctgatacaaccagaagatcttagggatcatgtgaatgatatgggatttgaagcggcgatcaaatcgaaggtggcacctctctcactgggccccatcgacattgaaagactccaatccaccaatcctaaaagaccactgtcctcggcaaaccagaactttaacaattcagagactcttgggcatcaagggtcgcatgtcgtgacccttcagctgcgaatcgacggcatgcattgtaaaagctgtgtgttgaatattgaggaaaacattggacaacttctcggcgtccagtcgatccaagtctcgctggaaaacaagaccgcacaagtgaagtacgaccctagctgtacgtcccccgtggctttgcaacgtgcaatcgaagcactgccacctgggaactttaaggtttcactcccagatggagcagaaggatccggaaccgatcacagatcgagctcaagccactcccctggatcaccaccgaggaaccaagtccaaggcacctgcagcactactcttatcgccatagcgggaatgacctgtgcaagttgtgtgcattccatcgaggggatgatttcacaactcgagggagtgcagcagatctccgtgtctcttgctgaaggtactgcaaccgtgctttacaaccctagcgttatttcgcccgaagagcttcgggccgcaattgaggacatgggtttcgaagcatcggtcgtgtcggaatcctgttccaccaacccccttggcaatcacagcgccggcaattcaatggtgcaaaccactgatggaactcctacctccgtccaagaagtggcacctcacaccggtagactgcccgcaaaccacgcccctgacattcttgccaaatcgccgcaatcaacccgtgctgtggcaccccaaaaatgttttctgcagataaaaggtatgacttgtgcatcctgtgtgtcaaacatagaaaggaacctccagaaagaggccggagtgctctccgtccttgtggccctgatggcaggtaaggccgagatcaaatatgatcccgaggtgattcaaccgctggaaattgcacaattcatccaggatctcggttttgaggcagccgtcatggaggactacgcagggtcagatggaaatatcgaacttaccatcaccgggatgacgtgcgcatcgtgcgttcataacattgaatcaaaactgacccgcactaacggaatcacctacgcaagcgtggcactcgcaacgagcaaggcactcgtgaagtttgatccagagattattggacccagggatatcatcaagattattgaagagattgggttccatgcctcgctggcccaacgtaaccccaatgcacatcacctggatcataagatggagataaaacaatggaaaaagtcgttcctgtgttcgttggtattcggtattccagtcatggctcttatgatttacatgcttattccttccaacgaaccacatcaatccatggtgcttgatcacaacataattccaggcctgtcgatcctgaatctcatcttctttatcctttgtacctttgtgcagcttcttggaggttggtacttttacgtgcaagcgtacaagagcctcagacaccgcagcgccaacatggatgtgctgattgtcctggcaacttccatcgcttacgtctacagcctggtgatacttgtggtggcggtggcggaaaaggcagagagatcacctgtcacttttttcgacactcctcccatgcttttcgtgttcatcgcacttggaaggtggctcgagcatctggcgaagtccaagacctcggaagcgcttgcgaaacttatgtccctccaagctaccgaagcgacggtggtgaccctcggagaagataacttgatcataagggaagaacaagtgccaatggagctcgtccaaaggggtgatatcgtgaaggtggtcccaggaggtaagtttcctgtcgatggaaaggtgcttgaaggtaacaccatggcggatgaatcactcattaccggagaggccatgccagtgactaagaagccaggttcaactgtgattgcaggcagcattaacgctcatggcagcgtgctgataaaagcaacccatgtgggaaacgacaccactctggcacaaatcgtgaaactggtggaagaggcacagatgagcaaggcacctatccagcagctggcagacaggttttcgggatactttgtccctttcatcattatcatgtcaacgctcactctcgtggtgtggattgtgatcgggtttattgattttggtgtcgtccaacgctattttccgaaccctaataagcacatatctcagaccgaagtgattattcgcttcgcgtttcagacctcaataaccgtgctttgtattgcttgcccatgctcgctcggacttgccactccaactgcagtcatggtggggactggggttgcagctcaaaacggtattttgattaagggcggaaagccccttgaaatggcacacaaaatcaagacggtcatgttcgacaaaaccggtaccattactcatggcgtgccaagagtgatgcgcgtgcttctcctcggggatgtggcaaccctgcctctccggaaggtgctggcagtcgtgggtactgccgaagcatcgtcagaacacccactgggagttgcagttaccaaatactgcaaggaggaactgggtaccgaaactctgggatactgtaccgattttcaagcagtccctggctgcggtattggctgcaaagtctcgaacgtggagggaattctggcacactccgagaggccactcagcgcaccagcatcccatttgaacgaagcgggatcgctgccggcagaaaaggatgccgtgccacagacgttttcggtcctgatcggtaacagagagtggcttcgccgtaatgggctcactatttcgtctgacgtcagcgacgcaatgaccgatcacgagatgaagggacagacggcaatactcgtcgccatcgatggtgtgctgtgtggaatgatcgctattgcagatgcagtgaaacaagaggcagctcttgcagtgcacactttgcaatcaatgggagtggatgtagtcctgataaccggagacaaccgcaaaacggcccgtgcaatcgcaacccaagtgggtattaacaaggtgtttgctgaagtgctgccatcgcataaagtcgcaaaggtgcaagaactgcagaataaaggaaagaaggtggccatggttggtgacggagtgaacgattcgccagccctggcgcaggcagatatgggagtcgcgatcggaaccggtactgatgtggcgatcgaagcggctgatgttgtcctgatccgtaacgatctgttggatgtcgtggcctcaatccatttgagcaaacggactgtcagacggattcgtatcaatcttgtgcttgccctgatttacaatctcgtcggtattcccattgccgcaggtgtgtttatgccaattggaatcgtgctccaaccttggatgggctcggcagcgatggcggcaagcagcgtgtcggtggtgctttcctcccttcaactcaaatgttacaagaagcccgacctggagagatacgaagcacaagcacatggccatatgaagccacttacggcatcacaagtgtccgtgcatataggaatggacgataggtggagagattcccctagagcgactccatgggaccaggtttcatacgtctcccaggtgtcactgtcgtcccttacctcggataagccatcgcgccattcggccgcggcagacgatgatggagataagtggtccttgcttcttaacgggcgagacgaagagcaatacatt

SEQ ID NO: 280142 - DNA, 4395 bp, Artificial Sequence
  derived and/or modified sequence
atgcccgaacaggagcgacagattaccgcaagagaaggggcctcgaggaagatactgtcgaagctgtctctgcccactcgggcttgggaacctgcaatgaagaaaagtttcgcttttgacaatgtggggtacgagggaggactggacggcctgggtccttcctcccaggtggcgacttccactgtgaggattctcggtatgacctgccaatcatgcgtcaagagcatagaagatcgcatctccaatctgaagggcattatctcgatgaaagtctcgcttgaacaggggtccgcgactgtcaagtacgtcccctcagtcgtgtgtctgcaacaagtttgtcaccaaattggtgatatgggatttgaagcaagcattgcagagggtaaggccgccagctggccgtccagatccctcccggcacaggaagccgtggtgaagctgagagttgaaggaatgacttgtcaatcgtgtgtgtccagcatagaaggaaaagtcagaaagttgcaaggggtggttcgggtgaaggtgtccctgtccaatcaagaagcagtgataacctaccagccatacctgattcaaccagaagatttgagagatcatgtgaacgacatgggtttcgaggcagctatcaaatctaaggttgcacctctttcgttggggcctatcgatattgagcggctccagtcgacgaaccctaaaaggcctctctcaagcgcaaatcaaaactttaacaacagcgaaactcttggtcaccagggatcccatgtcgtgactctgcagctcagaattgatgggatgcattgtaaatcgtgtgtccttaacattgaagagaatatcggacaacttcttggtgttcagagcatacaagtctctcttgaaaacaagactgcacaagtgaagtacgatccatcgtgtactagcccagtcgccttgcaaagagccatcgaagcactgccacccggcaatttcaaggtgagcctgcccgatggagcagagggatccggcaccgaccatagatcaagctcctcccattcgcctggaagccctccacgaaaccaggtgcagggcacctgcagcaccaccctgattgccatcgcaggtatgacctgtgcgtcttgcgtgcactcaattgagggaatgattagccaactggagggcgttcaacaaatctccgtgtcacttgccgagggaactgcgactgttttgtacaacccgtccgtcatttccccggaagaactccgggcagccattgaagatatgggcttcgaagcatcagttgtgtcggaatcttgttcgaccaacccactgggaaaccatagcgcaggtaattccatggtgcagacgacggacggcactccgacctcggtgcaggaggtggcacctcacacggggcgcctgcccgcaaatcatgcaccagatattctggcaaagtcacctcagagcactcgggcagtggcaccgcaaaaatgttttctccagatcaaggggatgacgtgcgcatcatgtgtgtcaaacatagaacgcaaccttcagaaggaagccggagtgttgtcggtgctcgtggctcttatggcagggaaggcagagatcaagtacgaccccgaagtgattcaaccactggaaattgcgcagttcatacaagatctgggattcgaggcggcagtgatggaagattacgcagggagcgatggaaacatcgagcttacgattacgggcatgacttgcgcctcatgtgtgcataacattgaatccaagctgactcggaccaacggtataacttatgcctcggtcgcccttgcgacctcgaaggcactcgtcaaattcgatcccgagattattggaccccgcgatatcataaagattatcgaggagattggattccacgcaagcctggcgcagagaaatccaaatgcccatcatctggatcacaaaatggagattaagcagtggaagaagtcgtttctgtgctcgctggtgtttggcattcctgtgatggcacttatgatttacatgctgattccttccaatgagcctcatcaaagcatggttctggatcataacataatccctggcctgtcgatcctgaacctgatctttttcattctttgtacctttgtgcaactgctcggaggttggtacttttacgtgcaagcgtacaagtcacttagacacagatccgcaaacatggatgtgctgattgtgcttgcgactagcatcgcatacgtgtactccttggtcattcttgtggtggctgtcgcagaaaaggcggagagatcacctgtgaccttctttgatactccacccatgctgtttgtgtttatagctcttggacgctggttggaacatcttgcaaagtcgaaaacctcggaagcattggcaaagttgatgtcgcttcaggcaaccgaagcaaccgtggtcactcttggagaagataacttgataattcgcgaagaacaagtgccaatggagctggtgcaacgtggtgacatcgtcaaggtcgtgcctggtgggaagtttccagtggacgggaaagttcttgagggcaataccatggcagacgaatccctgataaccggtgaagcaatgcctgtgaccaaaaagcctggaagcactgtgatcgcaggatctattaacgcccacggttccgtgctcattaaagccacccatgtcggcaacgatacgactcttgcacaaatcgtcaaacttgtcgaagaagcacaaatgagcaaagcaccgattcagcaactggcagatcgtttttcaggttacttcgtgccattcattatcattatgtcaactcttactctggtcgtctggattgtgattggctttattgacttcggagttgtgcaaagatactttcctaaccctaacaagcatatctcgcagaccgaagtcattattcggtttgcttttcaaactagcatcaccgtgctgtgtattgcgtgtccatgttccctgggtctggcaacccctaccgctgtcatggtcggaactggggtggctgcccagaatggtattctcattaaaggaggcaagcctcttgaaatggctcataagatcaaaactgtcatgttcgataagactggaactattactcatggcgtgcctcgagttatgcgcgtcttgcttctgggcgatgtggctactctgccactgcggaaggtcctggcagtggtcggtactgcagaagcatcatccgaacatcccctgggtgtggcagtcaccaagtactgtaaagaagagcttggaaccgaaactctgggctactgcactgatttccaagcagtgccaggctgcggaattggatgcaaggtgagcaacgtcgaagggattctggcccattccgaaaggccacttagcgcacctgcgtcgcatctgaatgaagcaggttcacttcccgccgaaaaggatgcagtgcctcagacgttctcagtactgatcggtaacagggaatggttgcgaagaaacggccttactatctcctcggacgtgtcagatgcaatgaccgaccacgagatgaaaggtcaaaccgcaatacttgtggcgatcgatggtgtgctgtgtggaatgatcgcaatcgcggatgcagtcaaacaagaagccgccctggccgtgcataccctgcagagcatgggagtggatgtggtccttatcacgggggataaccgcaagaccgcaagagcaatagccacccaggtgggcatcaataaagttttcgcagaagtcctgccctcccataaggtggcaaaagtgcaagaactccagaataaggggaagaaagtggcaatggtcggagatggagtgaacgattctccagcccttgcgcaagccgacatgggggtcgcaatcgggaccggaaccgacgtggcaatcgaggcggccgacgtcgttttgatccgcaatgatcttctggatgtggtggcaagtatccatctgtcgaagagaaccgtgagacgcattagaatcaacttggtgctggcactgatctataatctggtgggaattccaatcgcggccggtgtgttcatgcctatcggtatcgtgcttcaaccctggatggggtctgctgcaatggccgcatcatccgtgtcggtggtgctgtcctccctccaactgaaatgttacaaaaagcctgatctggaacgctacgaagcacaggcacacggccatatgaagccattgaccgcgtcccaagtgtcggtgcatattggaatggatgatcgttggcgggacagccctcgtgcgacgccatgggaccaggtgtcctacgtgtcgcaagtgtccttgagctcgctgacttcagataaaccctcgcgccatagcgcagcagcggacgacgatggtgataaatggtcattgctgcttaatgggcgcgatgaagaacagtacatc

SEQ ID NO: 280143 - DNA, 4395 bp, Artificial Sequence
  derived and/or modified sequence
atgcctgagcaagaacgccagatcactgcccgagagggcgcctcccggaagatcctcagtaagttgtcccttccgacccgcgcctgggaaccggcgatgaaaaaatccttcgccttcgataacgtgggttatgaaggcggtctggatggcctcggaccgtcctcacaggtcgcaacctcgactgtccgcatcctggggatgacctgccaaagctgtgtgaaaagcatcgaggaccggatctcgaacctcaaaggaatcatttccatgaaagtgagcttggagcaaggtagcgccaccgtcaaatacgttccatcagtggtgtgcctgcagcaggtgtgtcaccagatcggagacatgggtttcgaagcaagcattgccgaaggaaaggcagcttcgtggccttctcgcagcctgccggcccaagaagcagtggtgaaactgcgcgttgagggaatgacttgccaatcctgtgtgtcctccattgagggtaaggtgcggaagctccagggagtggtgagggtcaaagtgtcgctcagcaaccaggaggccgtgattacctaccaaccgtacctgattcagcctgaggaccttcgggaccacgtgaacgacatgggattcgaggctgcaatcaagtcaaaggtggcaccgctctccctgggaccgatcgacatcgagcgcctgcaatccactaaccctaaacgaccgctgtcatcggccaatcagaatttcaacaattcggaaacgctgggacaccagggaagccatgtggtcactctgcaactccgcatcgacggtatgcactgcaaatcctgcgtgctgaacatcgaagagaatatcggacaactgctgggcgtgcagtccatccaggtgtcccttgagaataagacggcccaagtgaaatacgatccgtcgtgtactagcccagtcgctctccaaagagctatcgaggccttgccacctggaaatttcaaggtgtcgcttccggatggcgccgaaggctcgggaactgaccaccgctcgtcgtcaagccactccccgggatcgccaccgcggaatcaggtccagggaacctgtagcaccaccctgatcgcgatagccggcatgacctgcgctagctgcgtccattccatcgaagggatgatcagccagctggaaggcgtccagcaaatctcagtctccctggcagaaggcacggcgacggtgctctataacccttcagtcatcagcccggaagaactcagggcagccatcgaagatatgggatttgaggcgtcggtcgtctccgagtcgtgctcgactaacccgctcggaaaccactcggcgggcaactcgatggtccagactactgacggtaccccaacgtcagtgcaagaggtggctccgcacaccggtcggcttccggccaaccatgcccccgatatcttggccaaaagcccacagtcgactcgtgcagtcgctcctcagaaatgcttcctccagatcaagggcatgacgtgcgcatcttgtgtgtctaatatcgaacgcaatctgcaaaaggaagcaggcgtgctgagcgtgctggtggctctcatggccggcaaggccgagattaagtacgacccggaagtgatccagcctctggagatcgcacagtttatccaagacctcggattcgaagccgccgtgatggaggattacgccgggtccgacggaaacatcgagctgactatcacggggatgacttgcgcttcgtgtgtgcataacattgaatcgaagctgacccggactaacggaatcacctacgcgagcgtcgcacttgctacttccaaggcgctggtgaagttcgatcccgagatcatcggaccccgggacatcatcaagatcattgaggagatcggcttccacgcgagcctggctcaaagaaaccctaatgctcatcacctggaccacaagatggagatcaagcagtggaagaagtcgttcctgtgctccttggtttttggcatcccggtcatggctctgatgatttacatgctgattccgtcaaatgaaccacaccaatcaatggttctggatcataatatcatcccgggcctctcaatcttgaacctgatcttcttcatcctttgcacctttgtgcaactgctcggcggatggtatttctacgtgcaggcatacaagtccctgaggcatagatccgccaacatggatgtcctcattgtgctcgcaacgtccatcgcgtacgtgtactcgctggtgatcctggtggtggcggtggcggagaaagccgagagatcaccagtgactttcttcgacaccccgccgatgctcttcgtgtttatcgcgctcggacggtggctggaacatctcgccaaaagcaaaacctcggaggcactcgcaaaattgatgagcttgcaggcgaccgaggccaccgtggtgaccctgggggaggacaacctgattatcagagaagaacaagtgccgatggaactggtccagagaggtgacatcgtgaaggtggttccagggggaaagtttccagtggatggaaaggtgctcgagggcaacactatggctgatgaatccctgatcactggcgaagcgatgccggtcactaagaagccggggtcaactgttattgctggatcaatcaatgcgcacggaagcgttctgattaaggcgacccacgtagggaacgacaccaccctcgcccagatcgtgaaactggtggaagaggcgcagatgtcaaaggcccctatccaacaacttgcggaccgatttagtggatacttcgtgccgtttatcatcatcatgtcaaccttgactctcgtggtctggatcgtgatcggatttatcgacttcggcgtcgttcagcggtacttccccaatcctaacaagcacatctcacagaccgaggtgataattcgcttcgcgttccagactagtattactgtgctgtgcattgcctgcccttgttcgctcggactcgccactcccactgctgtcatggtcggcacgggagtggccgcgcagaacggaatcctgatcaagggaggaaaaccacttgaaatggcccacaagatcaaaaccgtgatgttcgacaagaccggaaccatcactcacggagtccccagagtgatgcgggtcctgcttctgggagacgtggcgacgctgccactgcgcaaggttctcgccgtggtcggtaccgccgaagcctcttcagaacaccctctgggagtcgctgtgaccaagtactgcaaggaagaacttgggactgaaaccctggggtactgcactgacttccaggctgtgcccggttgcggcatcgggtgcaaggtgtcaaacgtggaaggaatcctggcacactcggagcgcccgttgtcggcgccagcttcccatcttaacgaggccggctcccttccagccgaaaaggatgcagtcccacagaccttctcggtgctgatcggcaacagagaatggctccggagaaacggactcaccatctcgtcagacgtgtcggacgccatgactgaccacgaaatgaagggtcagaccgctatcctcgtggcgatcgatggggtgctgtgcggcatgatcgcaattgccgatgccgtgaagcaggaagcagcgctggctgtccatactctccagtcgatgggagtggatgtcgtcctgatcaccggagacaatcggaaaaccgcccgcgccatcgccacccaagtcggtattaataaggtattcgcagaagtgctgccatcccataaggtggccaaggtgcaggaactccagaacaagggaaagaaggtcgcgatggtgggggatggagtcaatgactcccccgcgctggctcaggcggatatgggggtcgccatcgggaccgggaccgacgtggccattgaggcggcagatgtggtcctcattcgcaacgatctgttggacgtggtggcatcaatccacctgtcgaagaggactgtgcgcaggattcggatcaacctggtcctcgcactgatctacaacctcgtcggaatccccatcgctgcaggcgtctttatgcctatcggaatcgtcttgcagccgtggatgggttccgcggctatggccgccagcagcgtgagcgttgtgctgtcctccttgcagctgaagtgctacaagaaaccagacctggaacgctacgaagcccaggcgcacggacatatgaaacccttgactgcctcgcaagtctctgtgcatatcggaatggatgaccggtggcgcgactcgccaagagccactccgtgggatcaagtgtcgtacgtgtcacaagtgtcactgtcgagcctgaccagcgataagccgagcaggcattccgccgcggcagacgacgacggagataagtggtccctccttctgaatggaagagacgaggaacagtacatc

SEQ ID NO: 280144 - DNA, 4395 bp, Artificial Sequence
  derived and/or modified sequence
atgcctgaacaggaaagacagatcaccgctagagagggagccagtcgcaagatactaagcaaactctctctccccacccgggcttgggagcctgccatgaagaaaagttttgccttcgacaatgtgggctacgaaggcggcctggatggacttggccctagttcacaggtcgcgacgtccacggttcgcattttagggatgacatgccagagctgcgtgaagagtatcgaagatcgaatcagcaatttaaagggaatcatcagcatgaaggtgagcctggagcagggctccgccactgttaagtatgtgccaagcgtagtgtgtcttcaacaagtctgtcaccaaatcggcgacatgggttttgaggcttcaattgctgaagggaaagccgcatcatggcctagtcgcagcctacccgcccaggaggctgtagtgaagcttcgagtagagggaatgacttgtcagtcctgcgttagttccattgaaggaaaagtccgaaaactgcaaggggtcgtccgagtgaaagtctccctaagtaatcaggaggccgtcatcacataccagccctacttgatccaacccgaggacttgagggaccacgtcaacgatatgggattcgaggccgctatcaaatctaaggtcgcccccctgagcctgggccccattgatatcgagaggctacagagcaccaaccccaaaagacccttatcctcggctaaccagaatttcaataattccgaaacgctcgggcatcagggaagccacgtggtgaccttacagctgcgcatagacggtatgcattgcaagagctgcgtgctgaatattgaagagaacatcggccagctgttgggagtgcagtcaatccaagtgagcctggaaaacaagaccgctcaggttaaatatgatcctagctgcactagccctgtggcactacagagagctattgaagcactgccacccggcaatttcaaagtctctctgccagacggagcagagggctccggaaccgatcacagatctagctccagtcactccccaggaagcccgcctcggaaccaggtccaggggacatgtagcaccacactgatcgcaatcgcagggatgacatgtgctagttgtgtgcattctatcgaaggaatgatatcccaactggaaggggtgcagcagatctctgtgtcccttgcggaaggcactgccacagtcctctacaaccccagcgtcatctcaccggaagagttgagggccgccatcgaagacatgggctttgaggctagcgtcgtgtctgaatcttgcagtaccaatcctctcggcaatcattctgcagggaattctatggtgcagacgaccgacggcacgccaacatctgtgcaagaggtggctccgcacacggggcgactacctgctaatcacgccccagatatactggccaaatccccccagtccaccagggccgtggctccccagaaatgtttcttacagatcaaaggaatgacctgtgcctcatgcgtttctaatattgagagaaatcttcagaaagaggcgggcgttctgagcgtcctggtcgccctgatggcaggaaaggccgagattaagtatgaccctgaagtgatccagccactggaaatcgcccagtttatacaggatctcgggtttgaagctgcggtgatggaagactatgccggctcagacggtaacatcgaactcacgataacaggcatgacctgtgcttcctgcgtgcataatatcgagagcaagttaaccaggacaaatggaattacgtacgctagtgtggcactggcaaccagtaaagcattggttaaatttgatccggaaattatcggacccagggatattataaaaatcattgaagaaatcggattccacgcaagccttgcccagcggaatccaaacgcacatcatctagatcacaaaatggaaatcaagcagtggaaaaaaagcttcctctgttcattagtgttcgggattcccgtgatggcgctcatgatatacatgctgatccccagcaacgaaccacatcagagcatggtgctggaccacaatataatccctggactgtcaatcctgaacctcatattctttatcctgtgcacattcgttcagctgctggggggatggtatttttatgtgcaggcctacaagagtcttcgccataggtctgccaatatggatgtgctcatcgtgcttgcaaccagcatcgcgtacgtgtacagcctggttatcctcgtagtagctgtggccgagaaagctgagagatcaccagtcacgttttttgacaccccacctatgttattcgttttcatagctctcggcagatggctcgagcacttagctaaatctaagactagcgaggctctcgccaaactcatgagtctgcaagccacggaggccacagtagtcactctgggcgaggacaatctgatcatcagagaagagcaagtcccaatggagctggtgcagcgcggcgatatcgtgaaagttgtaccaggagggaagtttccggtggacggaaaggtcctggaaggaaatactatggcggatgaaagccttataacaggagaagccatgccggtgacaaagaagccaggatcaacagtcatagctggttctatcaacgcccatgggtctgtgctgatcaaggccacacacgtcgggaacgatacaaccctggctcagattgtgaaactggtcgaggaggctcagatgtccaaggcccccatccagcagcttgcggataggttctccggttatttcgttccatttattatcattatgagcacccttaccctggtggtatggatcgtcatcggcttcatcgactttggggttgtccagagatactttccgaatcctaataagcatatttcacagactgaagttatcataaggttcgcattccagactagcattactgttttatgtattgcctgtccttgctctctcggactcgccaccccaacagctgtgatggtagggactggcgtcgccgcacagaacggtatactcatcaagggcggtaaaccccttgagatggcacataaaattaaaaccgtgatgtttgacaaaactggcaccataacacatggtgtgcccagagtcatgcgcgttttactcctgggagatgtggccaccctcccgttgagaaaagtgctggctgtagttggcaccgcggaagccagcagtgaacaccctctcggcgtcgccgttacaaagtattgcaaagaggagctcgggacagagaccctgggatactgcaccgacttccaggcagtgccaggttgcgggattggttgcaaggttagcaatgtggaagggatcctggctcattctgaaagacctctgagtgcgccagcttctcacctgaacgaggcagggtccctccccgctgagaaggacgccgttccacagactttttcagtcttgatcggtaacagggaatggctgcggagaaatggactgacaatctcctccgatgtttcagatgcgatgaccgatcacgagatgaaggggcagacagctatcctagtggccatcgatggggtgctctgtgggatgatcgcaatcgcggatgcggtgaaacaggaggccgcactcgctgtacacacactccagtcaatgggagtggatgtggtattgatcacaggggacaatcgaaaaaccgctcgagccatagccacacaagtcggtattaataaggtatttgcggaagtgttaccatcacataaggttgctaaagtgcaagagttgcaaaacaagggtaagaaggtggctatggtaggggacggtgtaaacgacagcccggcactggcccaggccgacatgggtgtggcaattggtacgggaacagacgttgcgattgaagcagctgatgtggtgctgatccgtaatgatcttttggatgtcgtggccagcatacatctgtctaagcggaccgtccgacgaatccgaatcaaccttgtactggcgctcatttacaacctggtaggaatcccaatcgccgcaggtgtgtttatgccgatagggatcgtgctgcagccctggatggggtccgccgcgatggcggcctcttccgtatccgtcgtcctgagctcccttcagctaaagtgctacaagaaacccgatcttgagagatacgaagctcaggcgcacggtcatatgaaacctcttactgcctcacaggttagcgtacatattgggatggacgacagatggcgggactctccaagagccactccctgggaccaggtctcctatgtcagccaagtttcgttatccagcctgacctctgacaaaccctccaggcattcggcagcagccgacgatgacggcgacaagtggagcctgctcctgaacggccgagacgaggagcagtatatt

SEQ ID NO: 280145 - DNA, 4395 bp, Artificial Sequence
  derived and/or modified sequence
atgcctgaacaggagcgacagatcaccgcccgggagggtgcttccagaaagatcctctccaagctctctcttcccacccgcgcctgggagccagccatgaaaaagtccttcgcctttgacaacgtgggatacgaaggcggattagacggtttgggtccttcctctcaggtcgccacatccaccgtccgcatcttgggcatgacatgtcagagctgcgtgaaatctattgaggacagaatctccaacctgaaaggtatcatcagcatgaaagttagcctggagcaaggctcggccacggtcaagtacgtgcccagcgtggtttgtctgcagcaggtctgtcatcagatcggcgacatgggcttcgaggcctccatcgccgaagggaaggcggcatcctggcctagcaggtccttgccagcacaggaggcagttgtcaagctccgcgtcgagggaatgacctgccagtcgtgcgtctcgtctatcgaaggaaaggtgcgtaagctgcaaggcgtggtccgcgtgaaggttagcctgagcaatcaagaggctgtcatcacctaccaaccgtacttgatccagcccgaggacctccgtgatcatgttaatgacatgggcttcgaagccgctattaagtccaaggttgctcccctctcgttgggtccgattgacatcgagcgcctgcaatccacgaaccccaaacgtcccctgagcagtgcaaaccagaacttcaataactctgaaaccttgggccatcagggcagtcacgtggtcacattgcagttacgcatcgacggaatgcattgcaagtcctgcgtcctcaacatcgaggagaacatcggccagttgcttggcgtgcagtctatacaggtttctctagagaacaagactgcccaggtaaagtacgacccttcctgcacaagcccggtagctctgcagcgcgcgatcgaggcccttcccccaggcaacttcaaggtctctctgcctgatggcgcagagggtagcggcaccgaccaccgctccagctcctctcactcgcccggaagtcctccccgtaaccaggtccaggggacgtgcagcacaactcttattgcgattgctggcatgacttgcgcgtcctgcgtgcactcgattgaaggtatgatttcgcagctggagggcgtccagcagatcagcgtctccctcgctgagggcacggccactgtgctgtacaacccgtctgttatctcccccgaagagctgcgtgcggcgatcgaagatatgggtttcgaagcctcggtcgtgtcggagtcctgctccacgaaccccctggggaaccactccgccggaaactccatggtgcagactacggacggaactcctacctccgtgcaggaagtcgcaccacataccggccgtttaccggcaaaccacgctccggacatcctcgctaagtctccccaatccacccgcgcagtcgcccctcaaaagtgcttcttgcagatcaagggcatgacctgtgctagttgcgtttcaaacatagagcgtaaccttcagaaggaggccggtgttctgtcggtgctggttgcgctcatggccggcaaggctgagatcaagtatgacccagaagttatccaacccctagaaatcgcacagtttattcaggatctgggattcgaggccgcagttatggaggactacgctggctctgacggaaacatcgaactcacaattacgggaatgacgtgcgcatcgtgcgttcacaacatcgagtccaagcttacccgcaccaatggcatcacctatgccagcgtcgcgttggccacttctaaggctctcgtcaagtttgaccccgagattatcggcccacgtgatattatcaagatcatcgaagagatcggcttccacgcttcgctcgcgcagaggaaccccaatgctcaccaccttgaccataaaatggagattaaacagtggaaaaagagcttcttgtgctccctggtcttcggtattcccgttatggcgctgatgatctacatgttgattccgtctaacgaacctcatcagtccatggtcctcgatcacaacatcattcccggcctctcgattctcaacttgattttcttcattctctgtaccttcgttcagcttttgggcggctggtatttctacgtccaggcctacaagtccttgcggcaccgttcagcaaacatggacgtcctcattgtcctggcaacctccatcgcttacgtctactctctcgtcatccttgtggttgcggtcgcagagaaggctgagcgctcccccgttacattcttcgataccccccccatgctgttcgtgttcatcgctctcgggcgttggttggagcatctggccaaatccaaaactagcgaagctctagcgaagttgatgagcctgcaggccaccgaggctactgtggttacgctgggagaagataacctgattattcgcgaggaacaggtcccgatggagctcgtccaacgcggagacatcgtcaaggtcgtccccggtggcaaattccctgtggatggcaaagtgttggaaggaaacacaatggccgatgagtccctcatcacgggggaggcgatgcccgttactaagaagcccggctctacagttatcgctggcagtatcaatgcgcacgggtcggtcctgatcaaggccacacatgtcggtaacgacaccaccctcgcccagatcgtaaagctggttgaagaggcccagatgtcaaaggcccccatccaacagttggctgatagattttccggctactttgtcccatttatcattatcatgagtaccctgacactagttgtttggattgtgatcgggttcatcgatttcggagttgttcagcgttattttcccaaccccaacaagcatatctcgcaaaccgaagtgattatccgtttcgctttccagacttcaattacggtcctgtgtatcgcctgtccctgttccctaggcctcgccactcctacagccgtcatggtcggcaccggtgtggccgcccagaacggtatactcatcaagggcggtaagccgctggagatggcccacaagatcaagacggtgatgttcgataagaccgggaccattacccacggtgttccgcgagttatgcgtgtgctgttgctgggtgacgtcgcgaccctccctctccgcaaggtgttagcagtcgtgggtacagccgaagcctcctccgagcatcccctaggcgtcgccgttaccaagtactgtaaggaggaattgggaaccgagactttgggctactgcacagacttccaagctgtaccaggctgtggcatcgggtgcaaggtatcgaacgtcgaaggcatcttggctcatagtgaacggcccctaagcgcccctgcatcgcacctaaacgaggccggcagcctccccgctgagaaggacgccgtccctcagacattttcggttctcatcggaaacagagaatggctccggaggaacggcttgacaatatctagtgacgtctccgacgcgatgaccgatcatgaaatgaagggccagactgcaattctcgttgcgattgatggggtcctttgcggcatgattgccatcgctgacgctgtgaagcaggaggcagctctggcggtccataccctgcagtccatgggcgtcgatgtcgtgttgatcacgggtgataaccgcaagaccgcccgagctattgctactcaggttggtatcaataaggtcttcgccgaggttcttccgtcgcacaaggttgccaaagtccaggagttgcagaacaagggcaagaaggtcgccatggttggcgatggcgtgaacgattctccggcgctagcacaggctgatatgggtgttgccattggtaccggaactgacgtggctattgaggccgctgacgtcgttttgatccgtaacgacctgctagatgtcgtagccagtattcacctgagcaaacgaaccgtccggcgtatccgtatcaacttggtgcttgccctgatctacaacctggtcgggattcccatcgccgcgggagtgtttatgccaataggaatcgtgttgcagccgtggatgggatccgcagcgatggctgcctcatctgtgtccgtggtgctgtccagcctgcagctcaagtgctacaagaagcctgatctcgagagatacgaggcccaggcccacggccatatgaagccccttacggcctcccaggtcagtgtccacattggtatggacgaccgctggagggattctccgcgggcaaccccctgggatcaggtctcgtacgtctctcaggtctccctctcctcgttgacaagtgataagccctcccggcattcggcggccgctgatgacgatggtgacaagtggagtctcctcctcaacggtcgagatgaggagcagtacatt

SEQ ID NO: 280146 - DNA, 4395 bp, Artificial Sequence
  derived and/or modified sequence
atgcccgaacaggagcgtcaaatcacggcgagagagggggcgtccaggaaaatcctgtcaaaactctcccttccaacccgcgcatgggaaccggcgatgaagaagtcatttgcctttgataatgtcggctacgaaggtggcctggacggacttgggccctcatcgcaggtcgcgacgtcaaccgtgaggattctcggtatgacgtgccaatcttgcgtcaagagcattgaggaccggatctcgaacctcaagggaatcattagcatgaaagtttcgcttgaacagggttccgccactgtgaagtacgtgcctagcgttgtgtgcctgcagcaggtgtgtcaccaaattggagatatgggttttgaagcctccatagcggaaggaaaggccgcctcgtggcctagccgatcactcccagcacaagaagctgtggttaagctgagagtggaggggatgacgtgtcaatcgtgtgtcagctcgattgagggcaaagttagaaagctccaaggggtggtgagagtcaaggtgtccctgtctaaccaggaggctgttatcacttatcaaccttacctgatacaaccggaggatctgcgtgatcatgtcaacgacatggggttcgaagcggcaattaagagcaaggtggcaccgttgtctttggggccaattgacatcgaaagactgcagtcaactaaccccaagcgaccactctccagcgcaaatcaaaactttaacaattccgagactcttggccatcaagggtcccacgtggtgacccttcagcttagaattgacggaatgcattgcaaatcgtgtgttctcaacattgaggagaatataggacaactccttggtgtgcagtcgattcaagtgtctctggaaaacaagaccgcgcaagtgaagtatgatccatcctgtacgtccccagtcgcacttcaaagagcgatcgaagcacttcctcccggcaactttaaggtgtccttgcctgatggagccgaagggtccggaactgatcatcgaagctcaagctcgcatagcccgggatcccctcctcgcaatcaggtccagggtacttgttcgactaccctgatcgcaatcgccggtatgacctgtgcgtcctgtgtgcactcgatcgaaggaatgattagccagctggaaggcgtgcagcagatttcagtgtcccttgccgaaggtactgcgactgtcttgtacaacccatcggtgatttcgcccgaggagcttagagcagcgatcgaagatatgggcttcgaagcgagcgtggtgtcggaaagctgctcaaccaatcctctgggaaaccactcggccggaaattcaatggtgcaaaccactgatggaactcctacctcagtccaagaagtggcaccgcacaccggacggctgcccgcaaaccacgcccctgatattcttgcgaaatcgccacaatcgactagagctgtcgccccacagaagtgctttctgcagataaaaggcatgacctgcgctagctgcgtgtccaacattgaaaggaacttgcaaaaagaagcgggggtgctgtcagtccttgtggcgctgatggcgggaaaagccgaaatcaagtacgatcctgaggttattcaaccccttgaaatcgcccagttcatacaggatctgggatttgaggcagcagtgatggaggattacgccggatcggacggaaacatcgagcttaccatcaccgggatgacttgcgcaagctgtgtgcacaatatcgaatctaaactcactcggaccaatgggataacgtatgcatccgtcgcactcgcaacctccaaagcattggtgaagtttgatcctgagataattggacccagagatatcattaagattattgaagagataggatttcatgcatcgctcgcacagcgtaatcccaacgcccatcaccttgatcataagatggaaatcaaacaatggaaaaagtcgtttctgtgttcgcttgtctttggcattccggtcatggctctcatgatttacatgctcataccttccaacgaaccgcaccaatcgatggtcctggaccataacattatccctggactgtcgattcttaacttgatcttcttcatcctttgcacttttgtgcaactgctcggtggatggtacttctacgtgcaagcatacaagtccctgcgccaccggagcgcaaatatggacgtcctcattgtgctcgccacctccattgcatacgtctactccctggtgattctggttgtcgctgtggctgaaaaagcagagcgcagcccagtgactttcttcgataccccacctatgctgtttgtgttcatagcccttgggaggtggcttgaacatctggcaaagagcaagaccagcgaagcacttgccaagttgatgtcacttcaggcaaccgaggcaactgtggttactcttggagaggacaaccttatcattagagaggaacaagtgccaatggaacttgtgcagcgcggtgacattgtcaaggtggtccctggtgggaagtttcctgttgatggcaaggttctggagggaaatactatggctgatgaatcactgattaccggcgaagctatgcctgtcactaagaaaccaggttccaccgtgattgcaggttcaatcaacgctcatggaagcgtgctcattaaagcaacccacgtcgggaacgacactacccttgcacaaatagtgaaacttgtggaggaggctcaaatgtcaaaagcacccattcaacagctcgccgatcggttttcgggttactttgtgcccttcatcataatcatgtctacgctgactctggtggtgtggattgtgatcggctttatagatttcggagtggtgcagagatacttccctaatcctaataagcacatctcgcagaccgaggtcattatcaggtttgcattccaaacctcgattactgtgctttgcatagcgtgtccgtgtagcctcggactcgcaacgccgactgcggtcatggtgggtacgggcgtcgcagcccaaaacggaattctgattaagggtgggaagccactcgaaatggcacataagataaagactgtgatgtttgacaagactggaacgattacgcatggggtgcctagggtcatgagggtcctgctcttgggagacgtcgccactctgccacttcggaaagtgctggccgtggtcggaaccgcggaagcatcgagcgaacatccattgggtgtggctgtgaccaaatactgtaaagaagaactcgggactgaaactcttggatactgtaccgattttcaagccgtcccaggctgtgggatcggttgtaaggtgtccaatgtggaaggtatcctcgcacattcggagcggcccctttcggcacccgcatcacaccttaacgaagccgggagcttgcctgctgaaaaggacgcagtgccacagactttttcggtcttgataggtaaccgagaatggcttcgccgtaatggtctgaccattagctccgatgtgtcggatgcaatgaccgaccatgagatgaagggccaaaccgccattctcgttgcgattgacggagtgctgtgtggcatgattgcgattgcagacgcagtcaaacaggaggcagcgcttgccgtccatactctgcaatctatgggagtggatgtggtgcttatcaccggagacaacagaaagactgcacgagcaatcgcaactcaggtggggatcaataaggtctttgcagaggtgctgccatcacacaaggtggctaaggtgcaggagcttcaaaacaagggtaagaaggtggcaatggtgggtgatggagtgaatgacagcccggcactggcccaagcggatatgggggtggcgattgggacgggtaccgatgtcgctattgaagctgcggatgtcgtgctgatcagaaatgatcttcttgatgtcgtggcatcgatccacctgagcaagcgaactgtgaggagaattcgcattaaccttgtccttgcactgatctacaacctggtcggcatcccaatcgctgccggcgtgtttatgcctattggcatcgttcttcagccctggatgggatcggcagcaatggctgcatcatccgtctcggtggttttgtcaagcctgcaactcaaatgttacaagaaaccggatctggaacgttacgaagcgcaggcccacggtcacatgaagcctcttactgcgtcacaggtttccgtgcatatcggtatggatgaccggtggagggacagcccacgggcgactccgtgggaccaggtgagctacgtgtcgcaggtgtccctctcgtcactgacgtccgataagcctagccgccattcagcggcagcagatgatgacggagataaatggagcctgctgcttaacggaagagacgaagaacaatacatt

SEQ ID NO: 280147 - DNA, 4395 bp, Artificial Sequence
  derived and/or modified sequence
atgccagagcaagagcggcagatcactgcccgcgaaggggccagccgcaagatcctgagcaagctctcgttgcctacccgggcctgggaaccagctatgaagaaatcgttcgcgtttgacaatgtgggatatgagggaggccttgacggcttgggcccatcgtcccaagtggccacgtcgactgtgagaatcctgggaatgacctgccagagctgtgtgaaatcgatcgaagatcggatttcaaacctcaagggaatcatctccatgaaagtctcgctcgaacaaggatcagccacggtgaagtacgttccgtcggtggtgtgtctgcagcaagtttgccatcagatcggcgacatgggatttgaggcaagcatcgcggaaggaaaggccgcttcgtggccatccaggtcgctgccggcgcaagaagcggtggtcaagctgcgcgtcgaaggcatgacctgtcagtcatgcgtcagctcaatcgagggaaaggtgcggaagctgcaaggagtggttcgcgtgaaggtgtcgctgagcaatcaagaggccgttattacttaccaaccttacctgatccagccagaggacctccgcgatcacgtgaacgatatgggatttgaagccgcgatcaaatccaaggtggccccgctttccctcggcccgatcgacatcgagaggcttcagagcacgaacccgaaacggccgttgtcgtcagcgaaccagaacttcaacaattcggagactctgggccatcagggatcccatgtcgttaccttgcaactcaggattgacggaatgcattgtaaatcctgcgttctgaacatcgaggagaacatcggccagctcctcggggtgcagagcatccaagtctccctggaaaacaagactgctcaggtcaagtacgaccccagctgcactagccctgtggcgctccagcgcgccatcgaagcgttgcctcctggaaatttcaaggtgtccctgccggatggagcggaaggaagcggaactgatcatcggagttcgagcagccattcgccaggctccccgccaagaaaccaggtgcaggggacttgctcaaccaccctgatcgcgatcgcagggatgacttgcgcgagctgtgtgcatagcatcgaaggaatgatctcgcaactggaaggtgtgcagcaaatttcggtgtcgctggcggagggcaccgcgactgtactgtacaacccaagcgtaatcagcccggaggaactgcgcgcggccatcgaagatatgggcttcgaagctagcgtggtgtcggaatcgtgctccaccaatccgctgggaaaccacagcgccggcaactccatggtccagaccaccgatgggactccaaccagcgtgcaggaagtggccccgcacaccggccgcctgccagccaatcacgctccggatattcttgccaagtcgccgcagtcgacccgggcagtggcgcctcaaaagtgcttcctgcagattaaggggatgacctgcgcatcctgcgtgagcaatatcgaacggaacctgcagaaagaggccggcgtgctgtcagtgctcgtggcgctgatggcaggcaaggcagaaatcaagtacgatcccgaagtgattcagccgctggaaatcgcgcagttcatccaggatctggggtttgaagctgctgtgatggaagattacgccgggtccgatggaaatatcgaactgactatcactggaatgacgtgcgcctcatgcgtgcacaacatcgaatccaagctgactagaaccaatggaatcacctacgcctcggtcgcccttgccacttccaaggctctggtcaagttcgatccagaaatcatcggaccaagggacattatcaagatcatcgaagagatcggattccatgctagcctggcgcaacggaacccgaacgcccaccacctggaccacaaaatggaaatcaaacaatggaagaagtccttcctgtgtagcctggtctttggtatcccggtgatggccctgatgatttacatgctcatcccttcgaacgagccgcatcaaagcatggtcctcgaccataacatcatccctggccttagcatcctgaatctgatcttcttcatcttgtgcaccttcgtacagcttctcgggggctggtacttctacgtgcaggcgtacaaatccctcagacaccggtccgcgaacatggacgtgctgatcgtgctcgcgacctcaatcgcttacgtttattcattggtcatcctggtcgtcgcggttgccgaaaaagccgagagatcaccagtgacgttctttgatacccctcccatgctcttcgtgttcatcgcactgggacgctggctggaacatcttgccaagagcaagacttccgaggcactggccaagctgatgtccctgcaggcaacggaagcgactgtcgtgactctcggggaagataatctgatcatccgcgaggaacaggtccctatggagttggtgcagcggggagacatcgttaaggttgtgcccggagggaagttcccagtggatggcaaggtcttggagggaaacactatggcagacgagtccctgattactggagaggcgatgccagtgactaagaagccaggctcaacggtgatcgccgggagcatcaatgcacacggcagcgtgctgattaaggccacccacgtgggaaacgatacgactctggcgcagatcgtcaagctggtcgaagaggcccagatgagcaaggcgccgattcagcagctcgctgaccgattttcaggatactttgtgcctttcatcatcataatgtctaccctgaccctcgtcgtgtggattgtgatcggattcatcgattttggagtggtccagagatacttccccaatcctaataagcatatcagccagactgaggtcatcatccggttcgctttccaaacttccatcacggtgctttgcatcgcgtgcccgtgctcactgggattggcgacccccactgccgtgatggtgggaaccggagttgccgcgcagaacggcatcctgatcaaagggggaaagcctctggaaatggctcacaagattaagactgtcatgttcgataaaactgggaccattactcatggtgtcccacgcgtcatgcgagtgcttctccttggagacgtcgctactctgcccctgcgcaaggtgctggcagttgtgggcaccgcggaggcctcgtctgaacacccgctcggagtggcagtcactaagtactgcaaggaggagcttggtactgaaaccctgggatactgcaccgatttccaggctgtgcccggctgtggaattggttgtaaagtctccaacgttgaagggattctggcacactcggagcggcctctcagcgctccagcatcacacctgaatgaagcaggatcactgccggctgagaaggacgccgtgccgcaaactttctccgtcctgatcggcaaccgagagtggctgcggcggaacgggttgaccatctcatccgatgtctcagatgccatgactgaccatgaaatgaaggggcagaccgccattttggtggccattgatggcgtcctttgcggcatgatcgctattgccgacgcggtcaagcaggaggctgctctggctgtgcacacgcttcagtccatgggagtggatgtggtgttgatcaccggagacaaccgcaagaccgccagagccatcgcgacccaggtgggaatcaacaaagtgttcgcggaagtcctgccgtcacataaggtggcgaaggtgcaggaattgcaaaacaagggtaagaaggtcgccatggtcggagatggagtcaatgacagccccgccctggcacaagctgacatgggcgtggccatcgggactggaactgacgtggcgattgaggccgccgatgtcgtgctgatccggaacgatctcctggacgtggtggcgtcgatccacttgtcgaagcgcactgtgcgccgcatccggatcaatttggtgcttgctctgatctacaatcttgtgggcatccctatcgccgcgggagtgttcatgccaatcggaatcgtcctccagccatggatgggatcggccgctatggctgcatccagcgtctcagttgtgcttagcagcctgcaactgaaatgctacaagaaaccggacctggagcgctacgaagcccaggcccatggacatatgaagccgttgactgcaagccaggtgtcggtgcacataggtatggacgatcgttggcgcgactcaccgcgggccaccccctgggatcaggtgtcgtacgtgtcgcaggtgtcgctgtcatccctcacttccgacaagccttcacggcattcagcagcggccgatgatgatggtgacaagtggtcgctgctcctgaacggacgggacgaggagcaatacatc

SEQ ID NO: 280148 - DNA, 4395 bp, Artificial Sequence
  derived and/or modified sequence
atgccagagcaagaacgccaaatcactgcgcgggaaggcgcctcgcggaaaatcctgtccaagctctcgctgccgacgcgcgcttgggagccggccatgaagaagtccttcgctttcgacaacgtgggctatgaagggggactggacggactgggcccgtcaagccaggtcgccacctcgactgtgcgaatccttggaatgacctgtcaaagctgcgtgaagtcgatcgaggatcgcatctccaacctcaagggaattatcagcatgaaagtgtcgcttgaacagggttccgccacggtcaaatacgtgccgagcgtcgtttgcctccagcaagtgtgccaccagattggtgacatgggctttgaggccagcatcgcggagggcaaggctgcctcctggccatcgcggtcactccctgcgcaggaagcggtggtcaaactgcgcgtcgagggcatgacctgtcagtcatgcgtgtcgtcgatcgaaggaaaggtccgcaaacttcagggggtggtgcgtgtgaaagtctcgctgagcaaccaagaggcggtgattacgtatcaaccttacctgatccagccggaagatttgcgcgaccacgtgaacgatatgggattcgaagcggccattaagtccaaggtggccccgctgtcgctcggaccaatcgacatcgagcgactgcagtcaaccaatcctaagcgccctcttagctctgccaatcagaatttcaacaatagtgaaaccctggggcaccaaggttcccatgtcgtcaccctccagcttcggatcgacggaatgcactgcaagtcgtgcgtgctgaacatcgaggagaatataggtcaacttctgggggtccagagtatccaggtgtccctggagaacaagaccgcccaggtgaagtacgacccgtcctgcacctcaccggttgccctgcagcgcgcaatcgaggcccttccaccgggaaatttcaaggttagcctgccggacggggcagaagggtccggtaccgatcaccggtcgagtagctcgcactccccgggctcgccgcctaggaaccaggtccaaggcacttgctctactacgctgatcgctattgcaggaatgacgtgcgccagctgtgtccactccatcgaaggcatgatcagccagctggaaggggtccaacagatctcagtatccctggcagaagggaccgccactgtgctctacaacccatcagtgatcagcccagaggaactgcgcgctgctatagaggacatgggtttcgaggcctcagtggtgtcggagtcatgcagcaccaatcctctcggtaaccactcagccggaaattccatggtgcaaactacggatggaactccgacctcagtgcaggaagttgccccacacactggacgcctgccagcaaaccacgccccagatatcctcgcaaagtctccgcagagcacccgggctgtggcaccacagaagtgtttccttcagatcaaaggcatgacctgcgcatcatgcgtgagcaacatcgaaaggaacctccagaaagaagcaggcgtgctgtccgtgctcgtcgcgctcatggccggaaaagccgagatcaagtacgatccggaggtgatccaaccactggagattgcccaattcatccaggatctcggtttcgaagctgccgtcatggaggactacgcaggtagtgacggcaacatcgaactgacgatcactggcatgacgtgcgcttcatgtgtgcacaatatcgaatccaagctgaccagaactaacgggatcacttacgcatccgtggctttggccacgagcaaggccctggtgaagttcgaccccgagatcatcggaccacgggacattatcaagatcatcgaagagattggcttccatgcaagcctggcgcagagaaatccgaacgcacaccatctggaccacaagatggagatcaaacaatggaagaaatcgtttctctgctcccttgtgtttggaatcccggtgatggcactcatgatctatatgctcataccgagtaatgaaccccaccaatcaatggtgctcgatcacaacatcatcccgggcctgtcgatcctcaatctgatcttcttcatcctttgcactttcgtgcaactgctgggtggttggtacttttacgtgcaggcctacaagtccctgcggcataggagcgccaacatggatgtgttgatcgtgctcgctacctccatcgcttatgtctactcgctggtgatcctcgtcgtggccgtcgcggagaaagctgaacgatccccagtcacttttttcgacactccacccatgctttttgtgtttatcgcactcggacgctggctggaacacctggcgaagtccaagacctcagaggccctcgctaagctcatgtccctgcaggcaactgaggcgactgtggtaactctgggagaggacaacctgatcatccgcgaagagcaagtccccatggagctggtgcagagaggggacattgtgaaggtggtcccgggaggaaagtttcctgtggatggaaaagtgctggagggcaacaccatggctgacgagtcgcttatcaccggagaggccatgccggtgactaagaaacctggttcgaccgttattgcgggatccatcaacgcccacgggtccgtcctcattaaggcgactcatgtaggaaatgatacgaccttggcacaaatcgtcaagctggtggaagaggcgcaaatgtcgaaggcgcccattcagcagttggcagaccggttttcgggctacttcgtcccgttcatcatcatcatgtccaccctcactcttgtggtgtggattgtcatcggattcatcgacttcggagtcgtacaaaggtacttcccaaacccaaacaagcatatctcacaaaccgaagtgattattcggttcgcattccaaacttctattacggttctgtgtatcgcttgcccctgttcgctgggactcgccactcctaccgctgtcatggtggggactggagtggctgctcaaaatggaatcctgatcaagggaggaaagccgttggaaatggctcataagatcaagactgtcatgttcgataaaaccggaaccattacccacggagtgcctcgggtcatgcgggtcctgctgttgggcgatgtggccactcttccgcttaggaaggtccttgccgtggtggggaccgctgaagcctcatcggagcacccccttggagtggcagtcaccaaatactgcaaagaagagctgggaaccgagactctgggatactgcaccgactttcaggccgtgcctggctgcggcattggatgtaaggtgagcaacgtcgaaggaatcctcgctcattcagaacgccctctctctgcgcccgcctcgcatttgaacgaagccggatcgctgccggccgaaaaggatgctgtgccacagaccttcagcgtgctgatcggcaaccgcgaatggctgcggagaaatggcctgactattagctccgatgtttcagatgctatgaccgaccacgagatgaagggccaaactgcgatactggtggctatcgacggtgtgctgtgcggaatgattgccatcgcggacgcggtgaagcaggaagcggcgctcgccgtccacaccctgcagtccatgggtgtggatgttgtcctgatcactggcgataataggaaaaccgcccgagccattgcaactcaggtcggaatcaataaggtgttcgctgaagtgctgccgtcacataaagtggccaaggtgcaggaattgcagaacaagggtaagaaggtggcaatggttggagacggggtgaacgactctcccgcgctcgcacaggcggacatgggagttgccatcgggaccggaactgacgttgccattgaagcggctgatgtggtgttgatcagaaatgaccttctggacgtggtggcaagtatccatctgtccaaacgtactgtgcgccgcatccggatcaacctggtcctcgccctgatctacaatctcgtgggaatcccaatcgcggcgggggtgttcatgccgatcgggatcgtgctgcagccatggatgggctcagcggccatggcggcgagctccgttagcgttgtgctttcgtcgctccagctgaagtgctacaagaagcccgatttggaaagatacgaagcccaggcccatggacatatgaaacctctgaccgctagccaagtctcagtccatatcggaatggatgaccggtggcgcgactcccctagagccaccccgtgggaccaggtgtcctacgtgtcgcaagtctccttgtcatcccttacctcggacaaaccgtcgcgtcacagtgctgccgctgacgatgatggagataaatggagcttgctgctcaacggacgcgacgaagaacagtacatc

SEQ ID NO: 280149 - DNA, 4395 bp, Artificial Sequence
  derived and/or modified sequence
atgcctgagcaggaacgtcagatcaccgccagggagggcgcttcacgcaaaatactgtctaaactgagcctccccactagggcttgggaaccagccatgaagaagagtttcgcatttgacaacgtcggttacgagggggggctggatggactaggacccagttctcaggtagccacaagcactgtacgaattttaggcatgacatgccaaagttgtgtgaaaagtattgaagacagaatcagtaacttgaaagggattattagcatgaaagttagtctcgaacaaggatcagccaccgtcaaatacgtgcctagtgtggtatgcctacagcaggtatgtcaccagatcggtgatatgggctttgaggcaagtatagctgagggtaaagccgcttcatggccctcaaggtcattgcctgctcaggaagctgtggtgaagttacgcgtcgagggaatgacttgccagagctgtgtcagttccatcgaaggaaaagtccggaaactccagggagtggtgcgcgtgaaggtgtccttatctaatcaagaagcagtcatcacctaccagccctatctgatccaaccagaggatctgcgtgatcatgtgaacgacatgggcttcgaggcagccatcaagtcaaaggtggccccactcagtcttggccctatagatatcgagcgactccagagtaccaacccaaagaggcccctgtcctccgcaaaccaaaactttaataactcagagacgttgggccaccaggggagccacgtcgtcacgttgcagcttaggatcgatgggatgcactgtaagtcgtgcgtgctgaatattgaagagaacattggacagcttctaggggttcagagcatccaagtgagtctggaaaacaaaacagcacaggtgaagtatgatccttcctgtacatcccccgtggcgctgcagagggctatagaggcccttcccccgggcaatttcaaggtcagcctgccagatggagccgaaggatctggaaccgatcacagaagttctagtagtcactctcccggatccccaccccgcaaccaggtccaaggaacttgctccaccactctgattgctattgctggtatgacctgcgcctcttgtgtgcacagcatcgagggtatgatttcacagctggaaggagtccagcagatatcagtgtccctggccgaagggaccgctaccgtattgtacaaccccagcgttatttcccctgaggagctccgagccgctattgaggatatgggcttcgaggctagcgtcgtgtcggagtcctgcagcacaaaccccttaggaaatcatagtgccggcaattctatggtgcaaacaaccgatggaacaccaacctccgtgcaagaagtcgcacctcacaccggccgcctccccgcaaaccacgctcctgatatcctggctaagtcgcctcagtctacacgtgcagtcgcaccacagaaatgctttctgcagatcaaggggatgacatgtgcgtcttgcgtcagcaacatcgagcgtaacctgcagaaagaggccggagtactcagtgtgttggtcgcactcatggcaggaaaggctgagatcaagtatgaccctgaggttattcaaccgttggaaatagctcagtttatccaggatttgggtttcgaagccgctgtaatggaggactatgctggaagtgacggtaacattgaactgacaatcacagggatgacctgtgcaagctgcgttcacaatatcgaaagcaaattgactcggaccaacggtataacctatgcttccgtcgctcttgccactagtaaagcactagttaagtttgaccctgagataatcggtccccgcgacatcataaagataatcgaggaaattggttttcacgcatctctggcccagagaaaccctaatgcccatcatttagaccataagatggagataaagcagtggaagaaatcgtttctatgctcactggtgttcggcatccctgtgatggccctgatgatttacatgctcatcccctctaacgagccacatcagtcaatggttctggatcacaatatcataccggggctgtctattctgaacttaatcttcttcattctgtgtacgtttgttcagctcctgggcggctggtacttttacgtgcaagcttacaaatctctcaggcaccgcagtgccaacatggacgtgctgatcgtgctggccaccagtatagcttacgtgtacagtttggtgattctggtagtggcagtggctgagaaggcggaaaggagtcctgtaaccttctttgatacacctcccatgttgttcgtctttatagctctgggccggtggttagaacacctggctaaaagcaagacctctgaggccctggcaaagctcatgagtctccaggctacagaagctaccgtcgttaccctcggagaggacaatctgatcatacgtgaagagcaagtgcccatggaactggtgcagaggggtgacatcgtgaaggtggtccctggcgggaagttcccggtggatggtaaggtcttagagggcaacacgatggcagatgagagcttgatcaccggggaggcgatgcctgtgactaagaaacctgggtccacggtgattgcaggtagcattaacgcccacggcagcgtcctgattaaggcaactcacgtaggcaacgataccacgctggcgcagatagtcaaactcgtggaggaggcccagatgagtaaagctcccatccagcagctggctgatcgcttctctggctacttcgtccctttcataatcatcatgtcaactctcaccctggtcgtgtggattgtcattggtttcattgactttggcgtcgtgcagagatatttccccaaccccaataaacatataagtcaaacagaggtgatcatacgtttcgcctttcagacaagcatcaccgtactatgcatcgcttgtccatgcagcctcggtctggcaacaccaaccgcagtgatggtcgggacaggagtggcagcccagaacggcattcttatcaagggcggtaaaccactcgaaatggcccacaaaattaagactgtgatgttcgacaaaacaggtaccattacacacggagtcccaagagttatgcgcgtgctgctgttaggcgatgtcgccacattgcctttacggaaagtacttgccgtggtgggcaccgcggaggctagtagtgagcatcctctaggagtggccgtgacgaaatactgtaaggaggaactcgggactgaaaccctgggttattgcacagacttccaggctgtgccggggtgcggcattggctgcaaggtgagtaacgtggagggaatactagctcactctgagagacctctcagtgctccagcctcacatcttaatgaggcgggcagcctgccagccgagaaggatgctgtgccacagacattcagtgtactcattggcaatcgggaatggctgagaaggaatggtttgactatctcctctgacgtgagtgatgcaatgaccgatcatgagatgaagggccagaccgctattctggtggcaatcgatggagtactgtgcggcatgatagcaatagctgatgccgtgaagcaggaagcggcactggccgttcataccctgcagagcatgggagtggacgtcgtgcttattaccggtgataataggaagacagctcgtgccatagccactcaagtaggcatcaataaagtgtttgcggaggttctcccctcccacaaggttgcgaaggttcaggaactgcaaaataagggaaagaaggtggccatggtcggagatggagtcaacgactcgccagccctggcccaggcagatatgggcgtagctatcggaaccgggactgatgtcgccattgaggccgccgacgtggtcctaatacggaatgacctgcttgatgtggtggcgtcaatccacctatcaaagcgcaccgtgcgcagaattcgaattaatttggtgttagcgctcatttacaacttagttggcatacccatagctgctggggtgttcatgcctatcggaatcgtgctgcagccatggatgggatctgcagccatggctgcctcgtctgtatctgtcgttctgtcaagcctccagctgaagtgttataagaagcctgacctagaaaggtacgaggctcaggctcatgggcacatgaagccgcttacagcctctcaggtctccgtccatattggaatggatgacagatggcgagacagtccccgagccaccccctgggatcaggtatcatacgtctcacaggtcagcctctcctctcttacctccgataagccgtctagacattcggccgcggccgacgatgatggagataagtggagcctgctactcaatggaagggatgaggagcaatatatc

SEQ ID NO: 280150 - DNA, 4395 bp, Artificial Sequence
  derived and/or modified sequence
atgccggagcaggaacggcaaattactgcccgcgagggcgcctcgaggaagatactgtccaaattgtccctacccacgagggcatgggaaccggccatgaaaaagagcttcgcatttgataatgtggggtacgagggagggttagatgggctcggaccctcttcccaggtagctacgagcaccgttaggatcctgggcatgacctgtcaatcctgtgtgaagagtattgaagacaggatcagtaatctgaaggggatcattagcatgaaagtgtctttggaacagggctccgcaaccgtgaagtacgtcccctcggtggtatgcctgcagcaggtgtgtcaccagattggtgacatggggttcgaagcctcaatcgctgaaggaaaggcagcatcatggccgtctaggtcccttccggcccaggaagccgttgtgaaactgcgggtcgagggtatgacttgtcagagctgcgtctcttccattgaaggtaaagtcagaaaattacagggcgtggtgcgcgtgaaagtatcgctctccaaccaggaggccgtcatcacctaccaaccatacctgatccagccagaggatctgcgggaccatgtgaatgacatgggtttcgaggccgccatcaaatctaaggtcgcccccttaagtctcggccctattgacattgaaagacttcagtctaccaacccgaagcgcccgctgagcagcgccaaccagaacttcaataactcagaaacactagggcatcagggctcacatgtcgtgaccttgcagctaaggattgatgggatgcattgcaaatcgtgtgtgcttaacattgaggagaacattgggcaactcttgggtgtgcagagcatacaagtgtcccttgaaaacaaaacagcccaggtgaaatacgatccaagctgcacaagtccggttgctcttcaacgggccattgaagctcttcctcctggtaactttaaagtgtcactgcctgatggcgccgaggggtctggcacagatcataggagtagtagctcacacagcccggggtctccgcctcggaaccaagtacaaggcacctgctccactaccctcatcgcaattgctggcatgacctgcgcttcatgcgtgcactctatagagggaatgatatcacagttggaaggcgtgcagcagatcagcgtatcactggcagaaggtactgcaactgtgttgtataatccctcagtgatctccccagaagagctccgggctgccatcgaagacatgggctttgaggcctcagtggtttctgaaagctgtagtactaacccactgggtaaccacagcgccggaaactcaatggtgcaaacgaccgacgggacgccaacctctgtgcaggaagtagcacctcatacggggcgcctcccggcgaaccacgctcccgacatcttagctaaatcaccccagtccacacgtgctgtagcaccccagaaatgtttccttcaaatcaagggtatgacctgtgccagctgtgtttctaacattgagagaaatctgcagaaggaggcgggtgtgctgtctgtcctagtggcgctcatggctggcaaggctgagataaaatatgaccccgaagtgatccagccgctcgagatcgctcagttcattcaggatctggggtttgaagctgccgtaatggaagattatgcaggcagcgacggcaatatcgaattgacaataaccggaatgacctgcgcaagctgcgtacataacattgaatccaaactgacccgaaccaatggcatcacatacgccagtgttgcgctggctacgtcaaaggcgttggttaagtttgatccagagataattggcccgagggacattattaagattatcgaggagattggatttcatgccagcctcgctcagagaaacccaaacgcacatcatctggatcacaaaatggagatcaagcagtggaaaaaaagtttcctctgttctctcgtgttcggaataccggtgatggctttaatgatctatatgttgatccctagcaatgaaccacatcaatccatggtgctggaccacaacatcatccccgggctcagcatcctaaacctcatattttttattttatgcacctttgtgcagctcctgggcggctggtatttttatgtgcaggcttataaatcacttaggcacaggtccgcaaatatggacgtcctcatcgtcctggcgacttccatcgcctatgtatacagcttagttatcctggttgttgctgtggctgagaaggctgagaggagcccggtgaccttcttcgacacaccaccaatgttgttcgtctttatcgctttaggccgctggctggagcatttagctaagtcaaagacctccgaggcccttgcgaaactcatgtccctccaggccacagaagccacggtggtgaccctgggggaggacaacttgatcatccgcgaggagcaggtgcccatggagctggtccagcggggcgacatagttaaagtggtgccaggaggtaaattccccgtggatgggaaagtgttagaagggaacactatggccgatgagagcttgatcactggtgaagccatgcctgtgacgaaaaaacccggcagcactgttatcgcggggagtataaatgcccacggtagcgttttaattaaagctacgcacgttggaaacgatactaccctggcccaaattgtgaaactcgtggaggaagctcaaatgagcaaagccccaatccaacaactggccgatcgattctcagggtacttcgtgccctttataataattatgtcgaccctgaccctggttgtttggatagttatcggttttattgatttcggcgtggttcagcgctacttccctaatcccaataagcatatctcacagaccgaggttatcatccgctttgcctttcagacatcaattactgttctgtgcattgcctgtccttgttctctgggccttgccactcccacagccgtaatggtcggaactggagtcgcagctcaaaatggaattttgataaagggcggtaaacctttagaaatggctcataagatcaagaccgtaatgtttgataagacaggcaccataactcatggagtccctcgcgtcatgcgggtgctgcttctgggcgacgtggcaaccttacccttgaggaaggtcctggccgtcgtcggcactgccgaggcctcatctgaacatcccttgggtgttgccgtcactaagtactgcaaagaggaacttggcaccgagaccctgggctactgtacagacttccaggccgtccctggctgtggtattggctgcaaagtctcaaatgtggaaggaatcctggcgcactctgaacgcccactctcagcgccagcgagccacctgaacgaagccggcagcctgcctgcagaaaaggacgcggtgccacagactttctccgttctcattggtaatcgagagtggctgcgcagaaacggtctgaccatatcgtctgacgtaagcgacgccatgaccgatcacgaaatgaaaggccaaactgcgattctggtcgcaattgatggagtattatgcggaatgatcgctattgctgatgcagtgaagcaggaggccgcgctggcagttcacacgttacagagcatgggcgtcgatgtggtcctgattaccggcgacaaccgtaagaccgctagagcgatagccactcaagttggcattaacaaggtttttgctgaggtgctgccctcgcacaaggtcgccaaggtacaggaactgcaaaacaagggcaaaaaagtcgccatggtgggggacggcgtgaacgacagccctgcactggcccaggctgacatgggagtggccattgggaccgggactgacgtcgctatcgaggccgccgatgtggtgctcatacgaaatgatcttcttgatgttgtggcctctatccatttaagcaaaagaaccgtgcgaaggattaggataaatctagtgcttgccctgatctataacttggtcggaattccgatcgccgctggggtattcatgccaattgggattgtactccagccatggatgggctccgcagccatggctgcttccagtgtgtctgtcgtgcttagttcgttacagctgaaatgctataaaaagcccgatctcgaacgttatgaggcccaagcacatggccatatgaagcccctcacggcaagtcaagtttctgtgcatatcggcatggacgatagatggcgggattcgcctcgcgccacgccatgggaccaggtgagctatgtgagccaggtgagcctaagtagtttgacgtctgacaagccctcacgtcactccgccgccgccgacgatgatggagacaagtggagtcttctcctcaacggacgggacgaggaacagtatatt

SEQ ID NO: 280151 - DNA, 4395 bp, Artificial Sequence
  derived and/or modified sequence
atgccggaacaggaacgtcaaattaccgcaagggagggagcgtctcgtaaaatcttaagtaaactttccttacctacaagagcgtgggaaccggccatgaagaaatcctttgcatttgacaatgttggatatgagggcgggctggatggtttgggcccttcatcgcaagtggcgacctcgaccgtacgaatcttgggtatgacttgccaatcctgcgtcaaatctattgaagacagaatttcaaatctcaaaggaattatttcaatgaaagtgagcctagagcaaggatctgcaacggtaaaatatgtcccgtcagtggtctgcttgcagcaagtgtgccaccaaatcggagatatgggattcgaggcttctatcgccgaaggaaaggctgcaagttggccctctaggtcacttccggcccaggaagcggtagtgaaactgcgtgttgaaggaatgacttgtcaatcatgcgtgtcaagcatcgaaggcaaagttaggaaacttcaaggtgttgtccgggttaaggttagtttgtccaaccaggaagctgttattacatatcaaccttatttgattcagccagaagatcttcgcgatcacgtgaacgacatgggatttgaagcggcgattaaatcaaaggtggctccacttagtttaggcccgatcgatattgaaagattacaatcaaccaaccccaaaagaccactgtcaagcgcgaatcaaaattttaataacagtgagaccctcggacatcagggtagtcacgtcgtaacgttgcaactgagaatcgatggcatgcattgcaaatcttgcgtgctgaacattgaggagaatatcggacagctcttaggagtacaaagtattcaagtctccttggagaacaaaaccgcacaagttaagtatgatccttcttgcacgtcaccggtcgccctgcaacgggcgattgaagccttacctccgggtaatttcaaagtctctttgcctgatggcgccgaaggtagtggcacggaccaccgaagctcaagttcacattctcccggctctcctccgcgcaaccaggttcagggcacgtgtagtactacccttattgccattgcaggaatgacctgtgcttcttgcgtacattcaatcgaagggatgatcagccagttagaaggggtacagcaaattagtgtctctctggccgaaggtacagcgacagttctttataacccctcggtaatttcaccggaagagctgcgggctgcaatagaagatatgggatttgaggcgtcggttgtgagcgaatcctgtagcaccaacccattgggtaaccactctgcgggcaattctatggtgcagacaacagatggcacgcccacgagcgtccaagaggtcgccccgcacacaggaagattaccggcaaatcacgccccagatattcttgcaaagtcgccgcaatcaacgcgtgcagttgccccgcagaaatgttttctccaaattaaaggaatgacttgtgcatcttgcgtttcaaacattgaacgtaacctgcaaaaagaagcaggtgtactgagtgtcttagttgcactgatggcgggcaaggccgaaattaagtacgaccctgaagtgattcagccgttagaaatcgctcagttcattcaagatcttggatttgaggctgcggtgatggaagattatgcaggttcagatggaaacatcgaattaacaatcacaggtatgacctgcgccagctgcgtacataatattgaatctaaactcacacggacgaacggcattacttatgcgagtgtagcattagcgacgtcgaaagcattggttaaattcgatcctgagatcattgggccacgagatataattaagattatcgaagaaatcgggtttcatgcgtccctcgctcagagaaacccgaacgctcaccaccttgaccataagatggaaattaaacaatggaaaaaaagttttctttgcagcctcgtgtttggcattccagtcatggcattgatgatttacatgctgatcccgtcaaatgaaccgcatcaatctatggtgctggatcataacataatcccgggtctgtcaattttgaaccttattttttttatattatgcacgttcgtccaacttcttggtgggtggtatttttacgtccaagcatataaatcacttaggcatcgctcggcgaacatggatgtattgatagtgctcgcaacgagcattgcatatgtatattcattagttattttggttgtagccgtcgcagagaaggctgaacgaagcccggttacgttcttcgatactcctccaatgttatttgtattcatcgccctgggacggtggttggaacacttagctaagagcaaaacgtcggaagcacttgcaaagttaatgagcctgcaagccacggaagcaacggtcgtgacacttggagaagataatctcattatacgtgaggagcaggttccgatggagcttgtacaacgtggggatattgtaaaagtagtgccgggcgggaaatttccggtcgatggaaaggtgcttgaaggtaatacgatggcagatgaatctcttatcactggcgaggcgatgcctgtaaccaagaaaccggggtcgactgtcattgcgggctccatcaacgcacatgggtcagttttgataaaggcgactcatgtcggtaatgacaccacattggctcaaattgtcaaacttgtggaagaagcccagatgtccaaagcaccgattcaacagctcgcagaccgtttttcgggttattttgtcccatttattatcattatgtctaccctgactctggtagtctggattgtaattggctttatcgattttggtgttgttcaacgttattttccgaatccgaataaacacatttcacaaacagaggttattattcgttttgcattccagactagcattactgtgctttgtattgcgtgcccctgttcacttggattagccacgccaacggcagttatggtaggcacaggagttgctgctcaaaacggtattctgataaaaggaggcaagccgcttgaaatggcccataaaattaaaacagtcatgtttgataaaacaggcacaattacacacggtgtgcctcgcgttatgagagttttgctgttaggagatgtggcgaccctgccgctgagaaaagtcttagcagttgttggaacagctgaagcttctagtgaacacccacttggagtcgcagttacgaaatattgcaaagaagaactgggaacggaaacgcttggatattgtaccgatttccaagcagtgccgggttgcggaattggctgcaaagtctcgaatgtcgaaggaatattggcgcatagtgaaagaccattatctgctccggcgtcacacctgaacgaagcaggtagtctgccggcagaaaaggacgcggtaccgcaaacattttctgttcttatcgggaatcgcgaatggttacgccgtaatggtttaacaataagcagtgatgtctccgatgcgatgacagatcatgagatgaaaggccaaacagccatcttagtagcgattgacggcgtactctgtggcatgattgcgatagctgatgctgtgaaacaagaggccgcattagcggttcatacattacaatccatgggagtggatgtggtcctgattacgggtgataatcgcaagaccgctcgggccattgcgacccaggtcggaattaacaaagtgtttgcagaagttctgccgtcacacaaagtggcgaaagtccaagaattacaaaataagggaaaaaaagtagccatggtcggcgacggggttaacgattctccggcgctcgctcaagctgatatgggtgtagcaattggaactggcaccgacgtagctattgaagcagccgatgtcgtacttatccgcaacgaccttctggatgttgtggcctcaatacatttgtcaaaaagaacagtccgcagaatacgaatcaatttggttctcgctctgatctataacctcgtgggcataccgatcgccgctggcgtttttatgccgatcggaatcgttttacagccttggatggggtccgcagcaatggctgcgtccagtgtgtcggttgttttatcaagtcttcaactgaaatgttataagaaacctgacttagagagatatgaggcgcaggcccatgggcatatgaaaccgctgacagcaagccaagtgtcggtccatattggcatggatgatcgttggcgcgattctccgagagctaccccctgggatcaggtaagttatgtatcacaggtctctctatctagcctgaccagcgataaacctagccgccattccgccgcggcagatgacgacggtgataagtggtcattactccttaatggcagagatgaggagcaatatatt

SEQ ID NO: 280152 - DNA, 4395 bp, Artificial Sequence
  derived and/or modified sequence
atgccagagcaagaaagacagatcaccgcccgtgagggagcttcacgaaaaatcttatcaaaattaagcctaccaacgcgcgcttgggagccagctatgaaaaaatcattcgcgttcgataatgttggatatgaaggaggtcttgacggtctcggaccctcctcccaggtggcaacctcgactgtgagaatcttaggaatgacttgtcaatcatgcgtaaaatccattgaagatcgtatatcgaatttaaaaggaattatcagcatgaaagtatctcttgagcaaggttcagcaacagtcaagtatgtcccatcagtcgtttgtctccaacaggtttgtcaccaaattggagatatggggttcgaggcctcaattgctgaaggaaaagcagcttcatggcccagtagatctctacccgcacaggaagctgtcgttaagcttcgcgtagaaggtatgacgtgccagtcctgcgtttcttcgatcgagggaaaggttcgcaagttacaaggtgtggtgcgagtgaaggtgtcactatcgaatcaggaagcagttatcacttatcaaccgtacctcatacaaccagaagacctacgtgaccatgtcaacgacatgggctttgaagctgctattaaatcaaaggtcgcgccgttgtcattgggcccaattgatatagaaagattgcagagtacaaatccaaaacgcccattgagtagtgcgaatcaaaatttcaacaactcagaaacattaggtcatcaaggctctcatgttgttactttacaactacgtatcgacggaatgcattgtaaatcgtgcgtgctgaacattgaggagaacatcgggcaattgctcggggtccagagtatccaagtcagtttggaaaacaaaacagcccaggtcaaatatgatccaagttgtacgtcacctgttgctctgcaaagagctattgaagcactgccaccaggaaatttcaaagttagccttcctgatggagctgaaggatcaggaacagaccatagatcttcgtcatcccactctccgggatcgccacctcgaaaccaagttcagggaacatgttctactactttgattgcgattgccgggatgacgtgcgcatcttgtgttcattcaattgagggtatgattagtcagctcgaaggagttcagcagattagtgtgtcgttggcagaaggaactgctactgtcttatacaatccatccgttatctccccagaggaattaagagccgctatagaagatatgggatttgaagccagtgttgtttcagaatcctgctcaacaaatccacttggaaatcacagcgctggtaattcaatggttcagacaactgatggaactccaacttccgtgcaagaagttgcgcctcatacaggacgtttacctgcgaatcatgctcctgacattttggctaaaagtcctcagtctactcgagctgtcgctcctcagaagtgcttcttgcagattaagggaatgacctgcgcatcatgcgtgtccaacattgagagaaatctgcaaaaggaagctggcgtgctttcggtgctggtggcgctgatggcgggtaaagcagagattaaatatgatcctgaagtcatccaaccactagaaattgctcaatttatacaagatcttgggtttgaggctgcggtgatggaggactatgctggatctgatggaaacatcgagcttacgatcacaggaatgacatgcgctagttgcgtacataacatcgaatcaaagctcacaagaactaatggtatcacatatgcttctgtggctctcgctacgtctaaagctcttgttaagttcgatccagagatcattggcccacgagatattatcaagatcattgaagaaattggctttcatgcatctctcgctcagagaaatccgaacgcacaccatctggatcataagatggagattaaacaatggaaaaagtcattcctttgtagtttggtattcggcattcccgtgatggctctcatgatttatatgctcattccaagcaacgaaccacatcagtctatggttctggatcataatataatcccaggactgtccatccttaatctgatctttttcattctatgtacgtttgttcaactactgggaggttggtacttttacgtgcaagcatataaatctttgcggcaccgttcagcgaatatggatgttcttatcgtgcttgcaacttcaatcgcttatgtttactcgttagttattttggtagtcgcagtagcggagaaggctgaacgcagcccagtaacttttttcgacaccccgccaatgctttttgtttttattgcgttgggacggtggcttgagcacttggctaagagtaaaacatccgaagcacttgccaaattgatgagtcttcaagcaacagaagccacagtggtgactctcggtgaagataatctaattattagagaggagcaagtgcctatggaattggttcagagaggagacatcgtgaaggtagtcccaggaggaaagttcccagttgacggcaaggtgctcgagggaaacacaatggccgatgagtcgcttatcacgggagaggctatgcccgttacgaaaaaaccgggctccacagttattgcgggatcaataaatgcccatggaagcgtattgattaaagcaactcatgtggggaatgacactacgcttgctcaaattgtaaaattagttgaagaagctcagatgtcaaaagctcccattcagcagctcgccgaccgattcagcggctatttcgtcccttttatcatcataatgagcactttgacacttgtagtatggatagtgattggcttcatagatttcggcgtggtgcaacgatatttcccaaatcccaataaacatatttcacagacagaggtaatcattagattcgctttccaaacgtccattacagttctctgcatagcctgcccatgcagcttaggactcgcaactccaacagctgtcatggtgggaactggagtcgctgcacaaaatggaattttgattaagggaggaaagccactggaaatggcacacaagataaaaacggtgatgtttgataaaactggaaccattactcatggagttccacgagtgatgcgtgtactattgctgggagatgtcgcgactttgccacttcgaaaggtgttagcagtagttggaacagctgaagcctcatctgaacatcctcttggagttgctgttactaaatattgtaaggaggagttggggacagagacgctgggatattgtactgattttcaagctgtcccaggttgcggaattggatgtaaggttagcaatgtagaaggaattttggctcattctgaacggccactctcagctcctgcaagccaccttaatgaagccggatcactaccggctgaaaaagatgcagtacctcagacgttcagtgttctcataggtaacagggaatggctgcgacggaatggtttgaccatttcaagtgacgtctcagatgcaatgactgatcacgagatgaaaggtcaaacagctattctcgttgccatcgacggagtgttgtgtggtatgattgcaatcgctgatgccgttaagcaagaagctgcccttgctgttcacactcttcaaagcatgggagttgacgtagtgttgattactggagataatcgtaagactgctcgagcaatcgcaacacaagttggaattaataaggtcttcgctgaagttctaccctctcataaagtggcaaaagttcaagaattgcagaacaaaggaaaaaaagttgcaatggttggagatggagtgaatgattcaccggctctagctcaagccgacatgggagttgcaattgggacaggcaccgatgtagcgatcgaagccgcagatgttgtgttaatacgtaacgatctgctcgacgtcgtggcatcaattcatctctcaaagagaacagttcggcgcattcggatcaacttggtcctagctcttatttataacctggtaggaattccgatcgccgcgggagtttttatgcctataggcattgttctgcaaccttggatggggtcagccgctatggcagcatctagtgtgtctgtggtgttatcatcacttcaactgaaatgctacaagaagccagatctcgaacgttatgaagctcaggcacacggacatatgaaaccattgacagcttctcaagtgtcagttcatattggaatggatgatcgatggagggattcaccccgagccactccatgggaccaagtatcctatgtctcacaagttagtttgtcttcattgacatccgataaaccgtcgcgacactcggctgcagctgatgatgacggtgacaagtggtctctactactaaatggcagagatgaggagcaatacata

SEQ ID NO: 280153 - DNA, 4395 bp, Artificial Sequence
  derived and/or modified sequence
atgccggagcaagagcggcaaattaccgccagagaaggcgcatcgcgcaaaattctgtctaaactatctctcccaactagggcatgggaaccagctatgaagaagagcttcgctttcgataacgtgggatatgagggcgggctagacggtctagggccctcatcccaggtggccacgagcacggttcgaattcttggcatgacatgtcaaagttgtgtcaagtcgattgaagatcggatcagcaacctgaaggggataataagtatgaaagtgagccttgagcaaggctctgccacggtgaagtatgtaccttccgtagtgtgtttgcagcaagtgtgtcatcagatcggtgatatgggatttgaggcttctatcgccgagggtaaggccgctagctggccgtctaggtccttacctgcacaggaggccgtcgtcaagcttcgggtcgaaggaatgacctgtcagagttgcgtcagtagtatcgaggggaaggtgcgaaaactccaaggagtcgtgcgggttaaggtttctttaagcaatcaggaggctgtaatcacctaccaaccctatttaatccagcccgaagacctcagggatcacgtaaatgacatgggattcgaagccgccattaaaagtaaagtggcccccctctccctggggcctatagacattgagcgcctccagagcaccaaccctaaacgtcctctgagcagcgcaaaccaaaatttcaacaactcagagaccctaggccaccagggtagtcacgtggtaactctgcagctcagaattgacggcatgcattgcaagtcttgcgttttgaacatcgaggagaacattgggcagttgttaggcgtgcagtccatccaggtgtctttagaaaacaaaacagcacaggtgaaatacgatccaagctgcacttcccctgtggccctccagcgggctattgaagcactcccacccgggaatttcaaggtttcactgcccgatggagcagagggcagtggcactgatcacaggtctagctccagccactcccctggctctccaccacgaaatcaggtccagggcacatgctctaccactctgatcgcaatcgctggaatgacttgtgccagctgcgtgcattcaatcgagggaatgatcagtcagcttgagggcgtccaacagatatctgtctcgctggccgaagggaccgcaacggtactgtacaacccgtcagtcatcagccccgaagaattaagggctgctatagaagatatgggattcgaagcctcagtggtgtccgaaagttgcagcaccaaccctttaggaaaccactcagcggggaacagcatggtgcagacaactgatggcacacctacatccgtccaggaggtcgctccacacacaggtcggcttcccgctaaccatgcaccggacattcttgctaaatcacctcagtctactcgcgctgtggccccgcagaagtgctttttgcagatcaagggcatgacctgtgcgtcctgtgtttcaaatatagagagaaacctacagaaggaggccggcgtcttgtctgtgctggtggccctgatggcgggaaaagctgagatcaaatatgatcctgaggtaatacagcccctagaaattgcccaattcatccaggatctgggatttgaggcggccgttatggaggattacgcaggaagtgatgggaatatcgaattaactatcacgggaatgacctgtgctagctgcgtgcataatattgaatccaagctgacgcggaccaacggcatcacttacgctagtgttgcgctggctacgtcaaaagcactcgtgaagttcgaccctgagatcataggccctagggacattattaagatcatagaggaaattggtttccatgccagcttggcccagaggaatcccaatgcccaccacctagatcataaaatggagataaagcagtggaagaagagctttctgtgtagtctggtgttcgggatacccgtgatggcgctaatgatttatatgttgattcctagcaatgaaccacatcagtcaatggtgttggaccataacatcatcccagggctcagtattctgaacctgatattcttcattctctgtacatttgtgcagctgctgggaggatggtacttctatgttcaggcatataaatccttgcggcacagaagcgcaaacatggacgtcctgatcgtgttggccacgtcaattgcgtatgtatacagcctagtgattttggttgtggccgtagcagagaaggccgaacgatctccggtgaccttcttcgatacccctcccatgctgtttgtttttatagcactcgggcgatggttggagcacttggccaaaagcaaaaccagcgaggctttagccaaattaatgagtttacaggccaccgaagcgactgtggttactctgggggaggataacctgattattagggaggagcaggtcccaatggagctggtgcagaggggtgacattgttaaagtggtcccaggaggcaaattccctgtggatgggaaagttctggagggtaatacgatggccgacgagtctctcatcacgggggaggctatgcctgttacaaaaaagccaggaagcacggtcatcgcaggttccattaacgcacacgggagcgtcctgatcaaagccacacacgtgggaaatgatactacccttgctcagatcgtcaagctagtggaagaagcacagatgagtaaggccccgatccagcagctggccgaccgattcagtggttacttcgtcccatttatcattatcatgagcacacttactctggttgtttggattgttatcggatttattgactttggcgtagtccagaggtacttccccaatcctaataagcacataagccaaactgaggtgatcattcgtttcgccttccagacatccatcacagtcctctgtattgcttgcccatgtagtttgggccttgccacacctaccgcggttatggtgggaaccggagtggcagcccaaaatggcatcctaattaagggtggcaaacccctcgagatggctcacaagattaaaacagtaatgtttgacaaaaccggaaccattacacatggggttcctcgcgtgatgcgcgtcctgctcctgggtgatgtagcaactctgccccttcggaaagtgctggctgtggtgggaaccgctgaagcaagctcagagcacccactgggtgttgccgtgactaaatattgtaaggaagagttggggacggagacactgggctactgcaccgattttcaggcggtgccggggtgtggtatcggctgcaaagtgagtaatgtcgaggggattttagcccactctgagcggcccctcagcgctccagcgtcccacttgaatgaagctggatcattgccggcagaaaaggatgccgtgccgcagacatttagcgtacttatcggcaatcgcgaatggttgcgcagaaatggcctcactatctcttctgacgtatcggatgccatgacggatcatgaaatgaaaggtcagaccgctatcctagttgccatcgacggcgttctctgcgggatgattgcgattgccgatgctgtgaaacaggaggccgcccttgctgtacacacactccagtccatgggtgtggatgtcgtgctgattaccggtgataataggaaaaccgcccgcgctattgctacccaggtgggaatcaacaaagtgttcgcagaagtgcttccctctcacaaggtggccaaagtccaggaactgcagaacaagggtaaaaaggtcgccatggtgggtgatggcgtaaacgattcccccgccctagcacaggctgacatgggtgtcgctataggcaccggaaccgacgtggccatagaagctgctgatgtggtcttgatccggaacgatctcctggatgtggtcgcgtcgatccacctctccaaaaggactgttaggcggataaggatcaacctagtcctcgcgctaatctataacttggtcgggatcccaatcgcagccggcgtgttcatgccaataggcatcgttctccagccctggatgggcagtgcagctatggctgcaagttcagtgtcagtagtgctgagctccctacagctgaagtgctataaaaagcccgatctcgagaggtacgaagctcaagcccacggacatatgaaacccctcactgcctcacaagtctccgttcatattggcatggacgatcgttggagagacagtcctagagcaaccccctgggaccaggtctcgtacgtgtcgcaggtgagcctgtcatcacttacatcagataaaccctcgagacattcagctgcagctgacgacgatggagataagtggtccctgctcctgaatggtagagatgaagagcaatatatt

SEQ ID NO: 280154 - DNA, 4395 bp, Artificial Sequence
  derived and/or modified sequence
atgcccgagcaagagagacagatcactgcacgggagggagcatcccgcaaaatcttgtctaagctgtctctgccaacgagagcctgggagccagcaatgaagaagtcatttgccttcgacaacgttggttacgagggtggcctggatggcctcgggccctcctcccaagtggccactagcaccgtacggatcttgggtatgacctgccaatcatgcgtgaagagtatcgaggataggattagtaaccttaaaggtatcataagtatgaaggtcagcttggaacagggctccgctaccgtgaagtatgtacccagcgttgtttgtctgcagcaggtgtgccatcagattggtgatatgggtttcgaggcctccattgccgaggggaaggctgcatcttggccctcgagaagtttgcctgcccaagaagctgtcgtgaagctgagggtggagggaatgacgtgccagtcatgcgtcagcagcatcgaaggaaaggtacgaaagcttcagggcgtggtaagagtgaaggtaagcctgagtaatcaggaggccgtaataacctatcagccctacttaattcagccggaggacctgagggatcacgtaaacgatatgggctttgaagcagccatcaaatcgaaagtggctccattgtccctcgggccgattgacatcgaaagactgcagagcactaatcccaaacggccactcagctctgccaaccagaattttaacaattccgagactttaggccatcaagggtcccacgtcgtcacactgcagctcagaatagacggaatgcactgtaaatcttgcgtgttaaatattgaggagaatatcgggcaactcttgggagttcagagtatccaggtctctcttgagaacaagaccgcccaggtcaaatatgatccgtcttgtaccagccccgttgctctccagcgcgcaattgaggctttgccgcctggcaactttaaggtctcactccccgatggcgctgaggggtctggtactgaccacagaagtagtagctcccactccccgggaagccctccgcgcaaccaagtgcagggcacctgcagtactaccctgatcgctatcgcaggcatgacatgcgcgtcttgtgtgcactctatcgaaggaatgatctcacagctggaaggtgttcagcagatctcagtctctctggctgagggcactgccaccgtactctataatccaagcgtaatatctccagaggagctcagagccgcgatcgaggacatggggttcgaggccagcgtggtaagtgaatcctgttcaacaaacccgctcggaaatcactccgctggcaacagtatggtgcaaacaaccgatggtactcctacatctgttcaggaggtcgcgccacacaccggtagattgccagctaatcacgccccagatatcctcgcgaagtctccccaaagcactcgggctgttgcgcctcagaaatgttttctgcagatcaagggcatgacttgtgcctcttgcgtgagtaacattgaaaggaaccttcagaaggaggctggggtgttgagcgtcctggtcgctctgatggcgggaaaggctgaaatcaaatacgatccggaagtaatccagcccctggaaatagcgcagtttatccaagacctgggttttgaagcggcagttatggaggactacgccggcagcgatggcaatatcgagctgacaatcacgggaatgacatgcgcatcctgcgtccataacatcgaatcaaagctcacaagaaccaacggcataacatatgcgagcgttgcattggccacctccaaagctctggtgaagtttgaccccgagatcatcgggcctagagatataatcaaaattattgaggaaataggatttcatgcttccttggcccagcggaatcctaacgctcatcacctggaccacaagatggagattaaacagtggaagaaatcatttctctgcagtctggtgtttggcatccccgtgatggcactgatgatatatatgctaataccatccaatgaaccacatcagtccatggtactcgaccataacatcataccaggactctccatcttgaatctcatcttcttcattctctgtacttttgtgcaactacttggtgggtggtacttctacgtccaagcatataaatctcttcggcacagaagtgcgaacatggacgtgctgatcgtattagctacctcaattgcctacgtatactccctcgtcattctcgtggtcgccgtggcggaaaaagccgaaaggtccccagtaacctttttcgatacgccccctatgctgttcgtgttcattgctctcgggaggtggttagagcatctggctaaatctaagaccagcgaggccctggccaaactcatgtctctccaggctacggaggccactgtagtgacgctgggggaggacaatctgattattagggaggaacaggtgcctatggagctggtccaaaggggcgatatcgtgaaggtagtgcccggaggaaaattcccggttgatggtaaggtgctcgaagggaatactatggctgacgagagccttattaccggggaagccatgcctgttacaaagaagccaggtagcaccgtcatcgccggctcgattaacgcccacggctccgttctgataaaggcgacccacgtcggtaacgacaccacactggcacaaattgttaaacttgtggaagaggcccaaatgagtaaggcgcccatccagcagctggccgaccgctttagtggctacttcgtgccttttatcataattatgagtacactcacactggtggtgtggatcgtgatcggattcatcgattttggagtggtccaaagatacttcccgaacccaaacaaacacattagccagaccgaagtcattatacgatttgcgttccagactagtatcactgtgctctgcatagcgtgtccctgttcccttggactggctactcccaccgctgtgatggtgggaacaggggtggctgcccagaacggaatcctaatcaaggggggcaagcccttggaaatggcccacaaaataaagaccgtaatgtttgataaaactgggactataacccacggagtgccgcgggtcatgcgagtcctgttactgggggatgtcgccacactacccttgcgaaaggtgctggctgtggtgggcacagctgaggcaagcagcgagcaccctctgggggtggctgtaaccaaatactgtaaggaagaattgggaacggagaccctgggatattgcaccgattttcaagccgttccaggttgcggaatcggatgcaaggtgtccaatgttgagggcattctagctcattcagagcgacccctttcagctcccgcttctcatctaaacgaggccgggagcctcccggctgaaaaggatgcagtgcctcagaccttctcagtccttattggcaaccgcgaatggctcagacggaacggtcttacgatctcctcagatgtttctgatgcgatgacagaccacgagatgaaaggacagaccgcaatcttagtggccattgacggtgtgttatgcggcatgattgcgatcgccgacgccgtgaaacaggaagctgccttagctgtgcacacattgcagtctatgggagtggacgttgttctcataaccggggacaaccgcaagacagctcgcgcgatagctactcaggtcggcataaacaaagtgttcgcagaggttctccccagtcataaggtggctaaggttcaggagttgcaaaataagggcaagaaggtagctatggttggcgacggggttaatgactctccagctctggctcaggctgatatgggggtagcgatcggcacggggaccgacgtggcaattgaagccgctgacgttgtgcttatccgtaatgacctgctggacgtcgtcgcctcaatccatctgtcgaaaagaaccgtgcggaggattaggatcaatctggtgttagcgcttatctacaacctggtgggcatccccattgcagccggggtattcatgcctataggcatcgtgcttcagccctggatggggtccgctgccatggcagcgtcaagcgtctccgtggttctctcatctctgcagctcaagtgctacaagaagccagaccttgagcgctacgaagctcaagcccacggtcacatgaagcctttgaccgcaagccaagtgtccgtgcacattggcatggatgatcggtggcgggactcccctcgggccaccccttgggatcaggtgtcttatgtgagtcaggtttccctcagctccttaactagcgataagccttctagacacagtgcagctgctgacgacgacggggacaagtggagtctgctcctaaatggccgggacgaagagcaatatatt

SEQ ID NO: 280155 - DNA, 4395 bp, Artificial Sequence
  derived and/or modified sequence
atgcccgaacaagaacgccagattacggcgcgcgaaggagcatctcggaagattctttccaagctgagccttccaaccagggcatgggagccggctatgaagaagagcttcgccttcgataacgtgggctacgaaggtggtcttgatggactgggacccagctcgcaagtggcaacctccactgtgaggatactgggaatgacctgccagtcctgcgtgaagagcatagaggatagaatttcgaaccttaagggaatcatctcgatgaaggtgtcgctggaacagggatcagcaaccgtcaaatacgtgccctccgtcgtgtgcctgcaacaggtctgtcatcaaattggtgatatgggattcgaggcctcaatcgcagaaggaaaggccgcatcctggccgtcgcgttccctcccagcacaggaagcggtcgtgaaacttcgcgtggaaggtatgacgtgtcaatcctgcgtctcatccatcgaaggaaaggtgagaaaactgcagggagtggtgcgcgtgaaagtctcacttagcaatcaagaggccgtgattacctaccagccatatctgatccagcccgaagatttgagagatcatgtgaatgacatgggattcgaagcagccatcaaatccaaggtggcgccactcagcctcggtcctatcgacatcgaaagactgcaatcgaccaatccaaaaagaccactgtcatcggcaaaccagaactttaacaattcggaaaccttggggcaccaaggaagccacgtggtgacgttgcaacttcggatcgacggcatgcactgtaagtcatgcgttctgaacattgaggaaaacatcggacaattgcttggagtgcaatcgattcaggttagcttggagaataagactgcccaggtgaaatacgatccttcgtgtacctcccccgtggcactgcaacgtgcgattgaagcactgcctccgggaaactttaaagtctcgctgcctgacggggccgagggttccggcaccgatcataggtcctcctcctcacattcaccgggatcaccacctaggaaccaagtgcagggaacttgttcaacgacccttatagccatcgcaggaatgacttgcgcctcgtgtgtgcactctattgaaggtatgatttcgcaactggaaggggtgcagcagatctccgtgtccctcgccgagggcaccgctaccgtgctgtacaacccctcagttatctcgccagaagaactcagggccgcaattgaagatatgggatttgaagcaagcgtcgtctcagaatcgtgtagcactaatcctttgggcaaccactcggctggaaattcgatggtccaaactacggacggcactcctacttccgtgcaagaggtcgcaccgcatactggcagacttccagcaaaccatgcaccagatatcctcgcaaagagccctcagtctacccgtgcagtcgcacctcagaagtgttttctccaaatcaagggcatgacttgtgcatcctgcgtgtcaaatatcgaacgaaaccttcaaaaagaggcaggtgtcctgtcggtccttgtcgcacttatggctggtaaggctgagattaagtacgatccagaggttattcaacctttggagatagctcagtttatccaagaccttggattcgaagctgccgtgatggaagattatgcgggctcggacgggaatatagaacttactattactggtatgacttgtgcgagctgtgtccacaatattgaatctaaattgacgcggacgaacggtattacttatgcttcggtggctctggctaccagcaaagcgcttgtgaagttcgaccctgagatcatcggccctcgagacattatcaagatcatcgaagaaataggattccatgccagcctggcgcaaagaaatcccaacgcacaccatcttgaccataagatggagattaagcagtggaagaaatcgtttctttgtagcttggtgttcggaatcccagtgatggcacttatgatttacatgctgatcccttccaacgaacctcatcagtctatggtgttggatcacaacattattcctgggctgagcattctcaaccttatcttctttatcctctgcacctttgtgcagctcctcggaggttggtacttttacgtgcaagcctacaagtcattgcgtcatagatccgcaaatatggacgtgctgatagtgctggcgacctcgatcgcatacgtctactcgctggtcatactggtggtcgcggtggcagagaaggccgaaagaagcccagtcacttttttcgatactcccccaatgctctttgtgtttatcgccctcggaagatggcttgaacatctggcaaagtctaaaacctcagaagctcttgcaaagctgatgtcgcttcaggccactgaagcgactgtggtgacccttggggaggataacttgattattcgcgaagaacaagtgcctatggagcttgtgcaacgaggggatatcgtgaaagtcgtgccagggggcaagttccccgtggacggcaaggtccttgagggtaacacgatggcggatgagtcgcttattaccggcgaagcgatgccggtgactaaaaagccaggctccaccgtgattgctggttccataaatgcccacggatcagtcctcattaaagcgacccatgtcggaaatgacacgaccttggcacagattgtgaagctcgtggaagaggcccagatgtctaaagcgcccattcaacaacttgcggacagatttagcgggtactttgttccttttatcatcatcatgtccactctgacgctggttgtctggatagtgattggcttcatcgattttggtgtggtgcaacgatactttcctaaccccaacaaacatatctcgcaaaccgaggtgattattcggttcgcatttcagacctccatcaccgtcctgtgcattgcttgtccttgttcgctgggacttgctacgcctaccgccgtcatggtcggcaccggagtggcagcgcagaatggaatcctgattaagggagggaaaccgcttgaaatggcccataagattaagaccgtgatgttcgataagaccggaaccatcacccacggggtgcctagagttatgagggtgcttcttcttggagacgtggcaactcttccactgagaaaggttttggcagtggtgggtactgcagaagcgtcctccgaacatccacttggtgtggcagtgaccaaatactgtaaggaagaactgggtactgaaactctgggatactgtaccgacttccaagcggttccaggttgtggtattggatgcaaggtttctaacgttgaaggcattcttgcccattctgagcgaccgctgtcagccccagcctcacacctgaacgaagctggtagcctgccagcagagaaggatgcggtgcctcagacctttagcgtgctcatcggaaatcgggaatggcttaggagaaacggattgacgatttcgtccgatgtctccgatgcaatgaccgaccacgagatgaaagggcaaactgcaattctcgtggcaattgatggtgtgctgtgtggtatgattgcaatagcggacgccgtcaagcaggaggcagctctcgccgtccataccctgcaatcgatgggcgtggatgtggtgcttattactggggataacagaaaaaccgccagagcaattgctacgcaggtgggaatcaacaaggtgtttgcagaggttcttccatcccataaggtcgcaaaagtgcaagaactgcagaataagggaaaaaaggtggcaatggttggtgacggcgtgaacgattcacctgcactcgcacaagcggacatgggagttgcaataggaactggaaccgatgtcgcaattgaagcggcagacgtggttcttatcaggaatgatctccttgatgtggtcgcgtccattcatctttcgaagagaaccgtgcggcggattcgaatcaacctggtgctcgccttgatttacaacctcgtcggaattccaattgcagcaggagtctttatgccgataggaattgtgcttcagccctggatgggctcggcagcgatggcagctagctctgtgagcgtcgtcctttcctcactccagctcaagtgctacaagaagccagacttggagcgctacgaggcacaagcccacggtcacatgaagcctctgaccgcgtcccaggtgagcgtgcatatcgggatggacgatcggtggcgagattcccctagagcaactccctgggatcaagtcagctacgtgtcacaagtgagccttagcagccttacctcggataagccatcgcggcattccgcagcagcggatgatgatggtgacaaatggagcctgctcctgaacgggcgcgatgaggagcagtacatt

SEQ ID NO: 280156 - DNA, 4395 bp, Artificial Sequence
  derived and/or modified sequence
atgcctgagcaggaacggcagatcactgctagggaaggtgctagccggaagattctctccaaactgtcactcccaactagggcatgggagcctgcaatgaaaaagtcgtttgcttttgataacgtgggctacgaaggaggtcttgatggacttggtccttcatcacaagtggcgacttctaccgtgcgcattcttggtatgacttgccagtcctgtgtcaagtccatagaagatcggatttccaacctgaagggaatcatatcaatgaaggtatccctggagcagggatcggcaactgtgaagtacgtcccaagcgtggtgtgtttgcaacaggtgtgtcatcaaattggtgacatgggcttcgaggcatcaattgcagaggggaaggcagcttcatggcctagccgttcgctgccagcacaagaagcggtcgtgaagctgagggtggagggtatgacctgtcagtcgtgcgtctcctccattgaaggcaaggtgaggaagttgcaaggagtggtacgggtcaaggtgtcactttccaaccaagaagcagtgataacctaccaaccttacctgattcaacctgaagatttgcgcgatcatgtgaacgatatgggttttgaggcagcgatcaaatcaaaggttgctcctctgagcttggggcctatcgacatcgaacgccttcagtcaactaaccctaagcgccccctgtcctcagcaaaccagaatttcaacaattccgaaactcttggccatcaaggtagccatgtcgtgactctccagctgaggattgacggtatgcactgtaagtcctgtgtgctgaatattgaggaaaacatcggtcagttgttgggcgtgcaatcgattcaggtgtccctggagaataagacggcccaggtgaaatatgatcctagctgtactagcccggttgcacttcaaagggccattgaggcactcccgccaggaaactttaaagtgtcgctgcccgatggcgccgagggatcggggaccgatcatcgctcatcctcctcccacagcccagggtccccgccacgaaaccaggtgcagggaacctgtagcaccaccctcatcgctatcgcaggaatgacttgtgcatcgtgtgtgcactcgattgaagggatgatcagccagctggagggcgtccagcaaatttcagtgagccttgccgaaggtacggcaaccgtcctgtacaatccttcggtgatctccccagaagagttgcgcgcggcaattgaagatatggggttcgaggccagcgtggtgtccgaaagctgctccactaacccactcggcaaccattcagcaggaaactcgatggttcagacgactgatgggacccctacctcggtgcaagaagtggctcctcataccggtcggcttccggcaaatcacgctccagatatccttgcaaagtcccctcaaagcactagagcagtcgcgccccaaaagtgttttctgcagatcaaaggaatgacctgtgcatcgtgcgtgtcaaacattgagcggaacctgcaaaaggaggcaggtgtcctgtccgtgcttgtggccctgatggcaggaaaggcagagattaagtatgatccagaggtgattcagccgcttgaaatagcacaattcatccaggacctgggctttgaagcagcggtgatggaggattacgccggctccgatggaaacattgaactgactatcaccggaatgacgtgtgcatcctgtgtccataacatcgagtccaagctcactagaaccaatggaattacgtacgcatcggtggcccttgctacttcgaaggcacttgtaaagtttgatccggagattattggacctagagacatcattaagattattgaagaaataggatttcatgcaagccttgcacaacgtaatccaaacgcgcaccaccttgatcataagatggagattaagcagtggaagaaaagttttttgtgctccctggtctttggaattcctgtgatggcactgatgatctacatgcttattccttcaaacgaaccacaccaaagcatggtcctcgaccacaacataatacctggtctgtccattcttaacctgatcttctttattctctgtacctttgtgcaactgctgggaggatggtacttctacgtgcaggcgtacaaatccctgaggcatagatcagcaaatatggatgtccttattgtgctggcaacttcgattgcatacgtctactcgcttgtgatcctcgtggtggcagtggccgagaaggccgagagatccccagtcaccttttttgataccccgccgatgctgttcgtctttattgcactgggcagatggctggagcatctggcaaagagcaagacttcagaggcacttgcaaagctgatgtccctgcaagcgactgaggcgactgtggtcacgctcggagaggacaacttgattatacgcgaagagcaagtgccaatggaactggtgcagagaggcgacatcgttaaggttgtgccaggagggaagtttccagtggatggaaaggtgctcgaaggcaacactatggccgacgaatcgcttattactggagaagcaatgccagtgactaagaagcccggctcgaccgtcatcgcaggctcgattaacgcacatggatccgtgctgatcaaagcaactcatgtgggtaacgatactactctggcacaaatagtgaagctcgtggaagaagctcagatgtcaaaagcacctattcaacaacttgccgacagattctcgggttactttgtgccttttatcatcattatgtccaccctgacgctcgtggtctggatcgtcattggattcatcgatttcggcgtcgtgcagcgctactttcccaaccctaacaaacatatctcccaaactgaagtgatcattagatttgcctttcaaacctccattactgtcctgtgcatcgcgtgtccttgcagccttggactcgccactcctaccgcagtcatggtgggaaccggagtcgcagctcaaaacggtatccttatcaagggagggaagccactcgaaatggcacacaaaatcaagactgtgatgtttgataagactggcaccattactcatggggtgccccgcgtgatgcgggtgcttctccttggagatgtggctacccttcctctgcgcaaagtgcttgcagtggtcggaactgcggaggccagctccgagcacccactcggcgtggcagtgaccaagtactgtaaagaagagctcggtaccgaaaccctggggtactgtactgatttccaggcagtcccagggtgcggcattggatgcaaggtgtctaacgtggagggcatccttgcacactcagaacgccctctgtcagcaccagcttcccatctcaacgaagcaggctcacttcctgcagagaaggacgccgtgccgcaaaccttcagtgtccttatcggaaatagagaatggctgagacgcaacggacttaccatatcgtctgacgtgtccgacgcgatgacggaccatgagatgaaggggcagaccgcaatcctggtggcaattgatggcgtcctttgtggaatgattgcaatcgccgacgccgtcaaacaagaggcagcgcttgcagtgcacactctccagtccatgggagtggacgtcgtgttgattaccggcgacaaccggaaaacggctcgagcaattgcgactcaagtcggtattaacaaagtgttcgctgaagtcctcccatcacacaaggtggccaaggtgcaggagctgcagaataagggaaagaaggtcgccatggtgggagacggagtgaacgattcgcccgcactggcacaggcagacatgggagtcgcaataggtaccggaaccgacgttgctattgaagcagccgatgtggtcctcatccggaatgaccttctggatgtggtggcatctatccacctgtctaaacgcacggtcagaaggatcagaatcaaccttgtgctcgccttgatttacaacctcgtgggaatccctattgctgcaggtgtgttcatgcctattgggatcgttctgcagccatggatgggctcagcggcaatggcagccagtagcgtgtcagtggtgctttcgtcccttcaacttaagtgctacaaaaaacctgatctggaaagatacgaagcacaggcccatggtcatatgaaacctctcaccgcgtcgcaggtgtccgtccacattggcatggacgatcggtggagagattcaccacgagcgacgccttgggaccaagtctcatacgtgtcgcaagtctctctgagctcgttgacttcagacaagccttcacgtcactcggcagcagccgatgatgatggggataagtggtcgttgcttcttaacggaagagacgaagaacagtacatc

SEQ ID NO: 280157 - DNA, 4395 bp, Artificial Sequence
  derived and/or modified sequence
atgcctgagcaggagaggcagatcacggctcgcgagggtgcatcccgtaaaatcctatcaaagctgagcctgccgacacgcgcgtgggagcctgccatgaagaagagtttcgctttcgataatgtcggctacgagggtggccttgacggcctggggcctagctcacaggtggctacaagcaccgtaagaatcttaggtatgacgtgtcagagttgtgtgaagagcattgaggaccgcattagcaacctcaaggggatcatcagcatgaaggtgtccctggaacaggggtcagcaaccgtgaaatacgtccccagcgtggtgtgtttgcaacaggtgtgtcaccagataggcgacatgggcttcgaggcgtcgattgcagagggaaaagctgcgtcttggccaagtcggagcttgcccgctcaggaggctgtagtgaaactcagagtggaaggcatgacatgtcaatcttgcgtcagctccattgaaggaaaagttcggaagctgcagggggtggtgagagtcaaagtctccctttccaatcaggaggctgtcattacctaccagccttacctgattcagccagaagatctcagagaccatgtcaacgacatggggttcgaagccgccatcaagtcaaaggtcgcccctctcagtctaggacctatcgacatagaacgcctgcagtccacaaaccccaagaggcccctttcttccgcaaatcaaaacttcaataatagtgagaccttgggtcaccagggctcccatgtggtgactctgcaactccggatcgatggtatgcattgcaagtcatgtgtgcttaacattgaagaaaatataggacagctccttggggtgcagagcatccaggttagtttggaaaacaaaacagcccaggttaagtacgatccaagctgcacaagtccagtggcccttcagcgtgccattgaggctttgcccccagggaactttaaggtgtccctgcccgacggggctgagggctctgggacagaccataggtctagttcttcccacagccccggctctccccccaggaatcaggtccagggcacgtgtagcacgaccctcatcgctatcgccggaatgacctgtgcctcttgcgtccactcaatcgaaggcatgatcagccagcttgagggcgtgcaacagatcagcgtaagcctcgcagaagggaccgcaaccgtgctgtacaatccttcagttataagtcccgaggaactgagggccgcgattgaggatatgggttttgaggcttcagtggtgagcgagagctgctctactaaccccctgggcaaccattcagcaggcaattccatggtccaaactaccgatggtacccccacctctgttcaggaagtggccccgcacaccgggcgcctgccagccaaccatgcgccagacatccttgcaaagtcccctcagtcaacgcgcgccgtggcgccacagaaatgctttctgcagatcaaggggatgacttgcgcgtcctgtgtgtctaacattgaaagaaaccttcagaaagaggccggggttttaagcgtgctggtggcactgatggcaggcaaggccgaaattaagtatgaccccgaggtcatccagcctcttgagattgctcaattcatccaggacctgggcttcgaggcagccgttatggaggattatgctgggtctgatggcaacatcgaactgacaatcacaggtatgacttgtgcttcctgtgtgcataatatcgaaagtaaactgaccaggaccaatggtatcacctacgccagcgtggctctggcaacttccaaggctcttgtgaaatttgatccagagataatcggcccgcgcgacataatcaagatcatagaagagatcgggtttcacgcatctttagcacaaagaaatcccaacgcccaccacctggaccataagatggagatcaagcagtggaagaagtcctttctgtgcagtctggtcttcggcattcccgtcatggctctgatgatttacatgctgatcccttctaacgagcctcatcagagcatggtgctggatcataatatcataccagggctgtccatcctgaatcttatctttttcatcctgtgtacctttgttcagcttctgggaggatggtatttttatgtgcaagcttacaagagtctgaggcaccgatccgcaaatatggatgtcttgatcgtgctagctacgtctatcgcttacgtctattctctcgtaatcctggtagttgctgtggccgaaaaggcggaacgctcacccgtgaccttcttcgacacacccccaatgctttttgttttcatcgcactgggccgctggctcgagcacctggccaagtccaagacctctgaggctttggcgaagctcatgtctctgcaggccaccgaggccacagtcgttaccctgggtgaggacaatttgatcatccgagaggaacaagtccccatggagctcgtgcaaaggggcgacatcgtcaaagtggtgcctggtggtaaattcccagtggacggaaaggtgctggaaggaaacaccatggctgatgagagcctcattactggtgaagctatgcccgtgacaaagaagcctggctcaacggttatcgccggatccattaatgcccacggaagcgtcctgatcaaggctacccatgttggtaatgacaccacactggcccaaatcgtgaaactggtcgaagaagcacagatgtctaaggcacctatccagcaactggccgatcggttctccgggtatttcgtgcctttcataatcatcatgtctacgcttaccctagtcgtatggatcgtcatcggcttcatcgatttcggcgtagttcagcggtactttcctaacccaaataagcacatctcccaaacagaagtaataatcagattcgcatttcaaacctccattaccgttctgtgcatcgcttgcccatgttctttgggtctggcgacacctactgccgtgatggtcggaaccggcgtggcagctcagaacggcatcctgattaagggggggaagcccctggagatggcccataagataaaaacggtgatgtttgataaaacaggaaccatcacgcacggtgtcccacgtgtgatgcgcgtcctgctacttggtgacgtggccacacttccactccgaaaggttctggccgtggtagggaccgcggaagcttcaagcgaacaccctctcggtgtggccgtgacgaagtattgtaaggaggagctcggcactgagaccctggggtactgtactgacttccaggccgtgcctgggtgtggcataggatgcaaggtttccaatgtggaaggtatcttagcccacagtgaaagacctctctcagccccggcatcccatctgaacgaagcagggagtctcccagctgagaaggacgccgtgccacagacttttagtgtcttgatcggcaatcgtgaatggctcaggcggaacggcctgactatctcatccgacgtgagcgacgccatgactgaccacgaaatgaagggacagacggcgatcctggtcgctatcgatggcgtcctgtgcgggatgatcgccatagccgacgcggtgaaacaggaagctgctctagcggttcatacactgcagtcaatgggcgttgatgtagtactgatcacgggagataatcgcaagactgctcgagccatagccactcaggtcggcatcaacaaggtattcgcagaagtcttacccagccacaaggtggcgaaggtgcaggagcttcagaacaagggaaagaaagtggccatggttggagacggagtgaacgacagtcctgccctcgcccaggcagatatgggcgtcgccattggcaccgggacagacgtggccatcgaagctgcagacgtcgtcctgatcaggaatgatcttctggacgtggtggcatcaatccacctgtccaagcgtacggtccgacggattcgaatcaacttggttttggccctcatatataatttggtgggtatccctattgcagctggcgtgttcatgcccatcggtatcgtgctgcagccatggatgggatcagctgctatggccgcaagcagtgtgtcagtcgtcctgtcctctctgcaacttaaatgctacaagaagcccgatctggaaaggtatgaagcgcaggcacatggtcatatgaagcccttaaccgcgagtcaggttagtgtgcatatcggaatggacgatagatggcgggactctccccgtgcaaccccctgggaccaggtgtcatacgtgagccaggtgagcttgtctagcctgacctcagacaagcctagcaggcacagcgccgcagctgacgacgatggagacaaatggtctttgctcttgaacgggcgagacgaggagcagtacatc

SEQ ID NO: 280158 - DNA, 4395 bp, Artificial Sequence
  derived and/or modified sequence
atgcccgaacaggaacggcagattacagcaagagaaggagcctcaaggaagatactgtccaagctctccctgccaactagagcttgggagcctgccatgaagaagagctttgctttcgataacgttgggtacgaaggaggactggatggtctcggtccttctagtcaggtggcaacgagcactgtgcggatcctggggatgacgtgtcagagttgcgtaaagtcaatcgaggacaggatatccaacttgaaaggtattatctctatgaaggtctcacttgagcaagggtcagctaccgtcaagtatgtcccatccgttgtctgccttcagcaggtttgccaccagatcggagatatgggtttcgaggcatccattgctgaaggtaaggctgccagttggccctccagatccctcccagcacaagaggcagtggtcaagctgagagtggaggggatgacatgccaatcctgtgtctctagtattgaggggaaagtccggaagctccagggagttgtcagggtgaaggtgtccctgtctaaccaggaagcagtcatcacatatcagccttatctgatacagcctgaagatttgcgggatcatgtgaacgatatgggttttgaggccgcaattaagtctaaggtagctcccctgtcacttggccctatagatatcgaacgcctgcaatctaccaaccctaaacgacccctgtcctcagctaatcagaacttcaataacagtgagaccttgggtcaccagggttcccacgtggtgaccctgcagctgcgaatcgacggtatgcactgcaagagttgtgtgctgaacatcgaagagaatatcggccaactcctgggggtgcaatctatacaagttagcctcgagaacaagactgctcaggtcaagtatgacccgtcctgcacttcccccgtggctcttcagagagcaattgaagctctgccgcccggaaacttcaaagtttctctgcctgacggagcggaggggtccggtacagaccatcgcagttcatcttctcacagtccaggatcacccccgcgaaaccaggtgcaaggcacatgttccactaccttgattgctattgccgggatgacgtgtgcaagctgtgttcactctatcgagggcatgatctctcagttggagggtgtgcagcagatctccgtatccctggctgagggcacagccacggtgttgtacaatccctccgtgattagtccagaagaactgcgcgctgcgattgaggatatgggattcgaggcgagtgtggtgagcgaatcatgtagtacgaatcccctgggtaaccactctgcggggaattctatggtgcagaccaccgatggaacccctactagcgtccaggaggtggcacctcacacaggcagactgccggcgaatcacgcacccgatattctggctaagagtccgcagtctacaagagctgtagccccccagaaatgctttctgcaaatcaaaggaatgacttgtgccagctgcgtttccaatattgaacggaatttgcagaaggaagccggagttctctcagtgctggtcgcattgatggctggcaaggctgagatcaagtatgaccccgaggtgatccagccactcgaaatcgctcaatttatacaggaccttggatttgaggcggcagttatggaggactacgctggctcagacgggaacatcgagctgacaattacaggcatgacttgtgcctcctgtgtgcacaacatcgagagcaaacttactcgcactaatggaattacctatgcgagcgtggcacttgcaaccagtaaggccctggttaagttcgatcccgaaataatcgggcctcgggatattatcaaaatcattgaagagatcgggtttcatgcctcactggcacagaggaatcccaacgcccaccatctggaccacaagatggaaatcaaacaatggaaaaaatccttcttgtgctcacttgtgttcgggatccctgtgatggcattgatgatctatatgctgattccctccaatgagccccaccagtctatggtccttgaccacaacattattccgggtttgtctatcctcaatctgatcttcttcatcctctgcaccttcgtccaactgttgggaggatggtatttttatgtgcaggcttacaagagtctcagacacagatccgccaatatggacgtcttgatagtgttggccacaagtatagcctatgtgtactcactcgtcattctggttgtggcagtagcagagaaggccgagaggtccccagtcacgtttttcgatactcccccgatgctgtttgtgttcatagccttgggtagatggctggagcatttggctaagagcaagacgagcgaagccctggccaagctgatgagtctccaggctaccgaggcaactgttgtgactcttggagaagataatctgattattagggaagagcaggtgccaatggagttggtacagcgaggcgatatcgtcaaggtcgtacccggaggcaagttccccgtggacggtaaagtgctggaggggaatactatggccgacgagtctctgatcacgggggaagctatgcccgttacgaagaagccgggaagcactgtgatcgcaggctctattaacgcccatggttcagttctgattaaagccacacacgttgggaacgacaccacgcttgcccagatcgtcaaactcgtggaggaggcccagatgtcaaaagcccccattcagcagctggccgacaggttctccggatactttgtaccattcataatcataatgtctaccctgaccctggtcgtctggattgtcataggctttattgactttggcgtggtacagcgctactttcccaaccccaacaaacatatttcacagaccgaagtcataataaggtttgcattccagacatctatcaccgtgctgtgcattgcttgtccttgctcactgggcctggctaccccaactgcggtgatggtcggaacaggagtcgcggcacaaaacgggatcctgatcaagggaggcaaacccttggagatggcccataagatcaaaaccgttatgtttgataaaaccggtactattacccacggcgtaccacgggttatgagagttctgctgcttggggacgtggccaccctgcctcttcggaaggtgctggccgtcgtgggaaccgcggaagcttcctctgagcaccccctgggcgtcgccgtgacaaaatactgcaaagaagaactcggaacagagacactgggttattgcaccgacttccaggccgtgccgggctgcggaatcggctgtaaggtgtctaacgtggagggtattctcgcccatagtgagcggcctctctctgcgccagcgagtcatctgaatgaagctggtagccttccagccgaaaaagatgccgtgcctcagactttttcagtcctcatcggtaaccgagagtggctgaggagaaatggattgacgatctccagtgatgtttccgacgcaatgaccgaccacgagatgaagggacagaccgctatccttgtggcaatagatggtgtcctgtgcggaatgatagcaatcgcggatgccgtgaagcaggaggccgctctggccgtccacacgctgcagagcatgggagtagatgtagtgcttattaccggcgacaaccggaagaccgcacgcgcaatcgccacccaggtgggaattaataaggtgttcgcagaagtcctgccttctcacaaagtggcaaaggtacaggaacttcagaacaagggtaaaaaggtagcaatggtcggcgacggagtgaacgattcccctgctctggcacaggctgacatgggggtggcgatcggcactgggaccgacgtagcgatcgaggccgctgacgtcgtgttgatcagaaacgatcttctggatgtggtggcttccattcacctttctaagcggacagttcgccgcattcgaattaaccttgtgctcgccctgatctataacctggtcggaattccaattgccgctggtgtattcatgcctattggtatcgtactgcagccctggatgggatcagctgctatggccgctagttccgttagcgtggtcctgagcagcctccaattgaaatgctacaagaagccagacctggagcgatatgaagcacaggcccacggacatatgaagccacttacagcgtcacaggtgtccgtgcatatcggcatggacgacaggtggagagactcacctagagctacaccttgggatcaagtcagctatgtgtcccaggtcagtcttagcagccttacttctgacaaacccagtagacacagtgccgccgctgacgacgatggagacaaatggagtctgctcctcaatgggcgagacgaggagcagtacatt

SEQ ID NO: 280159 - DNA, 4395 bp, Artificial Sequence
  derived and/or modified sequence
atgccagagcaggagaggcagatcacagccagggagggcgcctcacggaaaattctcagcaagctctctctcccgacacgggcttgggagcctgcaatgaagaagagctttgcattcgataacgtgggatacgagggtggacttgatggcctagggcctagcagccaggtggccacatctaccgtgaggatcctggggatgacctgccagtcgtgtgtaaaatcaatagaggatcgaattagtaatctcaaagggattatatctatgaaagtgtccttggagcagggaagtgccacagttaagtatgtgccgtcagtggtgtgtttgcaacaggtgtgccatcaaattggtgacatgggcttcgaggcctcgattgccgaaggaaaggctgcctcctggccatccaggagcctgcctgctcaggaagccgtggtcaagctgcgtgtggagggcatgacatgccagtcctgtgtatcttctattgaaggcaaggtgaggaagctgcagggagtcgtaagggtaaaagtcagtttgtccaaccaggaggcagtgatcacttaccaaccgtacttgatccaacccgaggatctacgggatcacgtgaacgacatggggttcgaagccgccatcaagtctaaggtcgcacctctatccctcggacctatagacatcgaaagactgcagagtacgaaccccaagaggcctctgtctagtgcaaatcaaaattttaataactccgagacgctgggccatcagggatctcacgtggtaaccttgcagctacgaatagacggtatgcactgcaagtcctgcgtactgaatatcgaggagaacattgggcaattgctcggcgtccagtctattcaggtttccctcgagaacaagacggcccaagtgaaatacgatccctcatgtactagccctgttgccctacagcgggccatcgaggcgcttcctcccggcaacttcaaggtcagcctgccagatggtgcagaaggtagtgggacggatcatcggtcatcctcctctcactccccaggctcaccacctcgaaatcaggtacaggggacgtgtagcacgacacttatagccatagccgggatgacttgtgcttcatgcgtgcattccatcgaggggatgatcagtcaactggaaggcgtgcaacaaatctccgtctccctagctgaaggcacggcgacagtactgtataatcccagtgtaatctcaccagaagaactcagggctgctattgaagatatgggttttgaagcaagtgtggtgagcgaatcttgttctacaaacccgctcgggaatcatagcgctggcaatagtatggtccaaaccactgatggaacgccaaccagtgtgcaagaggtagccccgcacactggccgcctgcctgccaaccacgccccggatatattggcgaagagtccacagtccacgagggctgtggctccacagaaatgcttcttgcaaatcaagggaatgacctgtgcctcttgtgtgtctaatatcgaacggaacctccagaaagaagccggggtcctctccgtgcttgtagcactcatggccgggaaggcggaaataaagtacgaccccgaggtgatccagcccttggagatcgcacagttcatccaggatttaggatttgaagccgcagttatggaggattatgctggaagtgatggcaacattgaactcacaatcactgggatgacttgtgcctcatgcgtgcacaatattgaatccaaactgacgaggacaaacgggatcacctacgctagtgttgccttagcaacatctaaagcactcgttaaatttgacccagagataatcgggcctagggatataatcaagatcatcgaagagatcggcttccatgcgtctctagcccagcgcaatccaaatgctcaccatttagatcacaaaatggagatcaagcagtggaagaaaagcttcctgtgcagtcttgtatttggaatccccgtgatggccctcatgatatatatgctgatccctagcaatgagccacatcagagcatggtacttgatcacaatatcatccctggcctgtcaattctgaacttgatattttttatcttgtgcacatttgtgcagctactgggaggttggtacttttacgtgcaggcctataagtccctgcggcaccggagtgctaacatggacgttctgattgtactcgcgaccagtatcgcctacgtgtactcccttgtcattctggtggttgcggtagcagaaaaggcggaacgtagccctgtgacattcttcgatacccccccaatgctttttgtgttcatcgcactagggaggtggttggaacacctggcgaaaagtaagacaagtgaggcacttgccaaactcatgtctttgcaggcaactgaagccaccgtggtaactctcggggaggacaacctgatcatcagggaggagcaggtaccaatggaactggttcagagaggggatattgtcaaggtcgtgcctggagggaagttccccgtggacggcaaagtgctggaaggaaatacaatggccgatgagagtctgatcactggagaggctatgccagtgacaaagaaacctggttccacagtcatcgccgggtccatcaacgcccatggctcagtgctgataaaggccactcatgtcggaaacgatactactctcgctcaaattgtcaagctcgtggaggaggctcagatgagcaaggctcccatccaacagttggcagatcgattctccgggtactttgttccttttatcattataatgtcaactctgactcttgtggtatggatcgtgatcggtttcattgacttcggagttgtacagagatacttccccaacccaaacaagcacatctctcagactgaggtgattattcggtttgcatttcaaacaagcatcaccgtgctttgcatcgcctgcccctgcagcctgggtcttgcaactccaaccgccgtgatggtgggcaccggagtggccgcacagaatggcattctcattaaaggcgggaagccactggaaatggctcataagatcaagacagtcatgttcgacaaaacaggcacaatcacgcatggagtcccgcgagttatgcgtgtgctgctcttgggggacgtcgccacattgcctctgaggaaagtgctggcggtcgtgggcactgcagaggcttcatccgaacatcccttaggagtggctgtgaccaagtattgcaaagaggagcttgggactgagacattggggtattgcacagacttccaggcagtcccgggatgcggaataggttgcaaggtgtccaacgtggaaggaattctggcgcatagcgagaggcctttgagtgcgccagcctctcacttgaatgaggccggaagcctgcctgctgagaaggacgctgtcccccagacctttagtgtgctcataggtaacagggagtggctccggcgcaatggtttgactatatcttctgacgtgtccgatgccatgaccgaccacgagatgaagggccagactgctattttagttgcgattgacggagtcctatgcggaatgattgccatcgctgatgccgtgaagcaggaggccgcgctggccgtgcacactttacagagcatgggggtcgatgtcgtgctgatcacaggggataacagaaaaacagcgcgggccatagcaacccaggtgggaattaataaggtcttcgcagaagtattgcccagtcataaggttgctaaagtgcaggaattgcagaacaaaggcaagaaggttgccatggtcggggacggcgttaacgatagtcctgcgctggcgcaggctgacatgggggtggccattggcaccgggaccgacgtggccatcgaagcggcagacgtggtgttaatacggaatgatttgctggacgtcgtcgcgtccattcacttgtccaagcgtacagtgaggcgaatcagaattaatctggtcttggccttgatttacaatcttgtggggattcctatagctgcgggtgtcttcatgcccatcgggattgtcttgcagccgtggatggggtccgcagcaatggcagcatctagcgtgtctgtggtgctgagctctctgcaactaaaatgctacaaaaaacccgatctggagagatacgaggcacaagctcacggtcacatgaagccactgactgcttcacaggtgtccgtccatattggcatggacgaccgctggcgcgattcaccacgcgcaacgccctgggaccaggtgtcttacgtgagccaagtttccctatcttcactgacatctgataagccttccaggcatagcgcagctgcagacgacgatggggacaaatggtccctgctgcttaacggccgcgatgaagagcagtacata

SEQ ID NO: 280160 - DNA, 4395 bp, Artificial Sequence
  derived and/or modified sequence
atgccagagcaggagagacagatcaccgcccgcgaaggagcctctcggaagatcctctcgaagctgagcctccccactagggcgtgggagcccgctatgaagaagagcttcgccttcgataatgtcggctatgagggcggactggacggcctcggaccaagtagccaggtggctaccagcaccgtcagaatacttggaatgacttgccagtcatgcgtgaagtccatcgaggatcggatcagtaacctgaaggggattattagcatgaaagtctcactagagcaggggtcagcaaccgtgaaatatgtccccagtgtcgtgtgtctgcagcaagtgtgtcatcagatcggagatatgggattcgaggctagcatcgcagagggcaaagccgcaagctggccctctagaagtttgcccgcgcaggaggcagttgtcaaattgcgcgtcgagggcatgacgtgccagtcatgcgtctcctctatagaaggcaaggtcagaaaacttcagggggtggtgcgggttaaggtaagtttgagcaaccaggaagcagtaatcacataccagccttatctgatacagccagaggatctgcgcgatcacgtgaatgatatgggattcgaggccgcaatcaaatccaaagtggccccgctgtcactgggacctatagatatagagagactccaatccactaaccctaaacggcctttgtccagcgcaaatcagaacttcaacaattcagagaccctgggccaccaggggagccacgtggtcaccctacagctcagaatcgacggcatgcactgtaaaagctgtgtgctaaacattgaggagaacatcgggcaacttctgggggttcaaagcatacaggtgtctctggaaaataaaacagctcaggtgaaatacgaccccagttgtacctctcctgtcgccttacagcgtgctatcgaagctctccccccaggcaacttcaaggtgtctctccccgacggggctgagggctcaggcactgaccatcgcagttcgtcctctcatagtcccggctcacctccacgcaaccaagtgcagggaacctgttctaccacgctgattgctatcgctggcatgacctgcgccagttgtgtccactcgatcgaaggcatgatctctcaattggagggggtgcaacagatatcagtgagccttgcagagggtactgcaacagtgctgtacaatccgtccgtgattagtcccgaggagctgagggccgctattgaagacatggggttcgaggcaagcgttgtgtccgagtcctgttccaccaatccgctgggcaaccactccgctggcaacagtatggtgcagactaccgacgggactcctaccagcgtgcaggaggtggctcctcacaccggccgcctgccagctaatcacgctccggacatcctcgcaaaatcaccccagagtacccgagccgtggcgccacaaaagtgcttcttacagatcaaagggatgacctgtgcctcttgcgtctctaatatcgaacgaaacttacagaaggaggctggagtgctctcagtactggtggccctgatggctggcaaggcggaaattaaatatgatcctgaggtaattcagcccctggagattgctcaattcattcaggacttggggtttgaggcggctgtaatggaagactatgccggctctgacggaaacattgagttgactataacgggaatgacatgcgcctcatgtgtccacaacatcgagtccaagctgacacggacaaacggcataacatatgctagcgtggctttggctacatctaaggccctcgtgaaatttgatcccgaaattataggcccaagagatattatcaagatcatcgaggagatcggtttccatgcaagcctggctcagagaaatcctaacgcccatcacctggaccacaagatggagattaagcagtggaagaagtcgttcctgtgcagcttggtgtttggcattccagtcatggccctgatgatttacatgctgatcccctcgaatgagccccaccaaagcatggtcctggaccacaatattatcccaggtctatctatattgaacctgatcttttttattttatgtacctttgtgcagcttctcggcgggtggtatttctatgttcaagcctataagtctttacggcacaggtctgctaatatggacgttctgatcgtactggctacctctattgcatacgtttatagcctggtgattttggttgtggccgtggccgaaaaggcagaacgatcccctgtgacattttttgacacaccacccatgttgttcgtgttcattgctctgggcagatggctggaacacttagcaaagagtaaaacctctgaagctcttgcaaagttgatgagtctgcaggctacagaggccaccgtcgttacactgggtgaagacaacttgattatccgcgaggaacaggtgcccatggagttggtccagagaggcgatattgtcaaagtggtgcccggagggaagtttcctgtagatggcaaagtgttggagggcaacacaatggccgatgagtctttaatcactggagaggctatgcccgtgactaaaaagccggggtctaccgtgatagcaggaagtatcaacgcccacggaagtgttctcataaaggcgactcacgtcgggaatgatacgacattagcccagatagtcaagttggtagaagaggctcaaatgtctaaggcacctatccaacagctggccgatcgcttttctgggtatttcgtgccattcatcatcatcatgtccactctgacactggtggtgtggattgtgattggctttatagactttggagtggttcagcggtactttcccaatccaaataaacatatctcgcagaccgaggtgatcattaggttcgcctttcagacctccatcaccgttctctgcattgcctgtccgtgctcgctcggactggcaacgcccacggccgtgatggtgggaactggcgtcgctgcccagaacggcatcctgatcaagggtggaaagcctcttgaaatggcgcacaaaattaagacggtgatgttcgacaagacaggtacgattacacatggggtgccaagagtgatgcgggtgctgctactcggagacgtggccactcttcctctgcggaaagtactggcggttgtcgggaccgctgaggctagttcagaacatcccctgggcgtggccgtgaccaaatactgtaaagaagagttgggcacagaaacattgggctactgcacggacttccaggcagtgcccggatgtgggattgggtgtaaggtaagcaacgtggaaggtatactagcccacagcgagagacctttaagcgctccagcatcacatcttaatgaagccggctcactcccagccgaaaaggacgctgtcccccagacctttagtgtgctcatcggcaacagggaatggctgcggcggaacggcttgacaatctcctctgatgtcagcgatgcgatgactgaccacgaaatgaagggacagaccgcaatactggtcgccatcgatggcgttttgtgtggcatgatcgctatcgccgatgccgtgaaacaggaagccgctctggcagtgcatactttacaatccatgggggtggatgtcgtgctcatcacgggcgacaacaggaagactgccagagccatcgcaactcaggtaggaatcaataaggtcttcgccgaagttctaccttcccataaagtggccaaggttcaggagctccagaataaaggcaagaaggtggctatggtaggagacggggtgaatgattctcccgccctcgctcaggcagacatgggcgtggcgattggaaccggaaccgatgttgctattgaagctgctgacgtggtgctgatcaggaatgatctgctcgatgtggttgcctcaattcatttgagtaagcggacagttaggcgtatccgcatcaacttggttttggccttgatctacaacttagtaggcatcccgatcgcggcaggagtttttatgcctatagggatcgtgctccagccttggatgggctcagccgcaatggccgcctccagcgtttctgttgtgctcagtagcctacagctgaagtgctacaaaaagcctgatctggaaagatacgaagcacaagcccatggccatatgaagcctcttacagcatcgcaggtctctgtacatattggaatggatgacagatggcgtgattcgcccagggccaccccgtgggaccaggtctcgtatgtgagtcaggtaagtctgagcagtctgacctccgacaaaccttcaagacactctgccgctgccgatgacgacggggataaatggtctctccttctgaacggcagggatgaagagcagtacatc

SEQ ID NO: 280161 - DNA, 4395 bp, Artificial Sequence
  derived and/or modified sequence
atgcctgagcaagagcgccaaatcaccgccagggagggggcttcccggaagatcttgtctaaattgtccttgcccacccgggcttgggaacccgctatgaagaagagctttgccttcgacaacgtgggctatgagggtggcctggatggactaggtcccagttcccaagtggccacttccactgtccgaatcttgggcatgacctgccagtcttgtgtaaaatccattgaagatcggatcagtaacttaaaaggaatcatttccatgaaggtgtctttggagcagggcagtgccaccgtgaagtacgttcccagcgtggtctgcctgcagcaggtgtgccatcagatcggggatatggggtttgaggcttcaattgccgagggcaaggcagcatcatggccaagcagaagcctgccagcacaggaggcggtggtcaaactccgtgtcgaaggcatgacatgccagagctgcgtttctagcatcgagggcaaggtacggaaactgcagggcgtggtcagagtgaaagttagccttagtaaccaggaagctgtgattacctaccagccttatctcatacagcccgaggacttgagggaccacgttaatgatatgggttttgaggccgctattaagagcaaggtggccccactgagccttggccccatcgacatcgagcgcctgcagagcaccaaccctaaaaggcccctgtcttcagcgaaccagaatttcaataacagcgagaccctggggcatcagggctctcacgttgtcacactccaattgaggatcgatgggatgcactgtaagtcctgtgttcttaatattgaagagaatattgggcagctcctaggggtgcagtcaattcaagtgtctctggaaaacaagaccgcccaagtcaagtacgatccgtcctgtactagccccgtggccttgcaacgcgcaatcgaggcactgcctccaggaaattttaaagtctccctacccgacggagcagaggggtccggaaccgaccataggagctccagttctcattctcccggctcacccccacgaaatcaggtgcaggggacctgctctacgacactgattgccattgccggtatgacctgtgcctcgtgtgttcacagcatcgaagggatgatctcccaattggagggggtccaacagataagcgtgtctttggccgagggcacagctaccgtcctttacaaccccagtgtgataagcccagaagagctgcgagccgccatcgaagatatgggatttgaggccagcgtagtgtccgaaagctgtagcacaaaccctcttgggaatcacagcgccgggaatagcatggtccagacaacagacggcacccctacttccgtgcaggaggtagcccctcacaccggcagattgccagcaaaccacgcccctgacatacttgctaagtctccgcagtctacccgggccgtggccccccaaaaatgctttctgcagatcaaaggcatgacatgcgcttcctgcgtctctaatatagagagaaacctacagaaggaggccggtgttttgagtgtattggtggctttgatggccgggaaagctgaaattaaatatgacccggaggtgatccagccacttgagatagcccaatttattcaggacctgggcttcgaagccgccgtgatggaagattacgctggcagtgacggcaatattgaactcacaatcacagggatgacatgtgcaagctgtgtccataacatcgaatcaaaactgacaaggaccaacggcattacctatgcctctgtcgcactagccacctccaaggcgctagtaaagttcgacccagaaattattggccccagagatattataaaaattatcgaagagatcggttttcacgcctccttagcccagcgcaacccgaacgcccaccacctagaccacaaaatggaaatcaagcagtggaagaaatcatttctgtgtagcctcgtgtttggcatcccggtaatggctctcatgatttacatgttaatcccttctaacgaaccccaccagagcatggtgctcgaccacaatattattcctggcctcagcattttgaacttgatttttttcatcctgtgtacctttgttcagctgctggggggatggtatttctatgtccaagcatacaagagtctgcgtcaccggtcagccaatatggacgtgctaatagtcctggccaccagtatagcttacgtgtacagcctcgtgatcctggtggtcgcagtcgcagagaaggccgaaaggagtcctgtgacattcttcgataccccccccatgctctttgtgttcattgcactggggaggtggcttgaacacctggccaagtctaaaactagcgaggccctggcaaaactgatgtctctacaggctaccgaggctaccgtagtcacgttaggggaagacaacctcataatccgggaagaacaggtacctatggaactggttcagcggggtgacattgtcaaagtcgtacccggcggaaaattccctgtggacggcaaagtgcttgaggggaatacaatggctgacgaaagcttgataaccggcgaggcgatgccagttacgaagaaacccgggagcacggtgattgcagggagcatcaacgcccacggtagcgtcctgattaaggctacacacgtgggcaacgataccacactcgctcagattgttaagttagttgaagaggcccagatgtcaaaggcgcctattcagcagctggcagatcgcttcagcggatatttcgtcccttttatcattatcatgagtacgctcaccctggtggtttggattgtcatcggttttattgacttcggtgtagtgcagcgttatttccccaacccgaataagcacatctctcagacagaagtgatcatcagattcgctttccagaccagtatcaccgtcctttgcatcgcctgcccatgtagtttgggcctggccacccccactgccgtgatggtcggtactggagttgctgcccagaatggcattctgatcaagggcgggaagccgctcgaaatggcacataaaattaagaccgtgatgttcgacaagaccggcacaataactcatggggtcccacgtgtgatgagggttctactgttgggcgacgtagctaccttgccactgcgcaaagtgctggcagttgttggcacagcagaggcatcttccgagcacccgttgggggttgcggtgactaagtattgcaaggaggagctgggaacggaaacactaggatactgcacggacttccaggctgtgccaggctgtggcatcggctgcaaggtgtcaaatgtggaggggattcttgcgcactccgaacgccctctgagtgccccagcgagccacctgaacgaagctgggtctcttccagccgaaaaagacgccgtgccacagacctttagtgtcctgatcggcaaccgggagtggttacggcgaaatggtctcaccatcagtagtgatgtgtccgatgccatgacagatcacgagatgaaaggccagaccgctatactcgtcgctatagacggcgtcctatgcggcatgatcgctatcgctgacgcggtgaaacaagaggcagccctcgccgtgcatactctacagtctatgggcgtggacgtggtgctgatcacaggcgataacaggaagactgctagagcaatcgctactcaggtgggcatcaataaggtatttgcggaagtactgccatctcataaggtggcaaaggtgcaggaactccagaataaaggcaaaaaggtcgccatggttggagacggagtgaatgacagccccgcactggctcaagccgacatgggagtggccatagggactgggacggacgtagccattgaggccgccgacgtggttctgattaggaacgatctgctcgacgtggtggcgtcaatccatctatcaaagagaaccgtgaggcgtattcggatcaacctggtgttagccctgatctataacctcgtaggcatacccattgccgccggtgtgtttatgccaatagggatagtacttcagccttggatgggaagtgctgcgatggcagccagctccgtgtctgtggtgctgtcatccctccagctgaaatgttataaaaagcctgatcttgagcggtatgaagcgcaggcacatggacatatgaagccactgaccgcttcacaggtctcggtgcacatcggcatggacgaccggtggagagatagcccacgggcgacaccatgggatcaggtgtcttatgtgtcgcaggtctccttatcgagtttaactagtgataagccgtctcgccactctgccgccgccgatgatgacggtgataagtggtctcttctgttaaatggtagagatgaagaacaatacatt

SEQ ID NO: 280162 - DNA, 4395 bp, Artificial Sequence
  derived and/or modified sequence
atgcccgagcaagagaggcagatcactgctcgtgagggcgcttctcggaagatactcagcaagctgtctttgccaacccgcgcctgggaaccagccatgaaaaaaagctttgcatttgacaacgtgggatatgaggggggactcgatggactcggcccatctagccaggtggccacctcaacagttaggatcttaggcatgacctgccaatcctgtgtaaaatctatagaagatcggatatccaacctcaaaggcatcatcagcatgaaggtgtccttagagcagggcagcgctaccgtgaagtacgttccatctgtcgtgtgtctccagcaggtgtgtcaccagattggagacatggggtttgaggcttctatagctgaaggcaaagctgcaagctggccaagcaggtcactgccagctcaggaggctgttgtgaaactcagagttgaggggatgacttgtcaaagttgcgtcagctccatagaaggcaaggtgcgaaagctgcagggagtggtgagagtaaaggtctccctcagcaaccaagaagcagtgatcacctaccaaccatatctgatccagcccgaagacttacgggaccatgtgaatgatatgggatttgaggcagcaatcaagagtaaagtggcccctctcagcctcgggccaatcgatatcgaacggttgcagtccaccaaccccaagaggcccctcagcagcgccaaccagaactttaacaacagtgagactctagggcaccagggctcacatgtggtgaccctgcagttacgaatcgacgggatgcactgtaagtcttgtgtgttgaacattgaagagaacattggtcaactgcttggcgtgcaatctatccaggtgagtctagagaacaagacagcccaggttaagtatgatccatcatgcacatccccagtcgccctgcagcgggccattgaggcacttcccccaggtaactttaaggtcagcctgccggatggcgctgaaggctctggcaccgaccatcggagtagctcctcccacagtccaggatctcctcctagaaaccaggtgcagggcacctgcagcaccacccttatagctatcgcaggcatgacctgcgcctcctgcgtgcactccatagaggggatgatttcccagttggagggcgttcagcaaatatctgtgagtttagctgaaggaaccgccacagttctgtataacccctccgtgatctcccctgaggaacttcgtgctgcaattgaagatatgggctttgaagcctctgtcgtgtcagaatcttgttctaccaatccactggggaaccacagtgccggaaacagcatggttcaaacaaccgacggtactcctacatccgtgcaagaggttgcaccacatactgggcgcctgcctgccaaccacgctcccgatatcttagccaagtcccctcagtcaactcgagccgtcgctccacagaagtgtttcctgcagatcaaagggatgacctgtgccagctgcgtgtctaacatagagagaaacctccagaaagaagctggcgtcctatctgtcctggttgctttgatggccggcaaggctgaaattaaatacgaccccgaggtgattcaacctctagaaattgctcagttcatccaggacctcggctttgaggctgctgtgatggaggattatgctggttctgacggtaatatagaattaaccataactggcatgacctgtgcatcttgcgtgcacaacatagagtccaagctcacccggaccaatgggattacttatgctagcgtggctctcgccacatccaaagctcttgttaaattcgatcctgagataattggccccagagatatcataaaaatcattgaggagatcgggttccacgcatcattagcacagcgcaaccccaacgcccatcacctggaccataaaatggaaatcaaacagtggaagaagtcctttctgtgctccctggttttcggaataccagtgatggctctgatgatctatatgctgataccttccaacgaaccccatcagagcatggtgctggaccacaatattataccaggcctgtcaatactgaatctaatattcttcatcctgtgcacatttgttcaacttctgggcgggtggtatttttacgttcaggcctacaaatcattaaggcatagatccgctaacatggacgtcctgattgttctcgctacatctatagcttacgtctatagtctggttatcctagttgttgctgtggcagaaaaggccgagcgctcccccgtcaccttctttgatacccctcctatgctattcgttttcatagcactgggcaggtggctcgagcatctcgccaaaagcaagaccagtgaagccctcgccaaactgatgtctctgcaggccaccgaggccacagtggtgaccttaggtgaagataatctgattatcagagaagagcaggtgcctatggagctggtgcaacggggtgacatcgttaaggtagtgccaggtggtaaatttcccgtggacggcaaagtgctggagggcaacactatggccgatgaatcactcataaccggcgaagctatgcccgtgactaagaaacctggctctaccgtaattgccggcagcattaacgcacacggctctgtcctcataaaggcaacccacgtgggtaatgataccaccctcgcccagatcgttaagctagtcgaagaagcccaaatgtccaaggcccccatacaacagctggctgatcgcttcagcggctactttgtgccatttatcattattatgagcaccctgacactggtggtgtggattgttataggttttatcgattttggtgttgtgcagcggtacttcccaaatcctaacaaacacatctcccagactgaggtaattattcgctttgcattccagacctccatcacagttctgtgcatagcttgtccttgtagcctggggctggccacccctaccgcagtcatggtgggcactggggttgccgcacagaacggtattctgatcaagggtggcaaaccactcgagatggcccataagattaagacagttatgtttgacaaaactggaacaataactcatggagtccctagggtgatgcgcgtgctcctcctgggggacgtggctacccttccccttaggaaggtgttagctgtggtgggtaccgccgaagccagctctgaacatcccctcggcgtggccgtgaccaaatattgcaaagaggaactggggaccgagacactggggtattgtaccgacttccaggcagttccaggctgcggcatcgggtgcaaagtgtctaatgtggaaggcattctggcacactctgaacggcctttaagtgctcctgccagccacttaaacgaggctggatcactgccagccgaaaaagacgccgttccccagacttttagcgtcctgattggaaaccgcgagtggctgcgccggaatggcctgactataagctctgatgtgagcgacgctatgaccgatcacgaaatgaagggccaaaccgctatcctggtggcaattgacggagtgctgtgcgggatgatcgctattgctgatgccgtgaagcaggaagccgccctcgctgttcatactctgcagtctatgggtgtggacgtggtgttaatcacaggcgataacagaaagaccgcacgggcaattgctacccaggtgggaatcaataaagtatttgccgaagtcttacctagccacaaggtcgcaaaggttcaagaactgcagaataaggggaaaaaggtggctatggtgggcgatggcgtgaatgactctcccgcactcgcacaagccgacatgggtgtggcaatcgggaccggcaccgacgtggctattgaggctgcagatgtggtattaattcggaacgacctactggatgtggtggccagcatccaccttagcaagagaaccgtacgtaggatccggatcaacctggtgcttgcactgatctataacctagtcggtattccaattgctgccggagtctttatgccaatcggtatagtgttgcagccatggatgggtagtgcagccatggccgcctcttcagtgagtgtggtgttgtcctccctgcagctgaaatgttacaaaaaacctgatttggagcgttatgaggcccaggcacacggccatatgaagcctctcacagccagccaggtgagcgttcatattggaatggacgacaggtggagagactcaccacgggcaactccttgggaccaagtcagctacgtttcacaggtgagcctgagcagcctgacctctgataaaccatctagacatagcgccgccgcagatgacgacggcgacaagtggtccctgctgctgaacggtagagatgaggagcagtacatt

SEQ ID NO: 280163 - DNA, 4395 bp, Artificial Sequence
  derived and/or modified sequence
atgccggaacaagaacgtcaaataacggcgcgagaaggtgcgtcgcgtaaaatattatcgaaattatcgttaccgacgcgagcgtgggaaccggcgatgaaaaaatcgtttgcgtttgataatgtaggttatgaaggtggtttagatggtctaggtccgtcgtcgcaagttgcgacgtcgacggttcgtatattaggtatgacgtgtcaatcgtgtgttaaatcgatagaagatcgtatatcgaatttaaaaggtataatatcgatgaaagtatcgctagaacaaggttcggcgacggttaaatatgtaccgtcggtagtttgtttacaacaagtatgtcatcaaataggtgatatgggttttgaagcgtcgatagcggaaggtaaagcggcgtcgtggccgtcgcgatcgctaccggcgcaagaagcggttgtaaaactacgtgttgaaggtatgacgtgtcaatcgtgtgtatcgtcgatagaaggtaaagtacgtaaactacaaggtgttgtacgagtaaaagtatcgctatcgaatcaagaagcggtaataacgtatcaaccgtatctaatacaaccggaagatttacgtgatcatgtaaatgatatgggttttgaagcggcgataaaatcgaaagtagcgccgctatcgttaggtccgatagatatagaacgtttacaatcgacgaatccgaaacgaccgttatcgtcggcgaatcaaaattttaataattcggaaacgctaggtcatcaaggttcgcatgtagtaacgttacaattacgaatagatggtatgcattgtaaatcgtgtgtactaaatatagaagaaaatataggtcaactattaggtgtacaatcgatacaagtatcgctagaaaataaaacggcgcaagtaaaatatgatccgtcgtgtacgtcgccggtagcgctacaacgagcgatagaagcgttaccgccgggtaattttaaagtatcgttaccggatggtgcggaaggttcgggtacggatcatcgttcgtcgtcgtcgcattcgccgggttcgccgccgcgaaatcaagtacaaggtacgtgttcgacgacgttaatagcgatagcgggtatgacgtgtgcgtcgtgtgtacattcgatagaaggtatgatatcgcaactagaaggtgtacaacaaatatcggtttcgttagcggaaggtacggcgacggtactatataatccgtcggtaatatcgccggaagaattacgtgcggcgatagaagatatgggttttgaagcgtcggttgtttcggaatcgtgttcgacgaatccgctaggtaatcattcggcgggtaattcgatggtacaaacgacggatggtacgccgacgtcggttcaagaagttgcgccgcatacgggtcgtttaccggcgaatcatgcgccggatatattagcgaaatcgccgcaatcgacgcgtgcggttgcgccgcaaaaatgttttttacaaataaaaggtatgacgtgtgcgtcgtgtgtatcgaatatagaacgaaatttacaaaaagaagcgggtgttttatcggttctagttgcgctaatggcgggtaaagcggaaataaaatatgatccggaagtaatacaaccgctagaaatagcgcaatttatacaagatttaggttttgaagcggcggtaatggaagattatgcgggttcggatggtaatatagaactaacgataacgggtatgacgtgtgcgtcgtgtgttcataatatagaatcgaaattaacgcgaacgaatggtataacgtatgcgtcggtagcgttagcgacgtcgaaagcgctagtaaaatttgatccggaaataataggtccgcgagatataataaaaataatagaagaaataggttttcatgcgtcgctagcgcaacgtaatccgaatgcgcatcatttagatcataaaatggaaataaaacaatggaaaaaatcgtttttatgttcgttagtatttggtataccggttatggcgctaatgatatatatgttaataccgtcgaatgaaccgcatcaatcgatggtattagatcataatataataccgggtctatcgatattaaatctaatattttttatactatgtacgtttgtacaattactaggtggttggtatttttatgtacaagcgtataaatcgctacgacatcgttcggcgaatatggatgtattaatagtattagcgacgtcgatagcgtatgtatattcgttagtaatattagttgtagcggtagcggaaaaagcggaacgatcgccggtaacgttttttgatacgccgccgatgttatttgtatttatagcgctaggtcgatggttagaacatttagcgaaatcgaaaacgtcggaagcgttagcgaaattaatgtcgctacaagcgacggaagcgacggttgtaacgttaggtgaagataatttaataatacgtgaagaacaagtaccgatggaattagtacaacgaggtgatatagtaaaagtagtaccgggtggtaaatttccggtagatggtaaagtattagaaggtaatacgatggcggatgaatcgttaataacgggtgaagcgatgccggtaacgaaaaaaccgggttcgacggttatagcgggttcgataaatgcgcatggttcggtattaataaaagcgacgcatgttggtaatgatacgacgttagcgcaaatagtaaaattagttgaagaagcgcaaatgtcgaaagcgccgatacaacaattagcggatcgattttcgggttattttgtaccgtttataataataatgtcgacgctaacgttagtagtatggatagtaataggttttatagattttggtgttgtacaacgatattttccgaatccgaataaacatatatcgcaaacggaagtaataatacgttttgcgtttcaaacgtcgataacggttctatgtatagcgtgtccgtgttcgttaggtttagcgacgccgacggcggtaatggttggtacgggtgttgcggcgcaaaatggtatattaataaaaggtggtaaaccgttagaaatggcgcataaaataaaaacggtaatgtttgataaaacgggtacgataacgcatggtgttccgcgtgttatgcgtgtattactattaggtgatgttgcgacgctaccgctacgtaaagttttagcggttgtaggtacggcggaagcgtcgtcggaacatccgctaggtgttgcggttacgaaatattgtaaagaagaactaggtacggaaacgctaggttattgtacggattttcaagcggtaccgggttgtggtataggttgtaaagtatcgaatgttgaaggtatactagcgcattcggaacgtccgctatcggcgccggcgtcgcatctaaatgaagcgggttcgctaccggcggaaaaagatgcggtaccgcaaacgttttcggttttaataggtaatcgagaatggttacgtcgaaatggtctaacgatatcgtcggatgtatcggatgcgatgacggatcatgaaatgaaaggtcaaacggcgatactagtagcgatagatggtgtactatgtggtatgatagcgatagcggatgcggtaaaacaagaagcggcgctagcggttcatacgctacaatcgatgggtgtagatgttgtattaataacgggtgataatcgaaaaacggcgcgtgcgatagcgacgcaagtaggtataaataaagtttttgcggaagttctaccgtcgcataaagttgcgaaagttcaagaattacaaaataaaggtaaaaaagttgcgatggttggtgatggtgttaatgattcgccggcgttagcgcaagcggatatgggtgtagcgataggtacgggtacggatgtagcgatagaagcggcggatgtagttttaatacgtaatgatttattagatgtagtagcgtcgatacatctatcgaaacgaacggtacgtcgtatacgtataaatttagttttagcgttaatatataatctagtaggtataccgatagcggcgggtgtttttatgccgataggtatagtactacaaccgtggatgggttcggcggcgatggcggcgtcgtcggtatcggtagtactatcgtcgttacaactaaaatgttataaaaaaccggatttagaacgttatgaagcgcaagcgcatggtcatatgaaaccgttaacggcgtcgcaagtatcggtacatataggtatggatgatcgatggcgtgattcgccgcgtgcgacgccgtgggatcaagtatcgtatgtatcgcaagtttcgttatcgtcgttaacgtcggataaaccgtcgcgacattcggcggcggcggatgatgatggtgataaatggtcgttattattaaatggtcgtgatgaagaacaatatata

SEQ ID NO: 280164 - DNA, 4395 bp, Artificial Sequence
  derived and/or modified sequence
atgccagaacaggagcgacaaattaccgctcgcgaaggagcttcccgtaagattctttcaaagttatcactacctactagggcatgggaaccagctatgaaaaagagtttcgcattcgataacgttggttatgaaggtggactggacggattgggtccatcatctcaagtagccacttcaaccgtgagaattctcggcatgacctgccaaagctgtgttaagtcgattgaggatcgtatttctaatttaaagggaattatatctatgaaggtcagcctggaacaggggtcagcaaccgtgaagtatgttccaagtgttgtttgtttgcagcaggtgtgtcatcaaatcggagacatggggttcgaagctagtattgcagagggtaaggctgcttcttggccatccaggtcattacccgctcaagaagctgtggttaaactccgggttgaggggatgacctgtcagtcttgtgttagctctattgaaggtaaagtcaggaaacttcagggggtcgttcgtgtaaaagtcagcttgtctaatcaggaggcggtcattacttatcagccgtacctcattcaacctgaagacctcagggatcatgttaatgatatgggatttgaggccgcaattaaatcgaaggtcgcacccctaagccttgggcctattgatatcgagagacttcaatctaccaatcctaagcgccctctgtcctcagccaaccagaattttaacaactctgagacacttggacatcaggggagtcatgtcgtgaccttacaattgcgtattgacggaatgcattgtaagagttgtgtattgaacattgaggaaaatattggtcagctcttgggggtgcagtcaatccaggtgtcgttagagaacaaaactgcacaagtcaaatatgatccatcgtgtacatcacctgttgctcttcaaagagcaatcgaggcactcccacctggtaacttcaaggtcagccttcctgacggcgctgaaggttcgggcaccgatcatcgatcatcttcgtcacacagccctggtagccctcctagaaatcaagttcaaggaacatgtagtactacattgatagctattgccggaatgacatgcgcatcttgtgttcacagcattgagggaatgatctcccaactcgaaggagttcagcagatttctgtgtcgcttgccgagggtacagcaactgtgttgtacaatcctagtgttatttctcctgaagaacttagggcagctatagaagatatgggtttcgaggcttccgtagtctcagagagctgtagcacaaatccactgggtaaccacagcgcaggaaattctatggttcagacaacagacggtactcctacttcagtacaggaagtcgcaccacataccggtcgacttcctgctaaccatgctccagacatactcgctaaatctccgcagtcgacacgagccgtagcgccacaaaagtgctttctgcagataaaggggatgacgtgtgcttcctgcgtctcaaatattgaaagaaacctgcagaaggaggcgggggtgctatctgtcctagttgcccttatggccggtaaggctgagatcaaatatgatcctgaagtcattcaaccactcgagatcgcccagtttattcaagaccttgggtttgaagcagctgtcatggaggattatgcgggatctgatggaaatattgagttaaccattaccggcatgacatgcgcatcctgtgttcataacatcgagagcaagctgactcgtacgaatggtataacgtatgcaagtgttgctctagccacttccaaggcccttgtaaagttcgacccggagattatcggtccaagggatataattaagataatagaagaaattggtttccatgcttctttagctcaaagaaatcctaatgctcaccacctcgaccataagatggaaatcaagcagtggaaaaaaagcttcttatgttcccttgtgttcggcatacctgttatggctctcatgatttatatgcttattccttccaacgaaccgcaccagtcgatggttctcgatcacaacataatacctgggctttcaatacttaatcttatcttttttatcctctgcacctttgtacagttacttggaggttggtatttctacgtccaagcttacaagagtttgaggcaccgtagcgctaacatggatgtgttgatcgtacttgccacgtcaattgcttatgtttattcactggtaattctagtagtcgcggttgcagagaaagcagaaaggtctcctgtcacattctttgatacacctcccatgctgttcgtgtttattgcccttggtaggtggttagaacatctggctaagtctaaaacgagtgaggcactggctaagctcatgtctttgcaggcaacggaggccacggtggtcacccttggtgaggataaccttataataagagaagagcaggtgccaatggaacttgtgcagcgcggtgatattgttaaagttgtgcctgggggtaagttcccggtggatggaaaagtgcttgaagggaatacaatggcagacgagtccctaataaccggtgaagcaatgccggttacaaaaaagccgggatccactgtgatcgctggatccataaacgcccacggtagcgtccttattaaggctacccatgtgggtaatgatactacgcttgcccagattgtgaagctcgtggaagaagcacagatgtccaaagcgcctattcaacaattggctgatcggtttagtggatattttgttccatttataattattatgagcaccctgacgcttgtggtctggatagtgattgggttcattgacttcggtgttgtacagagatatttccctaatccaaataagcacatttctcaaactgaagttattattaggttcgcttttcaaacatccataacagtgttatgtatagcttgcccttgttcgctgggtcttgctacaccaacagcagtaatggtaggaaccggtgtcgcagctcagaatgggatccttattaagggtggtaaacctcttgagatggcacataaaattaagactgtgatgttcgataagacaggtaccataactcatggtgtgccaagagtaatgcgggtacttcttcttggtgacgtcgccaccctgccgctccgtaaagttcttgctgtggttgggacagcagaagcgtccagcgagcaccccttgggtgttgcagtcaccaaatattgcaaagaggaacttgggactgagactctcggctactgcactgattttcaagcggtgcctggttgtggtatcggttgcaaggtgagcaacgtcgaaggtattcttgctcattcggagaggcctctctcagctccagcttcacatcttaatgaggctgggagcttacctgctgaaaaggatgccgtaccacaaactttttctgtgctcataggtaatcgcgagtggcttagacgaaatggattgacaatttcgagtgatgtaagtgacgccatgacggaccatgaaatgaaaggccaaactgccatattagttgcgatagatggagttttgtgtggtatgattgccatcgctgatgcagtcaaacaagaagcggcccttgctgtccacacgcttcagtcaatgggagtcgatgtcgttcttattactggtgacaacaggaagaccgctcgtgctatcgctactcaggtcgggattaataaggtttttgcggaggtcttgccctcacataaggttgctaaagtccaagaactccagaataagggaaagaaggttgctatggttggggatggcgtgaacgactccccagcattggctcaagccgatatgggagtggctataggaactggtacggacgtggctatagaggctgctgacgttgttctcatcaggaatgatttgctagatgttgttgcttctattcatctcagcaagcgaaccgtacggcggatcagaatcaacctcgtccttgcgctgatttacaatttggtcggtattccaatagctgccggtgtttttatgccgatagggatagttctccaaccatggatgggatcagccgctatggccgcttcctccgtgtctgttgttttgtcatcactgcagctgaagtgttacaagaagcctgatttggagaggtacgaagctcaagctcacggacatatgaagcccttgacagcctctcaggtttctgttcacatcggcatggacgataggtggcgggacagcccgagagcaaccccttgggaccaagtgtcctatgtctctcaagtgtcacttagttccttaaccagtgataaacccagcaggcattcagcagctgctgatgacgatggagacaaatggtcgcttctcctcaatgggcgtgatgaggagcaatacatt

SEQ ID NO: 280165 - DNA, 4395 bp, Artificial Sequence
  derived and/or modified sequence
atgcctgagcaggaacgacagatcacagcccgcgaaggggcatccagaaagatcttgtccaagttgagtttgcccacgcgagcttgggagcccgccatgaagaagtcctttgcgtttgataacgtcgggtacgaggggggactggatggcctcggacccagcagccaagtggctacaagcaccgttagaatcctcggcatgacctgccagtcttgtgtgaagagtatcgaggaccgcataagcaatctgaagggaatcattagcatgaaagtgtcattggagcaaggttcagccaccgtgaagtacgtcccttccgtcgtctgccttcagcaagtatgtcaccagataggggatatggggttcgaggccagtatcgccgagggaaaggctgcctcttggcctagccggtccctcccagcacaggaggccgtcgtgaagctccgcgtcgagggcatgacatgccagagttgcgtgagcagtatagaagggaaggtccgcaagctgcagggggttgtgcgagtgaaagtgagtctgagcaaccaggaggcggtgatcacttaccagccgtacctgattcagcccgaggatctgagagatcatgtgaatgacatgggatttgaagccgctatcaaatctaaagtggctccgctctccctcgggccgattgacatagaaaggctgcagtccaccaaccccaagagaccattgtccagcgcgaaccagaacttcaataattctgagacactcgggcaccaggggtcccatgtggtaaccctgcagttgcgcatcgacggcatgcactgtaaatcatgcgttcttaacatcgaggagaacatagggcagctgctgggcgtccagagcatccaggtgagtcttgagaataaaacagcccaggtgaagtatgatccaagttgcacctctcctgtcgccctgcaacgagcgatcgaggctcttcctcctggaaacttcaaggtctctttgcctgacggcgccgagggcagcggaacggaccacaggagtagctctagccacagcccagggagtccacctcgcaatcaggtccagggcacctgtagtacgacacttatagctattgcggggatgacctgcgccagttgtgttcactcaattgaagggatgatatctcaacttgagggggtgcagcagatatctgttagcctggcagaaggtacggccacagtcctgtacaaccccagcgtgattagccccgaggaattgagagctgctatcgaggacatgggattcgaagctagcgtggtgtctgaaagctgttccacaaatcccctcgggaaccatagcgccgggaactccatggtccagacgactgatggtactccaactagcgtgcaggaggtggcaccccacacaggccggttgccagctaaccatgccccagatattctggctaagagcccccaaagcactagggcagttgccccccagaagtgctttttgcaaatcaaggggatgacctgcgcttcttgtgtttcaaacatagagcggaaccttcaaaaagaggctggtgtcctgagcgtgctggtcgccttgatggccggtaaagcagaaatcaagtacgaccctgaagttatccaacccctggaaattgcccagtttattcaggacctgggatttgaggcagcagtcatggaggactacgctggaagcgatggcaatattgaattgactatcaccggcatgacgtgtgccagttgcgtacacaacatcgaatccaagctgaccagaactaatgggatcacctacgccagcgttgccctggccacttcaaaggcgctggttaaatttgatccagagatcatcggtcctcgcgacatcattaaaatcatcgaggaaatcggctttcatgcttccctggctcagcgaaaccccaatgcccatcatctcgatcacaaaatggagatcaaacagtggaaaaagagcttcctttgtagtctggtctttggcataccagttatggccctgatgatttacatgctgatcccctcaaacgaacctcaccagagtatggtgctggaccacaacatcatccccggcctgagtatcctgaatctgatattctttatcctttgcaccttcgtgcagctgctcggtggctggtacttctatgttcaagcctataagtcccttagacatagatctgcaaatatggatgtgctgatcgtgttggctacaagcatagcatacgtgtacagtctggtgatcctggtagtggctgtcgctgaaaaggctgaacggtcccccgtgacctttttcgacacgccccctatgctgtttgtctttattgcgctcggcagatggctcgagcacttggcaaaatctaaaacctctgaggctctggctaaactgatgagcctgcaggccacagaggccaccgtcgtgaccttgggggaggacaatctgatcataagggaagaacaggttccaatggagctggtgcagcgcggggatattgtgaaagtggttccaggtggaaagttcccggtagacggcaaggtgctggaaggcaataccatggccgacgagtccctgatcacaggggaggccatgcctgttacaaagaaacccggcagtacagtgattgcaggttctatcaatgctcatggctctgtgctcatcaaggccacccatgtcggtaatgacactacattggctcaaatcgtgaagctggtggaagaggcacagatgtccaaggctcctatccagcaactggccgatagatttagcggatacttcgtaccctttattattatcatgtccacactgaccctggtcgtttggatcgtgattggatttatagattttggcgtggtgcaacggtacttcccaaatcccaacaagcacataagccaaaccgaggtgatcattcggtttgcgtttcagaccagcatcactgtgttgtgcatcgcctgcccctgttctctcgggctggccacacctaccgcggtcatggtcggtacaggagtagccgcccagaatgggattctcatcaaaggagggaagcccttggagatggcgcataaaattaagaccgtcatgtttgataaaactgggactataacccacggcgtccctcgggtgatgcgagttttgcttctcggcgacgtggcaacccttcccttgcggaaggtgctggccgtggtgggaaccgccgaggcttcctccgagcatcctcttggcgtggccgtgaccaaatactgcaaggaggagcttggtaccgaaactctgggatattgcacagattttcaggccgtacctgggtgtggcatagggtgcaaggtgtctaacgtcgagggcatactggctcacagcgaacgacctctgtccgccccggcctcccatctgaacgaggcgggttcactgcctgccgagaaggatgcggtccctcaaactttctcagtcctgatcgggaatagggaatggctccgcaggaacgggctgaccatctccagcgatgtgagtgacgcaatgacggatcatgaaatgaaggggcagactgccatcctggttgctatcgatggggtgctgtgtggaatgatcgcaattgccgatgcagtgaaacaggaagctgccttggccgtgcacactttgcagtcaatgggagtggacgtggttctgattactggcgataatagaaaaaccgctcgcgccattgctacccaggtaggcatcaacaaagtcttcgcagaagtcttgccttcccacaaggtggccaaagtgcaggaactccaaaataaaggaaagaaagtagctatggtgggagatggggttaatgactcccctgcactggcccaggctgacatgggcgttgcgatcggcacaggaactgacgtagccatcgaggctgccgacgttgtcctgattaggaacgatctcctcgatgtggttgcgtccatccacctctccaagcgaaccgtcagacggatcagaatcaacctggtgctcgctctcatctacaacctcgtgggcattcctatagcagccggagtttttatgcccattggaattgttttgcagccctggatgggatccgcagcaatggctgcgagcagcgtgagtgtggtattgagttctctccagcttaagtgctacaaaaaacccgatctggagcggtacgaggcacaggctcacggacacatgaaacccctgacagcaagtcaggtgagcgttcacatcgggatggatgatcgctggagggacagccccagggctacgccatgggaccaggtgtcttacgtgtcccaggtttccctttcctccctcacatccgacaagccatcccggcacagcgcggcagccgatgacgatggtgataaatggagcctgctgctcaatggccgggatgaagagcagtatatt

SEQ ID NO: 280166 - DNA, 4395 bp, Artificial Sequence
  derived and/or modified sequence
atgccggaacaagaacggcaaattaccgccagagagggagcatcaagaaagatcctgtcgaagctgtcgcttccaactagggcatgggaaccggccatgaagaaatcattcgcatttgataacgtggggtacgagggaggtcttgacgggctcggaccctcttcacaagtcgcgactagcaccgtcagaattttgggaatgacttgtcagtcgtgtgtcaaatcaatcgaagatcgtatctcaaacctcaaaggtatcatttccatgaaagtctcacttgagcagggctcggccactgtgaagtacgtgccatccgtcgtgtgtctccaacaagtgtgccaccagatcggtgacatgggtttcgaagcatcaatcgctgaaggtaaagcagcatcctggccttcgagatccctccctgcccaggaagcggtcgtgaagctccgtgtggaaggcatgacttgtcaatcctgtgtgagctctattgaaggaaaggtgagaaagctgcagggggtggtgcgcgtcaaagtctcccttagcaatcaagaagcagtgattacgtaccagccatacctcattcaaccagaagatcttagagatcatgtgaatgacatgggattcgaagcagcaataaagtcgaaagtagcacctctctcgcttggcccgatcgatattgaacgccttcagtccactaaccccaaacgcccactgagcagcgctaaccagaacttcaacaactcggagactcttggtcatcaaggatcccatgtggtgacgcttcagctgcgcattgatggcatgcattgcaaatcgtgcgtccttaacattgaagaaaacattggtcaactccttggagtgcaatcgattcaagtctcactcgaaaacaaaactgcacaagtgaaatacgatccatcctgtacctcacctgtcgcattgcaacgggcaatcgaagcccttcctcctggcaactttaaggtttcccttccagatggcgcagagggtagcggtaccgaccatagatcctcgtcctcccactcgccaggctccccgcctcgtaaccaggtgcagggaacctgtagcaccacccttattgcaattgccgggatgacctgtgcttcgtgtgtgcactcgattgaaggtatgatctcccaactggaaggggtgcaacagatttctgtctcgctcgcagagggtactgccaccgtgctttacaacccatctgtcatatccccggaagaacttagagctgcaattgaggatatgggattcgaggcaagcgtggtgagcgagtcgtgctctactaacccacttggcaatcattccgccggaaattccatggtgcagaccactgatggtactcccacctcggtgcaagaggtcgcacctcacactggtcgcctgcccgcaaaccatgctcctgatatccttgcgaaatcgcctcagtcgactcgggcagtcgcaccgcaaaaatgtttcctccaaatcaaagggatgacgtgtgcatcctgcgtctccaacatcgagcgtaacttgcagaaggaagccggagtgctttccgtccttgtggctctgatggctggaaaggcagagattaagtacgatccagaagtgattcagcctttggagattgctcagtttattcaggatcttggctttgaggcagctgtgatggaagattacgccggaagcgatggaaacattgaactgactataaccggtatgacctgcgcgtcgtgcgtgcataacatcgagagcaaactgactcggaccaacggcattacttacgccagcgttgcactcgcaacctcgaaagcacttgtgaagttcgacccagaaatcattggaccgcgcgacatcattaagattattgaagaaattggcttccatgcctcgcttgcccaacgtaatccaaatgcgcaccatctggaccacaaaatggaaatcaagcagtggaagaagtcgttcctttgttcgctcgtgtttggcatacccgtgatggccctgatgatttacatgcttattcctagcaacgagccacaccagtcaatggtcctggaccacaatatcatccctggactctcaatacttaatctgatctttttcatcctttgtacttttgtccaactgctgggtggatggtacttctacgtgcaggcgtacaagtcgctgcgccataggtccgcaaatatggatgtccttatcgtcctggcaacgagcatagcatacgtgtactccctggtgattctggtggtcgccgtggcagaaaaagcagaacgcagccccgtgacgttttttgataccccacctatgctctttgtgtttattgcactggggagatggctcgaacatctggcaaaaagcaagaccagcgaggcacttgcaaaattgatgtctcttcaagcaaccgaagccactgtggtgactctgggggaggacaacctcatcatacgagaggaacaggtgccaatggaactcgtccagagaggagatattgtgaaggtggtgcctggaggaaagtttcccgtggacggcaaggtgcttgaaggaaataccatggctgatgagtcactcattacgggcgaagcgatgcctgtgactaagaagccaggatcgaccgtgatagcaggctccattaatgcgcacggaagcgtgctgatcaaggcaacccatgtgggtaatgatactaccctggcacagattgtgaagctcgtggaggaagctcaaatgtccaaggcacctattcagcaactggcggacagatttagcggctacttcgtgccatttatcataatcatgtctactctgactctggtggtgtggatcgtgatcggctttatcgattttggcgttgtccagcgatacttccctaatcctaacaagcacatctcccagaccgaggtgattatccgattcgcgtttcagacctccatcactgtgctgtgtatcgcgtgtccgtgttcgcttggccttgcaactcctactgcagtcatggtcggaaccggcgtggcagcacagaatggaatcctcattaagggcggtaagccactggaaatggcacataagatcaaaactgtgatgtttgataagactggcaccattacccatggtgtcccacgcgttatgcgggtcctcctgcttggagacgtggcaactcttcctcttcgcaaggttctggcggtggtaggaactgcagaggcatcatcagagcatcctcttggagtggcagtgaccaagtactgtaaggaggagctgggtaccgagacgctcggatactgtactgattttcaggcggtgccaggttgcggtatcggatgtaaagtgtcgaacgtggaaggaattctggcgcattcagagcgacccctgtccgcaccagcatcgcatctcaacgaggcaggttcgctgcctgccgaaaaagatgctgtgccacaaactttttcggtgcttattggaaacagagagtggctcaggagaaatggactcaccatctcttccgatgtcagcgacgcaatgaccgaccatgaaatgaagggtcaaactgccatccttgtggcaattgatggagtgctgtgtggtatgatcgcaattgcagatgcagtcaaacaggaagcagcgcttgcagtgcataccttgcaatcaatgggggtcgacgtggtcctcattaccggggacaacaggaaaaccgcccgggcgattgcaactcaggttggaatcaataaagtctttgcagaggtccttccatcacacaaggtggcgaaggtgcaagagctgcagaacaagggaaaaaaggtggcaatggtgggggacggggtgaacgacagcccagcactcgcacaagcggatatgggtgtggcaattggaaccggaaccgacgtcgcaattgaagccgctgacgtggttcttattcgcaacgatcttctggacgtggtggcatccattcatctctccaagagaaccgtgcgtcgcattcggattaatcttgtcttggcgctgatctacaaccttgtcggaatccctatagcagcgggtgtgttcatgcctattggcatagtgcttcagccctggatggggtcggccgctatggcagcgagctccgtgtcagtggtcctttcgtccttgcaactgaaatgttacaagaagccagacctggaacgttacgaagcacaagcgcacggacacatgaagcctttgaccgcatcccaagtgtcagtgcacattggtatggatgatagatggagggactcccccagagccaccccatgggatcaagtgtcctacgtctcgcaagtgtcgctgtcatcgctgactagcgacaaaccctcccgacattcagccgccgcagatgatgacggcgacaagtggtccctcctgcttaacggtagagacgaagagcaatacatt

SEQ ID NO: 280167 - DNA, 4395 bp, Artificial Sequence
  derived and/or modified sequence
atgccggaacaggagcggcagatcaccgcgcgcgaaggcgcctcccgcaaaatcctgtcgaagctgtccctccccaccagagcgtgggaacccgctatgaagaagtcgttcgccttcgataacgtgggctacgagggtggactggacggattgggcccctcatcccaggtggctacctcgaccgtgcggatcctcggaatgacctgtcagagctgcgtcaaatcgatcgaggacagaatctcgaatctgaagggaatcatttccatgaaagtcagcctcgagcaaggctccgccacggtcaaatacgtgccgtcagtggtgtgtctgcaacaagtgtgccaccagatcggcgatatggggttcgaagcctcaatcgcggagggcaaagccgcatcgtggccctcaagatcgctgccagcccaggaggctgtggtcaaactgagggtggagggtatgacttgtcagtcatgcgtgagctcgattgaaggaaaggtgcgaaagctccagggagttgtgcgagtgaaagtgtcactgagcaaccaagaggcagttatcacctaccaaccatacctgattcagccagaggacctgcgcgatcacgtgaatgacatgggattcgaggccgctatcaagtcaaaagtcgcgccgctgtcgctcgggcctatcgacatcgaaaggctgcaatccaccaacccgaaacggccactgtcatcagccaaccagaatttcaacaattcagagactctgggtcaccaaggaagccacgtcgtcaccctgcagctgcggatcgacggaatgcattgcaagagctgcgtgttgaatatcgaagagaacattggccagctcctcggcgttcaaagcattcaggtgtcactggaaaacaaaaccgcacaggtcaaatacgacccttcgtgcacgtcgcctgtggcgctccagcgcgctatagaggctctcccgccaggaaatttcaaggtgtcccttccggacggggcggagggctccggaaccgatcatcgctctagctcctcccattcgccgggctcgccgccacgcaaccaagtgcagggcacctgctccactactttgattgcaatcgcagggatgacctgcgcctcatgcgtgcattctatcgagggcatgatctcacagctcgagggagtgcaacagatcagcgtgtcgcttgccgaaggcaccgcaactgtgctgtacaacccctcggtgatctcgccggaagagctgcgggccgccatcgaagatatgggatttgaagcctcggtggtttcggagtcgtgctcaaccaacccgctgggcaaccactcggcaggcaattctatggtgcaaaccacggacgggactcctaccagcgtgcaggaggtcgccccacatactgggcgccttcccgcgaatcatgctccggatatcctcgccaagagcccgcagtccaccagagctgttgcaccacagaagtgcttccttcaaatcaagggaatgacttgcgcatcatgcgtctcgaatatcgagaggaatctgcaaaaggaagcaggagttctctccgtgttggtcgctttgatggcaggaaaagcggagataaagtatgatcctgaggtcattcagccacttgaaatcgcacaattcatccaggaccttggattcgaagcagcggtgatggaagattacgccggatcagacggaaacatcgaactcactataacgggcatgacctgtgcctcctgtgtgcataacatcgaatccaaattgacccggactaacggaatcacttatgcttcggtggcactggcgacttcaaaggccctggtgaagttcgatcccgagatcatcggaccgcgggacatcattaagatcatagaggagattggatttcatgcctcacttgcacagcgaaaccctaacgctcaccatctggaccataagatggaaatcaagcaatggaagaagtcattcttgtgcagcttggtgttcggcatcccagtgatggcgctcatgatctacatgctgattcccagcaatgagccgcaccagtcaatggtgctggatcataacattattccgggactgtcgatcctcaacctgatcttctttatcttgtgtacttttgtccaactgctgggtggctggtacttctacgtgcaggcatacaagagcctgagacaccggtccgcgaatatggatgttctcatcgtgttggccacgagcatcgcgtatgtttatagcctcgtcatcctggtcgtggccgtcgcagaaaaggcagaacgctccccggttacctttttcgatactccaccgatgctttttgtgttcatcgccctgggtcggtggctggaacatctggcgaagtctaagactagcgaagcactggcaaagctcatgtccttgcaagcgactgaagcgactgttgtgactctcggggaggacaatctgattatccgtgaagaacaggttccaatggagcttgtccagcgcggagacatcgtcaaggtggtgccaggaggaaagttccccgtggacgggaaggtgctggaaggcaatacgatggctgacgaatcgctcatcaccggagaggctatgccggtcaccaagaaacccgggtcaaccgtgatcgccggaagcatcaacgcacacggctcagtgctgatcaaggctacccacgtcggtaacgatactacgttggcccaaatcgtcaaacttgtcgaagaggctcagatgtcaaaggccccgatccagcagctggctgaccgcttctcgggatacttcgtgccatttatcatcatcatgtcgaccctgaccctggtcgtgtggatcgtgatcggcttcatagattttggcgtggtccaacgttacttcccgaaccctaacaagcatatctctcaaacggaagtgatcatcagatttgcatttcaaactagcatcactgtgctgtgcatcgcctgcccttgcagcctggggctcgcgactccaacggcggttatggtgggaaccggagtggcagctcagaatggaatcctgatcaaaggtggcaaaccgctggaaatggctcacaagatcaagacggtgatgttcgacaaaacgggtaccatcactcatggcgtccctcgcgtgatgcgcgtgctgcttctcggggacgtggccaccctcccgctcaggaaagtgcttgccgtggtggggactgccgaagcgtcgtccgaacatccactgggagtggccgtgaccaagtactgtaaagaggaactgggaaccgaaactctgggatactgcaccgatttccaagccgtccctggatgcggcattggctgcaaggtcagcaacgtggaggggattcttgcccactccgaaaggccactcagcgccccggcgtcgcatctgaacgaagcaggttcactcccagccgagaaagatgccgtccctcagacgttcagcgtgctcatcggcaatagggaatggctgaggcgaaacggactgaccatctcctccgacgtgtcggatgccatgaccgaccatgagatgaagggacaaaccgccattctcgtcgctatcgacggcgtgctgtgtggcatgatcgcgattgcagatgcagtcaagcaggaggcagcattggcggtgcatactctgcagagcatgggcgtcgacgtggtcttgatcactggcgataacagaaaaaccgccagagcgatcgccacgcaggtcggaatcaataaggtgttcgccgaggtgctcccatcgcacaaggtggcaaaggtccaggaacttcagaacaagggtaagaaggtggcgatggtgggggacggggtgaatgactcgccggcgctggcccaagcggacatgggggtggctatcggcactggaaccgatgtggcgatcgaggcagccgatgtcgtcctgatccggaacgacctgctggacgtggtcgcttcaattcatctctccaagcgcaccgtgcgccggatccggatcaacctggtgctcgccctgatctataacctggttggaattccgatcgccgcgggagtgttcatgccgataggaattgtgctccaaccttggatgggttcggcagctatggccgcctcctcggtcagcgtggtcctgtcatccctccaactgaagtgctacaagaagcctgatctcgagcgctatgaggcccaggcccacggacacatgaagcctctgactgcctcccaagtctccgtgcacattggaatggatgacagatggcgcgattcgcctcgggcgactccctgggaccaggtcagctacgtgtcgcaagtctccctgagctcgctgacttcagacaaaccgagcagacattccgccgcagccgatgacgacggggacaagtggagcctgttgctgaatggtcgcgacgaggaacagtacatc

SEQ ID NO: 280168 - DNA, 4395 bp, Artificial Sequence
  derived and/or modified sequence
atgccagagcaggaacggcagattaccgctcgcgagggggcttcccgcaaaatactcagtaagttgtccctgccaactcgtgcctgggagcctgctatgaaaaaatcatttgctttcgacaacgtcggatatgaaggagggctggacgggctggggccgtcgtctcaggtggcgaccagtaccgtgcggattctgggaatgacctgtcagtcatgcgtgaaaagtatcgaggacaggatctccaatttgaaagggattatcagtatgaaggtatcactcgagcaggggtcagccaccgtcaagtacgtgccatcagtggtgtgtttgcagcaggtgtgtcaccagataggagacatggggttcgaggcctccatcgccgaggggaaggctgcaagttggccctctagatctctgccagctcaggaggcagtggtaaagctcagagtcgagggtatgacatgtcagagctgtgttagttccatcgagggcaaggttagaaagctccaaggtgtagtgcgcgtcaaagtgtcattatccaatcaggaagcggtgatcacataccagccctacctcatacagccggaggatctgagggaccatgtgaatgacatgggcttcgaggctgcgattaagtccaaggttgcccccctttctcttggccccatcgacattgagcgacttcaatccactaacccaaagcgacctttatcttctgctaaccagaatttcaataatagtgagaccttgggccatcagggctctcacgtagtgactctacagctgcgcattgatggcatgcattgcaagtcatgcgtccttaatattgaagaaaacattggccaattactgggcgtgcagagcattcaggtgtccctggaaaacaagacagcccaggtcaaatatgaccctagctgtacttctccagtggctctccagcgtgccatagaggccctgccgccaggaaactttaaggtgtctcttcccgacggcgcagaagggtctgggactgaccaccgatcttcgtcaagccactcaccaggctccccaccaaggaatcaggtgcaggggacatgtagcaccactttaattgccatcgccggtatgacatgcgcatcttgtgtccacagtatagaaggaatgatatctcagctggagggtgtgcaacaaattagcgtttcccttgctgagggcacggccaccgtgttatacaatccctcagtgatttccccggaagaactacgcgcagctatagaggacatgggttttgaagcttcagtggtgagcgagagctgttcgaccaaccccttgggcaatcattccgctggaaattcaatggtgcagactaccgacggtacacccacgtcagtgcaggaagtggccccacacaccggacggctgcccgccaaccacgctcccgatatcttggctaagagcccacagtcgacaagagccgttgccccccagaaatgtttcttgcaaataaagggcatgacatgtgcgtcctgtgtatcaaatattgaacgcaatctccagaaagaggctggagtcctgtccgtgctggttgcgctgatggctggaaaagcagaaattaagtatgatcctgaggtgatccagcctctagagattgcccagtttattcaggacctcgggtttgaagcagccgtgatggaggattacgctggcagtgacgggaatatagaactaacaatcacaggtatgacatgtgctagttgcgtgcacaacattgaatcaaagctgacccggacgaatggcattacatacgcaagcgtggcgctggctacaagcaaagctcttgtcaagttcgacccggagatcattggcccccgagacattataaagatcatagaggagataggtttccacgcgtccctggcgcagaggaatccaaacgcccaccatttggaccacaagatggaaattaaacaatggaaaaagtcttttctctgcagcctggtctttggcattcccgtgatggcgttgatgatttatatgctcattccctccaacgagccgcaccagagtatggtactggaccacaatattatccccggcttgtcgatccttaacctgatcttctttattttatgcacatttgtccaactgctgggggggtggtacttttacgtgcaagcctacaagtccctgcggcaccggtcagcaaatatggacgtgctgatcgttctggcaacctctattgcttatgtctattctcttgtaattttggtcgtagccgttgcagagaaagctgagcgttcacccgtgacatttttcgacacgcctccgatgctgtttgtctttatagccctcggtcgctggctcgagcaccttgcgaaatcaaaaacgtccgaagctctggccaaactgatgtccctgcaggccactgaggctacagtggttactttgggagaggataatcttatcatcagagaagaacaggtccccatggagcttgtccagcgcggtgatatcgttaaggtagttcctggaggaaaattcccagtcgatggtaaggtgttggagggtaacactatggccgacgagtctctgatcactggggaggctatgccggttaccaaaaagcctggatcaactgttatcgccggaagcattaatgcccacgggagcgtcctgattaaagctactcatgtgggtaatgacacaaccctcgcgcaaattgtcaagctggtcgaagaagcccagatgagcaaagcgcctattcaacaacttgccgacagattctcaggctacttcgtgccgttcatcattataatgagcaccctgactctcgtggtttggatcgtgattggcttcatcgatttcggcgtggtgcagagatatttccccaatcccaacaagcacatcagccagacggaggtgatcattcgcttcgcatttcagacatcaatcactgtgctgtgcatagcttgcccctgcagtctgggtctcgctacacctaccgctgtgatggtgggcaccggggtggctgcccagaatgggatcttgattaaaggcgggaagcccctggaaatggctcataagatcaagaccgttatgtttgataagacagggaccatcacgcacggcgtaccaagagtcatgcgagtgctgctgctgggcgatgtcgccacgctgcccttgcgaaaagtgctggcagttgtgggcaccgccgaggccagttctgaacaccctctaggggtggccgtcaccaagtactgcaaagaagaacttggcacagaaacactgggttactgtaccgactttcaggcagtacctggatgtggtattgggtgtaaggtctccaatgtagaggggattctggcccactccgagcgccctctgtccgctccagcttcccacctgaatgaggcaggctctctgcccgcagagaaggacgcagtccctcagaccttctcggtgttgattgggaaccgagagtggctacgtcggaacggtctgactatcagctccgatgtgagcgacgcgatgactgaccacgagatgaagggccagaccgccattttggttgccatagacggggtgttatgtggaatgattgctatcgctgacgccgtgaaacaagaggccgcactggctgttcacactttgcagtccatgggagtggacgtcgttctgatcaccggcgataacaggaaaaccgcacgggctattgcaactcaagttggtatcaacaaggtgttcgctgaggtgctgcctagccacaaagtggcaaaagttcaggaacttcaaaataaggggaagaaggtggccatggtgggagatggtgtcaacgattcgcctgctctggctcaagccgatatgggcgtcgcgatagggactggtacggatgttgccatcgaggccgctgacgtcgtgttgatccgcaatgacttgctggacgtggtggcctccatccacctgtctaagcgcactgtgcgtagaatacgaataaatctggttttagcactgatctataatcttgttggaattcccatagccgctggtgtctttatgcccattggaattgtacttcagccatggatgggtagtgccgccatggcagcctcttccgtctcagtagtcctctcaagcctccagcttaaatgctacaagaaaccagacttagagcgctatgaagcacaagctcacggacacatgaaacccttaacggctagtcaggtctcagtccatattggaatggatgatagatggagagattctccccgggcaactccctgggaccaagtctcttacgtgagccaggtttccttaagctcactcacatctgataaacctagcaggcacagcgcggccgccgacgacgacggagacaaatggtctctgttgttaaacggtagagacgaggaacaatatatc

SEQ ID NO: 280169 - DNA, 4395 bp, Artificial Sequence
  derived and/or modified sequence
atgccggaacaagaacgccaaattaccgctagagagggcgcctccagaaagatcctgtccaaactgtccttgcctacccgcgcctgggaaccggcgatgaagaagtccttcgcattcgataatgtgggatacgagggtggacttgatggactgggaccttcgagccaagtggcaacctcaactgtgaggatcctgggcatgacgtgtcagtcctgcgtcaaatccatcgaagatcgcattagcaatctgaaaggaatcatctcgatgaaggtatcccttgaacaagggtcagccactgtgaaatacgtgccgagcgtggtctgcctgcagcaggtgtgccaccagatcggggatatggggtttgaagcgtcgatcgcagaaggcaaggccgcctcttggccgagccggtccctgccagcgcaagaagcggtggtgaagctgagggtggaaggaatgacctgccagagctgcgtgtcctcgatcgaaggaaaggtcagaaagctgcaaggcgtggtccgcgtgaaagttagcctgtcgaatcaggaagctgtgatcacctaccaaccgtacctgatccagccggaggatctgagagatcacgttaatgacatgggctttgaagcggccatcaagtcgaaggtcgcaccattgtcactgggaccgatcgacattgaacgcctgcaatcaaccaatccaaagaggccgctcagtagcgcaaaccagaactttaacaactcagagactctcggccatcaagggagccacgttgtcacgctccagctgagaatcgatgggatgcactgtaaatcgtgcgtcctgaacatcgaggagaatattggccaactcctcggcgtgcagtcgatccaggttagtctcgagaataagaccgctcaggtgaaatacgatcctagctgtaccagcccggtggccctgcaaagagctatcgaagcgctcccgccaggaaacttcaaagtcagcttgccagatggtgcagaaggatctggaacggatcatcggtcatcatcctcccacagccctggaagccctccccgcaatcaggtccaggggacctgcagcaccaccctcatcgctatcgctggtatgacctgcgcttcgtgtgtgcactcaatcgaaggaatgattagccagttggagggagtgcagcaaatctccgtgagcctggcagagggcactgccactgtgctttacaacccgtcagtgatctcaccggaggaactgcgagccgctatcgaggacatgggattcgaagcctcggtggtgtcggagtcatgctcgacgaacccgctcggaaaccactcggcaggaaactcgatggttcaaaccactgacggcactccgaccagcgtgcaggaggtggctcctcacactggaagattgccggccaaccatgccccagacatccttgcgaagtccccgcagtcgacccgggccgtggctcctcaaaagtgcttcctccagatcaaaggcatgacttgtgcctcctgcgtgtcgaatatcgagcgcaacctgcagaaggaagccggagtgctgagcgtgctggtggcactcatggcaggaaaggccgaaatcaagtacgatccggaagtgatccagccgctggagatcgctcaattcattcaagacctgggcttcgaggccgcagtcatggaagattacgcgggctcggatggaaacattgagctgaccatcactggaatgacctgtgcgagctgtgtgcataacatcgagtcaaagctgactcggactaacggaatcacctacgcctcagtcgcgctggccacctccaaagccctggtcaagttcgaccccgaaatcattggacctcgcgatatcattaagattatcgaggaaatcggatttcacgcttcactggcacaacgcaatccgaatgcgcaccacctcgatcataagatggaaatcaagcaatggaagaaatccttcctttgcagccttgtgttcgggatcccggtcatggcgttgatgatctacatgctcatcccgagcaacgaaccgcatcaatcaatggtgctggaccacaacatcatccccggcctgtcgattctcaaccttatcttctttatcctgtgcaccttcgtccagttgctcgggggatggtacttctacgtgcaagcctacaagtcgctgcgccaccgcagcgccaatatggacgtgctcatcgtcctggccacgtcgatcgcctatgtgtatagcctcgtcatcctggtggtcgcagtggccgaaaaagccgagcgaagcccggtcactttcttcgacaccccgcccatgctgttcgtctttatcgctctggggcgttggctggaacacctggcaaagtccaagacgtcggaggctctggcgaaacttatgtcgctccaggcgactgaggccactgtcgtgactcttggcgaggacaacctgattatccgcgaggagcaggtcccgatggagctcgtccaaaggggcgacatcgtcaaagttgtgccgggcggcaagttcccagtggacggtaaggttctggagggtaataccatggcagatgagagcctgataactggagaagccatgcctgtgaccaaaaaacctggatccactgtgatcgccggctcaatcaacgctcacggaagtgtcctgatcaaagcgactcatgtggggaacgatactactcttgctcagatcgtgaaactcgtggaagaagcgcagatgtccaaggccccaatccaacaactcgccgatagattttcaggatacttcgtcccgtttatcatcatcatgtccactctgactctcgtggtgtggattgtcattgggtttatcgatttcggagtggtacagcggtacttcccgaacccgaacaagcatatttcgcaaactgaggtgatcatccgctttgcctttcaaacgtcgatcaccgtcctctgcatcgcatgcccgtgctctctgggactggctactccgacggccgtcatggtggggaccggcgtggccgcgcagaacggaatcctgattaaaggagggaagccactggaaatggctcataagatcaagacggtgatgtttgacaaaacgggaacgatcactcacggagtcccacgcgtgatgagagtgctgctgctgggagacgtggccactctgccgctcagaaaggtcttggcagtggtcggaaccgcagaggccagctcggaacaccctctcggagtggccgtgaccaagtactgcaaagaagagctgggcaccgaaaccctgggctactgcactgactttcaagccgtgccgggatgcggtattggatgcaaggtgtccaacgtggaagggatcctggcgcatagcgaacgcccgctgtcggcgcccgcatcgcacctcaatgaggccggtagtctgccggccgaaaaagacgcagtcccgcagactttttctgtcctgatcggtaacagagagtggctccggcgcaacgggctgaccatctcgagcgacgtctcggatgcgatgaccgaccacgagatgaagggacagactgcaatcctcgtggccatcgacggagtgctgtgcggcatgatcgcgatcgccgacgctgtcaagcaggaagctgctcttgctgtgcatactctgcaatctatgggagtcgacgtggtgttgatcaccggcgataaccgcaagaccgctcgggcaatcgcaacccaggtggggataaacaaggtgttcgcagaagtgctcccttcgcacaaggtcgctaaggtccaggaactccagaataagggcaagaaggttgccatggtgggggacggtgtcaatgacagcccagcgctggctcaagccgacatgggagtggcaatcggtacgggcaccgacgtcgccatcgaagcggccgacgtggtgctgatcagaaacgatctgctggacgtcgtcgctagtatccatctctccaagagaactgtgcgccggatccgcataaatctggtgctggctcttatctacaatctggtggggattcccatcgccgcaggagtgtttatgccaatcggaatcgtgctgcagccttggatgggatccgcggccatggcggcctcatccgtctcagtggtgttgtcatcactccaactgaaatgctacaagaaacccgacctggagcggtacgaggcgcaagcacatggacacatgaagccgctcacggcctcgcaagtgagtgtgcatatagggatggatgatcgctggcgggactccccgcgcgcaaccccatgggatcaagtgtcctacgtgtcgcaagtctcgctttcatcccttacttcagataagccctccaggcacagcgcagcggccgacgatgacggagacaagtggtccctgctcctcaacggacgcgacgaagaacagtacatt

SEQ ID NO: 280170 - DNA, 4395 bp, Artificial Sequence
  derived and/or modified sequence
atgcctgagcaggaacgccagattaccgcacgggagggagcaagccggaagatcctttctaagctcagcctgccgacacgggcatgggagcctgccatgaagaagagcttcgccttcgacaacgttggatacgagggcgggctggacggcctgggaccatcctctcaggtcgctaccagcacagtcagaatcctcggcatgacttgccaatcctgcgtgaaaagcatcgaggatagaataagtaacctgaaaggcataatcagcatgaaggtgagtttggagcagggaagcgcaacagttaaatacgtcccttctgttgtgtgtctgcaacaggtctgccatcagattggggacatggggtttgaagcctcaatcgcagagggaaaggctgcttcttggccctctagatctctcccagcacaggaggctgtggtgaagttacgggtcgaaggaatgacatgtcagagctgcgtcagcagtattgaaggcaaagtccgcaagctgcagggtgttgtaagagtgaaagtgtcattgagtaatcaggaagccgtgatcacatatcagccctacctgattcaacctgaggatttacgcgatcacgtgaatgacatgggctttgaggctgcaataaaatctaaagtggctccactgagcctcggaccaatcgacatcgagcggcttcagtctacgaacccaaaaaggcctctcagctccgctaatcaaaattttaacaactctgagaccctgggtcaccaaggcagccatgtggtgacactccagctgcggatcgacgggatgcactgcaaatcatgcgtgctcaacattgaggaaaatataggccaacttctcggcgtccagtcaattcaagttagcttggaaaacaaaaccgcccaggtgaagtatgacccaagctgtacctctcccgtcgccctccaacgggctattgaggccctgcctccaggcaatttcaaagttagtctgcctgatggagctgagggcagcgggacagatcaccggtcaagctccagccatagtccaggatctccgccaaggaaccaagtccaaggaacctgttctacaaccctcatcgctatcgcaggcatgacctgcgcctcatgtgtacactctatcgagggcatgatatctcagcttgagggagtccagcaaataagcgttagccttgcagaaggcaccgccacagtcctctataatccaagcgtgatatctcccgaggaattacgcgctgctattgaagatatgggatttgaagccagcgtggtgtcagagagctgtagcacaaacccgctcgggaatcatagtgccggtaactctatggtccagaccacagatggaacccctaccagcgttcaggaggtggctccacatactgggaggcttccagccaaccatgcgcctgatatcctcgccaagtcaccccagagcactcgtgcagtggccccacaaaagtgcttcctgcagatcaaaggcatgacttgcgctagttgcgtgagcaacatagagcgcaaccttcaaaaagaagccggagttttatccgtgctcgtcgctttaatggccggcaaagctgagataaagtatgatcctgaggtcatccagccactggagattgcacagtttatccaagacctgggattcgaagccgccgtcatggaagactatgctgggtcggacggcaatatcgagcttaccatcacagggatgacctgtgctagctgtgtgcataacatcgaaagtaagcttacaagaactaacggaatcacatacgcgtcggtcgccctcgctacatcaaaagccttggtaaaatttgacccagagattatcggccctagagatatcataaaaatcattgaagagatcggattccacgccagcctggcacaacgtaaccctaacgctcaccatctggatcataagatggagatcaagcagtggaagaaaagcttcctgtgtagcttggtgtttggaattccagtgatggccttgatgatctacatgcttatcccctcaaatgagcctcaccaatctatggtgctcgaccataatattatacctggactcagcattttaaaccttatcttttttatcctctgtaccttcgtccagctgctgggaggatggtatttctatgtacaagcctacaagagcctgagacaccgctctgcaaacatggacgtgcttattgtgttagctacatcaatcgcttatgtctattctctggttatcctggtcgtggccgttgctgaaaaggctgagcggagtccagttacatttttcgatacaccgcctatgctctttgtgttcattgccctgggccgctggctggaacatttggccaaaagcaagacaagcgaggccctcgccaagctcatgagcctgcaggctactgaagcaaccgttgtgaccctgggtgaagataacctgattatccgcgaagaacaggtccccatggaacttgtacagcggggggacattgtaaaggtggtgccaggaggtaaattcccggtggatggcaaggtgctggagggtaacaccatggccgacgagagccttatcacaggcgaggctatgccagtgactaaaaagcccgggtccactgttatcgctggttctatcaacgcccatgggagcgtcctcataaaagcgacccatgttggcaatgataccactctggctcagatagtaaagttagtggaagaggcccaaatgagcaaggcacccatccagcagcttgctgatcgtttttccgggtactttgtcccattcatcatcatcatgagcaccctgacactggtcgtctggatcgttattggtttcatagattttggcgtggtccagagatacttccctaatccgaacaaacacatcagccaaaccgaggtcatcattaggtttgctttccagaccagcattaccgtgttgtgcattgcttgcccttgttcccttgggctggctacacctacagcagttatggtcggcactggcgtcgctgcccaaaacggcattctgatcaagggtgggaaaccactcgaaatggctcataaaattaagactgtgatgttcgataaaacaggtacaattacacacggcgtccctcgagtgatgcgcgttctactgttaggcgacgtcgctacactgccattacggaaggttttggcagtggtgggcactgccgaagccagtagcgaacacccactcggcgtcgctgttacaaaatattgcaaagaggaactgggaactgagacgctggggtactgcacagacttccaggctgtgccaggatgtggaatcggctgcaaggtttccaacgtcgaaggcatcttggcacactcagaaagaccgttgtcagctcctgcttcccatctgaacgaggctggaagcctgccagctgagaaggacgcagtccctcaaaccttcagcgtgctgatcgggaaccgggagtggctccgcaggaatggacttaccatatcaagtgacgtcagcgatgcgatgacggaccacgagatgaaaggacaaaccgctatccttgtagccatcgacggagtgctatgcgggatgattgcaattgccgatgctgtgaaacaggaggccgcattagcagtgcataccctgcagagtatgggcgtggacgttgtgctgatcacaggggacaacaggaagactgcccgggccattgctacccaggttggaatcaacaaggtgttcgcggaagtgctgccaagtcacaaagtcgctaaagtgcaggagctccaaaataaggggaagaaggttgccatggtaggggacggagtcaacgacagcccggctctggctcaggccgacatgggcgttgctatcgggacaggaaccgatgtggctattgaagcagcagacgtcgtgctgatcaggaacgatcttttagatgtcgtagcatcaatccacctttccaagaggactgtgcgcaggatccgcatcaaccttgtactggctctgatctataatcttgtcggaatccctatcgccgcaggagttttcatgcctatagggattgtgctgcagccatggatggggagcgcagccatggcggcttcatccgtttctgtggtgctgtcctccctccagctgaaatgctacaagaagccggacctggagaggtacgaggcacaggcacacggccacatgaaacctctgactgcctctcaggtttcggtccacattggcatggatgatagatggagggactcccccagggctactccatgggaccaagttagttacgttagccaggttagtctatcttctctgacaagtgataagccgtcaagacattccgctgctgccgatgacgacggcgataaatggagcctgctgctcaacggccgcgatgaagagcaatacatt

SEQ ID NO: 280171 - DNA, 4395 bp, Artificial Sequence
  derived and/or modified sequence
atgccagaacaggagagacagatcactgcacgcgagggagcgtcgcggaagattctttcgaagctctcattgccaaccagggcttgggaacccgcaatgaagaagtccttcgcattcgataatgtgggttacgagggaggacttgatggcctggggccatcgtcccaagtggcaacctcgacggtcaggatcctcgggatgacgtgccaatcatgtgtcaaatcgatcgaagatcggatttccaatctgaaggggataatctccatgaaggtgtcgctggaacaagggtccgccaccgtgaagtatgtgccctcggtggtgtgcctgcaacaagtgtgtcaccaaatcggtgatatgggatttgaagcatccatcgcagaagggaaggcagcaagctggccaagccgatccctgccagcacaggaggccgttgtgaagttgcgagtcgaggggatgacttgtcaatcgtgtgtgtcctccatagaggggaaggtgcgtaaactgcaaggagtcgtgagagtgaaagtgtcgctttccaaccaagaagccgtgatcacgtaccagccttacctgattcaacccgaagatctgcgggatcatgtgaacgacatgggttttgaagccgctattaagtccaaggttgcacctctgtcgttgggacccatagatatagaacgcctgcaatcaactaaccccaaacgacctttgagctcggcgaaccaaaactttaacaactcagaaaccctggggcatcagggaagtcacgtggtgacgctccagcttcgtatcgacggaatgcattgcaagagctgtgtgcttaacatcgaggagaatataggacaactgctgggcgtccaaagcatccaagtgtctctggaaaacaagaccgcgcaggttaagtatgatccttcgtgtacgtcgcctgtcgccttgcagcgagctattgaggcacttccgcctggtaacttcaaagtgtcattgccagacggagcagaaggatcggggaccgatcaccgcagttcatcctcgcattccccaggttcacccccacgtaatcaggtgcagggtacgtgttccacgactcttattgcgattgcgggcatgacttgtgccagctgtgtccattccatcgaaggtatgattagccaacttgagggagtgcagcagatctcagtgagccttgcagaaggaactgctaccgtcctctacaacccaagcgtgatcagcccagaggaacttcgcgcagccattgaggacatgggtttcgaggcctcggtggtaagcgagagctgttccactaacccacttggcaaccactccgcgggaaactccatggtgcagaccaccgacggaacccccaccagcgtgcaagaagtggcaccacataccggacgccttccagcaaaccatgctcccgatattcttgcaaagagcccccaatcgactcgggccgtcgcaccacaaaagtgctttctccagattaaaggaatgacttgcgccagctgtgtgagcaatattgagcgtaacctccaaaaagaagcaggagtgctgtcagtgctcgtggcactgatggccggcaaggcagaaatcaagtacgatccggaggtgatacaacctcttgaaatagctcagtttattcaggacctgggattcgaagcagcagtgatggaggactacgcaggctccgacggtaacattgaactgaccattactggtatgacctgtgcctcctgcgtccataacattgaatctaagctcaccagaaccaatggtatcacctacgcgtccgtggcgcttgcaacttcaaaagcgctggtgaagtttgatccggagattattggtcccagagatatcattaagattatcgaggaaataggtttccacgcgtcgcttgcacagcgaaaccctaatgctcatcatctcgatcataagatggagatcaagcagtggaagaagtcgtttctgtgctccttggtgttcggaatccctgtgatggctctgatgatatacatgcttatcccttccaacgaaccacaccaatcaatggtcctggatcacaacattatccctggattgagcattcttaacctgatcttcttcatcctgtgtaccttcgtgcagctgcttgggggctggtacttttacgtgcaagcatacaagagtctgcgccaccggtctgcaaatatggatgtcttgattgtgcttgcaactagcatcgcatacgtgtactcccttgtgattttggtggtggcggtggctgaaaaggcagaacggtcgccagtcaccttttttgatactccacccatgctgtttgtgtttatcgcactggggaggtggctggaacatctggccaagtccaagacgtccgaagcccttgcaaagctgatgagcctgcaagcaaccgaagcaaccgtggtgacccttggggaagataacctcattatcagagaagaacaggtgcctatggagctggtgcagagaggtgatatagtgaaagtcgttcccggtggtaagtttccagtggacggcaaagtgctggagggcaacactatggcggatgaaagcctgataactggcgaagccatgcccgtgactaagaagccgggatcaactgtcattgccggttcaatcaatgcgcatgggtcagtcttgattaaagcgactcacgtgggtaatgacaccaccctcgcacaaattgtgaaacttgtggaggaagcccaaatgtcgaaagccccaattcaacagctggccgatagattctccggctacttcgtgcctttcattatcatcatgtctactcttacccttgtggtttggattgtgataggctttattgacttcggcgtggtgcagaggtattttcctaatcccaacaagcacatttcccaaactgaggtgattatacgttttgcatttcagacctcaattactgtcctctgcatcgcatgtccctgtagtctgggtcttgcgaccccaacggccgtgatggtggggacgggagtggctgcacagaatggcattctgatcaaaggtggaaagcctcttgaaatggctcataagattaagaccgtcatgtttgacaaaaccggaactattacccacggagtcccgcgggtcatgcgtgtcctgcttttgggcgatgtggcaactcttcccttgcgcaaagtgcttgcagtcgtgggaactgccgaagcgtcgtcagagcatccactgggggtggcagtcaccaagtattgcaaggaagaactcggaactgaaactctgggatactgtaccgactttcaagcagtgccaggatgtggaattgggtgcaaagtgtcgaacgtggaaggaattctggcccatagcgagcggccactctcagcgcccgcatcacatctgaacgaagcaggttccctgcctgccgaaaaggatgcagtcccgcaaaccttttcagtgctgataggaaatagagagtggttgcgccgaaacggccttaccattagctcagatgtctccgatgccatgaccgaccacgagatgaagggacaaaccgccatccttgtggcaatcgacggtgtcctctgcggaatgattgcgattgccgacgccgtgaaacaagaggcggcactggccgtgcacacccttcaaagcatgggggtggatgtcgtcctgattaccggtgataaccgcaagaccgctcgtgccatcgcaacccaagtgggcataaacaaggtctttgcggaggtgctcccctcgcacaaggtggcaaaggtgcaggagctccaaaacaaaggtaaaaaggtggccatggtaggtgacggagtgaacgacagccctgctctggcccaggcagatatgggagtggcaattgggactggtacggacgttgcaattgaagcagcagacgtggtgcttatacgtaacgatctgcttgacgtggtagcctctattcatcttagcaaaagaactgtgcgccgcatccggattaatctggtgcttgcgcttatctataatctggtgggtattccgattgctgcgggagtctttatgccaatcggcattgtgttgcaaccgtggatgggctcagcagcgatggcggcttcgtcagtgtccgtggtgctttcgtcccttcaactcaagtgctacaaaaagcctgatcttgaacgctacgaggcacaagcacatggccacatgaaaccgcttaccgcatcgcaggtgtccgtccatatcgggatggatgacagatggagggactcacctagagccaccccctgggatcaggtgtcgtacgtgtcacaagtctccctgagctcgcttacttcggacaagccttcccgccactcggcagcagcggatgacgatggcgataagtggtcgctgctgctgaacggacgagatgaggagcagtacatt

SEQ ID NO: 280172 - DNA, 4395 bp, Artificial Sequence
  derived and/or modified sequence
atgcccgagcaggaacggcaaatcacagccagagaaggagctagccgaaaaatcctgagtaagctttccctgccaactagagcgtgggagcctgccatgaagaagtccttcgctttcgataacgtgggttacgaaggaggcttggacgggctcggaccctccagccaagtggcaacctccacagtgcggatccttggaatgacttgtcaatcatgtgtgaagagcattgaggatcggatctctaacttaaagggcattatctccatgaaagtcagcctcgaacaaggcagcgccactgttaaatatgttccctccgtggtatgcctgcaacaagtctgccaccagatcggagacatggggttcgaggcatcaattgcagaaggtaaagccgctagttggccaagtagatccctgcccgcacaggaagcagtcgtgaaactgagagtggagggaatgacctgccaaagctgtgtatcctcaatcgagggaaaagttcgcaaattgcagggcgtagtgagagtaaaagtgtccctctctaatcaggaggccgtgatcacataccagccttacctgattcagccagaggacctcagggatcacgtgaatgacatgggattcgaagccgcaattaagtccaaagtagcacccttgtccttaggtcctatcgacattgaacggctccagtctactaatcctaagcggccactgagctccgcaaaccaaaatttcaataatagcgagactctggggcatcagggctcacatgtagtcaccctacagcttcgcatcgacgggatgcactgtaagagctgtgtactcaacatcgaagagaacataggacagctcctgggagttcagtctatccaagttagtttggaaaacaagacagcacaagtgaaatacgatccttcatgcacctccccggtggctctgcaacgggccatcgaggccctccctcccggaaacttcaaagtcagcctgccagatggtgccgagggatccggtaccgaccacaggtcatcctcctcgcactctcccgggtctcccccaagaaatcaggtgcagggcacgtgctctacaaccttaatcgcaattgcaggtatgacatgtgcatcttgcgtccattcgatcgaagggatgatctcccagttagagggagtgcagcagatctccgtgtccctggcagaagggaccgctacggtgctatacaacccctccgttatctcacctgaagagttgagagcagcaatcgaggacatggggtttgaagcaagtgtcgttagtgagagttgctccacaaacccgttaggaaaccattccgcagggaactccatggttcagaccactgacggcacacccacctccgtgcaggaggtcgccccccatacaggacggctgcccgccaatcacgcccctgatatactggcaaagagcccccaatctacacgagccgttgctcctcaaaaatgcttcctccaaattaaaggtatgacctgcgcgtcatgtgtaagcaacatcgagcgtaatctacagaaggaggctggcgttttgtcagtattagttgccctgatggcaggcaaggcagagatcaagtatgaccccgaagttatccaacccctggaaattgcacagtttatccaagatctggggttcgaagcggcagtgatggaggactatgctggatcggacgggaatatcgagctgacgatcacaggcatgacttgtgctagttgtgttcacaacatcgagagcaagctgacgcgcacgaacggtatcacttacgcttccgttgctctggctacgtctaaggcgcttgtcaaattcgatccggaaatcattggtccccgggatatcatcaaaattattgaggaaattgggtttcacgcctcccttgcacagcgcaaccccaacgctcatcatcttgaccataaaatggaaattaagcagtggaagaaaagctttctgtgcagcttggtctttggtatcccagtgatggctctgatgatctacatgttaatcccatccaacgaaccccaccagagcatggtactggaccacaacattatccctgggttaagtatcctaaatctcatcttctttatcctctgtacgtttgttcagctgctgggtggctggtatttctatgtgcaggcttacaaaagtctacgccatcggtccgcaaacatggatgtgctcatcgtgctggccacatcaattgcctacgtttacagtctggtcatcttagtggtggccgtggcagagaaggcggaacgctcgccggtcaccttcttcgatacacctcccatgctatttgtgtttattgcacttgggcggtggttggagcacttggctaaatcgaagacatctgaggcgctggccaaactcatgtcactccaggctaccgaagctactgtcgtcacgctgggcgaagataacttgattatacgggaggaacaggtgcctatggagctggttcagcgcggcgacattgtcaaagtcgtgccgggggggaagttccccgtagatggaaaggtgttggaaggcaacaccatggccgacgaatcccttattacgggagaggccatgccggtgacaaaaaagccggggagtaccgtgatagcgggaagcataaacgcccatggctccgtactcatcaaggcaactcatgtaggcaatgatactacattggctcagatcgtcaaattagtggaggaggcccagatgtccaaagcacctatacaacagttagcagatcgattcagtgggtactttgtgccattcatcatcatcatgagcaccttgacactggtggtttggatcgtgatcgggttcattgactttggagtggtgcaacgctatttccccaatccaaataaacatataagccagacagaggtcataatcagatttgcatttcagacatcgatcacagtcctctgtattgcttgtccttgttcactcggtctagcaactcccacggcggtgatggtcggaaccggagtcgctgcccaaaacggaatactgataaaagggggaaaacccctggaaatggcccacaagatcaagaccgttatgtttgataagaccgggactatcactcacggcgtgccccgagtgatgagagtgcttctgctgggagatgtggccactctacctctgaggaaggtactagccgtggtgggcactgccgaggcgtcttcagagcaccctctgggcgtcgcggtcaccaaatactgtaaagaggaacttggcacagaaacactaggctattgtaccgattttcaagctgtccctggatgcggtattggctgtaaagtgagcaacgtcgagggcatcctggcccactccgagcgcccgttatctgctcccgcatcacaccttaatgaggcaggatctctgccggccgagaaagatgccgtgccccagacattcagtgtgcttattggaaatcgcgagtggttgaggagaaacggcctgaccattagcagtgatgtaagcgatgcgatgaccgatcacgaaatgaaaggacaaacagctatccttgtcgccatcgatggcgtgctctgcggcatgatagcgatcgccgatgccgttaagcaggaggcagccctggctgtccacacactccagagtatgggcgtcgacgttgtgctcataacaggtgataatagaaagaccgctcgcgccatcgccactcaggtgggtatcaataaggtttttgccgaagtgctaccatcccacaaggttgccaaagtgcaggaattacagaacaagggaaaaaaagtcgccatggtgggtgacggagtgaacgattctcccgcgctggctcaggccgatatgggcgtagctatcggcacaggaactgacgttgccatcgaagccgctgatgtcgtcctcattcggaatgaccttctcgacgtcgttgcatccattcacttgagtaagcgaactgtgcggcgaatcagaattaatctggtcctggccttaatctataacttggtcgggatccctattgccgctggcgtgttcatgcccattgggatcgtcctgcagccttggatggggtctgccgccatggccgcgtcctccgtcagcgttgttctgtccagtcttcagctcaagtgctataaaaagccagacctcgaaaggtatgaggcacaggcccacgggcacatgaagcctctgaccgccagtcaggtatctgtgcatatcggaatggacgaccggtggcgggactcaccaagagccactccctgggaccaggtgagttatgtgagccaggtgtccctgtcaagcctcactagtgataaacctagccgtcattcagccgccgccgacgatgatggcgataagtggagcctcctactaaacgggcgggacgaggagcagtacata

SEQ ID NO: 280173 - DNA, 4395 bp, Artificial Sequence
  derived and/or modified sequence
atgccggaacaggagagacagatcacagccagggagggggcctccagaaaaattctttccaagctctcacttcctacccgggcttgggagccagcaatgaagaagtcatttgcttttgataatgtgggttacgagggtggccttgacggtctgggtccaagttcccaggtcgcaacgtcaacagtgagaatcttagggatgacttgccagtcgtgtgtcaagtcgatagaggaccgcatctccaatctgaaggggattatcagcatgaaagtgtcactcgaacaggggtcggccacagtgaagtacgtgccgtcagtggtgtgtctgcagcaggtgtgtcaccagatcggggatatgggcttcgaggccagcatcgctgaagggaaggctgcctcttggccatcccgctctctgcccgcacaggaagccgttgttaagttgcgcgtggaaggcatgacatgtcagtcatgtgtctctagcatcgaaggtaaagtacgaaaactacagggtgtggtgcgggtcaaggtatctctctcaaatcaggaggcagtaatcacctatcagccttatttaattcagccagaagacctgagggaccatgtaaacgatatgggcttcgaagccgccattaaatccaaagtcgcccctctgagcctagggcccatcgacatagagaggctccagtccactaaccctaaaagaccgcttagctcagccaatcagaacttcaacaactccgaaaccttggggcaccagggctcacatgtggtcactcttcaactgcgcatagatggcatgcactgcaagtcctgcgtgctgaacattgaggagaatataggccagttgctcggcgttcagtccatccaggtgagcttggaaaataagacggctcaggtgaaatatgaccccagctgcaccagtccggtggccctgcagagggccattgaagcccttccacctggtaatttcaaggtttctctgccggatggcgccgagggctcaggcacggaccatcggtcatcatcctcccatagccctggatctccccccagaaatcaagtgcagggcacatgtagcacgactctaatcgctatagcaggcatgacatgtgccagctgtgtacattccatcgaaggcatgatcagtcaactggaaggcgtgcagcagatcagtgtgagcctggcggagggaaccgccactgttctgtacaacccttctgtgatctccccagaggagctgagagccgccatcgaagatatgggattcgaggcctctgttgtgagtgagagttgttccacaaaccctctgggcaaccattcagccggcaattctatggtccagacaacagatggtactcctacttctgtgcaagaagtggccccacataccggacgccttcctgccaatcacgctcccgacatcctcgccaagtctccacagagtaccagagccgttgccccacagaagtgcttccttcagatcaagggcatgacatgtgcaagctgcgtttcaaatatcgagcggaatctccagaaagaggctggggtgctctcggttctggtggccctgatggctgggaaggccgaaataaaatatgaccctgaagtgattcaacctctcgagattgcccagtttatccaggatctcggatttgaggcggccgtgatggaggactacgcgggatctgatggcaacattgaactgaccattactggaatgacgtgcgcttcatgtgtgcataatatcgaatcaaaactgacccggaccaacggcatcacttacgccagcgtggcactggctacatctaaggcgctggtcaagtttgatcctgaaattattggaccgcgagatattatcaagatcattgaagagatcggcttccatgcaagtttagctcagaggaacccgaacgcacatcatctagatcataaaatggaaattaagcagtggaagaaaagttttctctgtagtctcgtattcggaattcctgtcatggccctgatgatttacatgctaatcccaagtaatgaaccccatcagagtatggtgctcgaccataatatcatccccggtctttctatactcaatctaatcttctttatactgtgtaccttcgtacagcttctggggggatggtatttttatgttcaggcatacaagtcactgaggcatcggtccgctaacatggatgtactgatcgtgttagccacgagtattgcctatgtttacagtctcgtaatccttgtggtggccgtggcggagaaggccgaaaggtctcctgtcactttctttgacaccccgccaatgttatttgtattcatcgcactgggaaggtggttggagcacctcgccaagtctaaaacatctgaggccctcgctaagctaatgagcctgcaggccactgaagcaaccgtcgttacactgggagaggacaatctcatcattcgagaggaacaagtcccaatggaactggttcaaagaggcgacatagttaaggtcgtgccgggcggaaagtttcctgtggacgggaaagtgctcgagggaaacacaatggctgatgaaagtctgattactggcgaagccatgccggtgaccaagaaacctgggagtaccgtcattgccggctccataaatgctcatggttccgttttaatcaaagccactcatgtcggcaatgatacaaccctagcccagatagtaaagctagtagaggaagcccagatgagcaaggcccctatacagcagctggctgaccggtttagcggctacttcgtgccttttataattataatgtccactttaaccctcgttgtctggatagtgatcggcttcattgattttggcgtggtccaaaggtacttccccaatccaaacaaacacattagccaaaccgaagtcatcattcggttcgcctttcagacatcaatcacggtgctgtgcattgcttgcccctgtagtctgggcctggcaacccctaccgctgttatggttgggactggagtggccgcccagaatggaatactaatcaaaggcggaaaacccctggagatggcccataaaattaaaaccgtcatgtttgacaaaaccggtacgattacccacggcgttccgagggttatgcgagtacttctactcggtgacgtggccacccttccgctgcgcaaggtgttagcagtggttgggaccgcagaggcgtcgtctgagcatcccctgggtgtagccgtgaccaagtactgtaaagaagagctgggcaccgaaaccctcggctattgcactgatttccaggctgtgccgggttgcgggattggatgtaaagtctcaaacgtagaaggcattcttgcacactcagagcgccccttaagcgcccccgcctcccacttgaatgaagcgggaagcttacccgccgaaaaggacgcagttccgcagactttctcagtgctgattgggaaccgcgaatggttgcggcggaatggcctaactatttcaagcgatgtcagtgatgccatgaccgatcatgagatgaagggacagaccgcaattctggtcgcaatcgatggggtgctatgcggtatgatcgccattgcagacgcggtgaagcaagaggccgcactcgccgtgcacaccttgcagtcaatgggcgtagacgtcgtgctcattaccggggacaaccgtaaaaccgcgcgcgcaatagccacacaggtaggcataaataaagtttttgccgaagtgctgccatcacataaggtcgcaaaggttcaagagctccaaaataaagggaagaaggtcgccatggtgggagatggcgtcaacgattctcccgccctggcgcaagccgacatgggagtagctatcggtactgggaccgatgtggccattgaagcagcagacgttgtgctcatccgcaacgatttactggatgtggttgcaagtattcatctgtccaagagaacggtccgccggatccggatcaacctcgtgcttgccttgatctacaacctggttgggatcccaatcgccgctggcgtgtttatgcctatcggcatagtgctccagccttggatgggctccgctgctatggccgcttccagtgtgtccgtcgttttatccagtctgcagctgaagtgctacaagaaaccggatctggaacgctacgaggcacaggcccacggccacatgaagcctttaaccgcctcccaagttagcgtgcatattggcatggatgaccggtggcgtgattctccaagagccacaccctgggaccaggtgtcctacgtgtcgcaggtctcgttgagctcattgaccagcgataaaccaagcaggcattcggctgcagcagacgacgacggcgataagtggtctctgctcctcaatggcagggacgaggagcagtatatc

SEQ ID NO: 280174 - DNA, 4395 bp, Artificial Sequence
  derived and/or modified sequence
atgcctgagcaggaacgtcagattaccgcaagagagggtgcctcacgcaagatcctttcaaagctgtctcttcctaccagagcatgggaacctgccatgaaaaagtcttttgcttttgacaacgtcggctacgagggtggtttggatggactgggtccttcctcacaagtggctaccagcaccgtgcgtattctgggcatgacttgccagtcctgtgttaaaagtatagaagaccgcatcagtaacttgaagggtatcatctccatgaaagtctccctggagcagggatctgccactgtcaaatacgtaccttccgtagtctgcctgcagcaggtgtgtcaccagattggagatatgggtttcgaggcatcaatcgcagagggtaaggctgcctcttggccctcaagatcactgcctgcccaagaggccgtggtcaaactccgtgtggagggaatgacttgccaaagctgcgtgagttctatcgaaggcaaggtgcgtaagcttcagggtgtcgtcagagtgaaagtctcacttagcaaccaagaagcagtcatcacctatcagccctaccttattcaacccgaagacctgcgcgatcatgtcaatgacatgggattcgaggctgcaataaagtccaaggtggcaccattgtctctgggtcctatcgatatcgaacgtctgcaatccactaatccaaaacgtccactcagttcagctaaccaaaacttcaataatagcgagactctcggtcatcaaggctctcatgtggtgactctgcaactgcgcatcgatggaatgcactgtaagagctgtgtcctgaacatcgaagaaaacatcggacagctcctgggcgtgcagagcatccaagtgagcttggaaaataagactgctcaggtcaagtacgatccctcttgcacatctcctgtggctctgcaacgtgccattgaggccctgccacctggaaacttcaaggtgagcctgcctgacggcgctgagggatctggaaccgaccaccgctcctcaagtagtcatagccctggctctcctcccagaaatcaggtgcaaggcacatgctctactaccctcatcgcaattgccggtatgacctgcgctagttgcgtacattctatagaaggaatgatctctcagttggaaggcgtgcagcagattagtgtgagcctggctgagggaactgccaccgtcctgtataacccatctgttatcagccctgaagagcttcgtgccgcaatcgaagacatgggcttcgaagcatccgtggtttctgaaagttgcagcaccaatccactgggcaaccattccgctggaaacagcatggtgcaaacaaccgacggtacccctacatctgttcaggaagtcgcaccacacactggccgcctccccgctaatcacgctcccgatatcttggctaagagtccacagagtactagggcagttgctccccagaagtgtttcctccaaatcaagggtatgacatgtgcctcctgcgtatctaacatcgagagaaatttgcaaaaggaggcaggtgttttgtccgttctggtggcccttatggcaggaaaggccgagataaaatacgatccagaggtcatacagccactcgaaatagcccaatttattcaagacctgggttttgaagctgccgtgatggaagattacgccggtagcgacggcaatattgaactgaccatcaccggtatgacttgcgccagttgcgtgcacaacattgaatctaaacttacacgcacaaacggtatcacctacgcctccgtagctctcgctacctccaaagctctggtgaagttcgacccagagatcatcggtccaagggacatcatcaagattattgaggagatcggatttcatgcaagtctcgcacaaaggaaccccaacgctcaccacctcgatcacaagatggaaataaaacaatggaagaaatccttcctgtgctcattggtgttcggtatccccgtgatggctctgatgatttatatgctgattccctctaacgagccacatcaaagtatggtgctggaccacaacataattccaggactgtccattctcaacctgatattcttcatcctgtgcactttcgtccagttgctgggaggctggtatttctacgtacaggcttacaagtcactgcgccatagatcagctaacatggatgtgcttatcgtactcgctacttccatcgcctacgtatattctctggtgatattggtggtggccgtggctgaaaaggctgaacgtagtcccgtgacttttttcgatactccccctatgctgttcgtatttattgccctcggccgttggctggagcacctcgctaagtctaagacttctgaagcactggctaaactgatgagcttgcaggcaacagaagctactgtcgtgactcttggcgaagataatctgattatccgcgaagagcaggtgccaatggaactcgtgcagaggggcgacatcgtaaaggtggtgcccggcggaaaattccctgtggacggcaaggtcctggaaggaaatactatggctgacgagtcactgattactggtgaagccatgcctgttacaaaaaaacccggtagtaccgttatcgctggatccattaatgctcatggctcagtccttattaaggctacccacgtgggcaatgacactaccctcgcccagatagtgaagctggtcgaggaggcacagatgagcaaggctcctatccagcagctggccgataggtttagcggttactttgtcccattcatcatcatcatgagcaccctgactttggttgtctggatcgtcatcggtttcattgatttcggcgttgtgcagcgttacttccctaatcctaacaagcatatatcccagactgaagttatcatcaggtttgctttccagaccagcatcacagttctgtgtatcgcttgcccttgcagtttgggccttgctacacctactgcagtgatggttggcaccggcgtcgcagcccaaaacggcatcctgatcaagggcggtaagcccctcgaaatggctcacaagatcaagaccgtgatgttcgataaaacaggtaccatcacccatggtgtgccacgtgtaatgcgcgtcctcctcctgggtgatgtggccaccctgcccctccgcaaagtgttggcagtagtaggaactgcagaggcttcttccgaacacccactcggcgtggctgtaacaaaatactgcaaagaggagcttggaactgagacacttggctactgtactgactttcaagccgtgcctggctgcggaatcggatgcaaggtaagtaacgtagagggaattctggcacactcagaacgtcccttgtcagcccctgcttctcacctcaacgaggccggttcacttcccgctgagaaggatgccgtgccacagacattttcagtcctgattggcaacagagaatggcttagaagaaacggcttgaccatatccagcgatgtgagtgatgctatgaccgaccacgaaatgaagggtcaaacagctatcctggtggctatcgacggcgtactctgcggaatgatcgccatagcagatgccgtgaagcaggaggcagcacttgccgtgcacactctgcagagcatgggtgttgacgtggtgctcataactggagataataggaagaccgctcgcgcaatcgctacccaggtcggcatcaataaggttttcgccgaggtactcccttcacacaaggtagccaaggtgcaggagttgcagaacaagggtaaaaaagtggccatggtgggcgacggagtaaacgattcccctgcccttgcccaggccgatatgggcgtggcaattggtaccggtactgatgtagcaatcgaggccgctgacgtggtgcttatcagaaatgatctgctggacgtggttgcttccatccacctgtctaaacgtacagtaagacgtattcgtattaaccttgtgctggccctgatttacaatctcgtcggcatccctatagctgccggcgtcttcatgcctattggaatcgtgctccagccttggatgggatctgctgctatggctgcttcctccgtttccgtcgtcctgagttctctgcagctgaaatgttacaaaaagcctgatcttgagaggtatgaggcccaagcacatggacatatgaaaccactcacagccagccaggtctccgtccacatcggcatggatgatcgctggcgtgatagcccaagagccaccccttgggatcaggtctcatatgtcagccaggtttctctttcatcactgacttctgacaagccctcaaggcattctgccgctgcagacgacgacggagataaatggtccctccttcttaacggcagggacgaagaacaatatatc

SEQ ID NO: 280175 - DNA, 4395 bp, Artificial Sequence
  derived and/or modified sequence
atgcccgagcaagagcggcaaatcaccgcaagagagggcgcatcccgaaaaatattgtctaagctgtcactacctactagagcgtgggaaccagccatgaagaagagctttgcgttcgacaacgtgggttacgaggggggtctggacgggcttgggccttcctcccaggtggccacgtcgaccgtgcggatcctagggatgacctgccaatcatgcgtcaagagtatcgaggaccgaatcagcaatttgaaaggcattatatctatgaaagtttcgttagagcagggttctgcgaccgttaagtatgtccctagcgttgtttgcctgcagcaggtttgccaccagattggagatatgggttttgaggcctctattgccgagggcaaggcggccagctggccgtcacgatcacttccggcccaggaggcagtcgttaagctaagagttgaagggatgacctgccaatcttgtgttagttcaattgagggtaaggttcggaaattacagggcgtggtgcgggtgaaagtcagtctttcgaaccaagaggcggtcataacatatcagccctacctcatacaaccagaggatctgcgggaccacgtcaacgatatgggcttcgaagctgcgatcaagtctaaggttgcaccactgtctcttggcccgatcgatatcgagcgtttacaaagcacaaatcccaagcgtcccctgtcctcagctaatcagaacttcaacaacagcgagacactcggccaccaaggaagtcatgtggtaacgcttcaactgaggatcgacggtatgcattgcaaaagctgtgtcctgaacatcgaggagaacatcggtcagcttctgggggtccagtccattcaggtgtctctcgaaaacaaaactgcccaagttaaatatgacccatcctgcacctcaccagtagcgttgcagagagcaattgaagccttgccacccggcaacttcaaggtcagccttcctgacggcgcagaaggttcgggaacggatcacagatccagcagttcccacagccctggtagcccaccgcgcaaccaagtgcaggggacctgctcgacaaccttgatcgcaatcgcagggatgacttgtgcttcctgcgtccacagtatagagggtatgatatctcagctcgaaggtgtccaacaaatcagcgtctctttagccgaagggactgcaacagtgctttacaacccttcggtgatttcaccggaagagcttcgagctgctattgaggatatgggctttgaagcatccgtggtcagtgagtcatgctctaccaacccgcttggtaatcactctgctggtaattcgatggtgcaaacgaccgatgggaccccgacttccgtccaggaagttgcccctcacacaggacgactcccggcgaatcacgctcccgacatcctcgcgaaatcccctcagagcactcgagctgttgcccctcagaaatgtttcctccagattaagggcatgacttgcgcctcctgcgtctcaaatatcgagcgaaacctccagaaggaggcgggcgtgctttccgttctcgtggcactcatggctggaaaggctgagattaagtatgacccggaagtcattcaacccctggagattgcacaattcatacaggaccttggctttgaagccgctgttatggaagattacgctggatctgatggcaacattgaactgactatcactggaatgacttgcgcgtcctgcgttcacaatattgagagtaaactgacaagaactaacggaatcacgtacgcctccgtggcgctcgccacatcaaaagcccttgtgaaattcgatccagaaatcataggtccgcgcgacattatcaagataatcgaggagattggcttccatgctagcctggctcagcgtaaccccaacgcccaccacctcgatcataagatggaaattaagcagtggaagaagtcctttctgtgcagccttgtatttggaatccctgtgatggcgctgatgatttatatgctcatcccatccaatgaacctcatcagtcgatggtcttggatcataatataataccaggtctgtcgattcttaaccttatcttttttatcctctgcacttttgtgcaattactgggtggatggtacttttatgtccaggcatacaagtcccttcgtcatcggtcagcgaatatggatgttttgatcgtgctagcaacgagcatcgcttatgtctatagtctcgtcattcttgtggttgcggtggcggagaaagcagagcgatctcctgtaacgtttttcgacacacctccaatgctgttcgtttttatcgcgttaggtcgttggttggagcatctagcaaagtccaagacgtcagaggctcttgccaagctgatgtctctgcaagcgacggaagctacggttgtaaccttgggagaggacaacctcataattcgggaagagcaagtccccatggagctcgtacaaagaggggatattgtgaaggttgtgcctggagggaagtttcctgttgatggtaaggtgctggagggtaatacgatggctgacgagagcctcatcactggagaggcaatgcctgtcacaaagaaacccggctccactgtcatcgccggatcgatcaacgctcacggctcagtgctgatcaaggctacacacgttggaaacgatacaacgcttgcacaaatcgtgaagttagtcgaggaagctcagatgtccaaggcgccaatacagcagcttgctgatcgattttctggctattttgttcccttcatcatcatcatgtctaccttgacccttgtcgtttggattgtgattggattcatagattttggcgttgtccagcgctatttccccaacccaaataagcacatctcgcagacggaggtgatcatacggttcgccttccagacttccattaccgtgttgtgtattgcgtgtccttgttcgctgggcctggcaacccctacagctgtaatggtcggcaccggcgtggccgcacaaaacggcattctcatcaaaggcggcaaacctctagagatggctcacaagatcaagactgtaatgttcgataagaccggtacaattactcacggtgttccccgagttatgcgagttctattgcttggcgatgtcgccaccctcccgttgcgaaaggttctggcggtggttgggacagcagaggcgtcttctgagcatcctttgggtgtagcagtcaccaagtattgtaaagaggaattaggaacggagacgcttggttactgtaccgacttccaagctgtaccggggtgtggaattggatgtaaggttagtaatgttgaagggatcctggcacactctgagcggcccctatctgctcccgcttcccatttgaacgaggcaggcagcctgcctgcagaaaaggatgcggtgcctcagactttctcagtgctgatcggtaatcgcgagtggctccgtcgcaacgggctgaccatcagttcggacgtctcagacgctatgacagatcatgaaatgaagggtcaaaccgccatcctggtggcaatagacggtgtgctgtgtgggatgatagcaatcgccgatgctgtgaagcaggaagcagcgcttgccgtccacacgctacagtccatgggtgtcgatgtcgtactcataaccggtgacaaccggaagaccgcccgtgccatcgctacgcaagtaggtatcaacaaagtgttcgccgaggtcctaccctcacacaaagtcgcgaaagtacaagaactgcagaacaagggtaagaaggttgccatggtcggagatggagttaacgactcacccgcccttgcccaggcggacatgggcgtcgcgatcggcaccggtacggacgttgccatcgaggcggcggacgtcgtgttgatccgtaacgacctgctggatgtggtggcctcgattcatctttcgaaacgaactgtgagacggattaggataaacctggtccttgcgttgatctacaaccttgtaggtatccctattgctgctggcgtttttatgccgattggtatcgttctccagccatggatgggttcggccgccatggcagcgtcatcggtctcagtcgttctttcctcacttcagctcaagtgttataagaagcccgatttagaaaggtatgaggctcaggcgcacggtcatatgaagccgctaacggcctcacaggtttcggttcatataggtatggatgacaggtggcgggattcacctcgggccactccttgggaccaggtctcttacgtcagccaagtctctctgagctcacttacgtccgataagccctcgcgacattccgcagccgcggacgatgacggcgacaagtggtcccttctgcttaacggacgtgatgaagaacaatacatc

SEQ ID NO: 280176 - DNA, 4395 bp, Artificial Sequence
  derived and/or modified sequence
atgccggagcaggaaagacaaatcactgcccgcgaaggcgccagtcgcaaaatattgtcgaagctgtcgttgccgacccgtgcctgggaacctgccatgaagaagagttttgcgttcgacaacgtaggatacgaggggggcctggacggactagggccatcgagtcaggtggcgacaagtactgtgcgcattctaggcatgacctgccagagctgcgtgaagtcgatagaggaccgcatcagcaatctgaagggtattattagtatgaaggtttctttggagcagggttcagccaccgtaaagtacgttccctcagtggtttgcttgcaacaggtctgtcatcaaattggtgatatgggcttcgaagccagcatagcagagggcaaagccgcctcctggccgagtcggagcttgccagcccaggaagccgtggtcaaactgcgggtggagggtatgacctgccagagctgtgtgtcctctattgaagggaaggtgcgcaaactacagggagtcgtcagggtcaaggtgtctctgagcaaccaagaagccgtgattacctaccagccatacctgattcaaccggaggatcttcgtgatcatgtgaacgacatgggctttgaagccgcgattaagtccaaagtcgcccccctgtcactgggtcccatcgatatcgaacggctgcaatcgactaatccgaagcgcccgctgtcatccgccaatcagaatttcaataattccgagaccctcggacaccagggaagccatgttgtaaccctgcagctgcgcattgatggcatgcattgcaagtcgtgcgtgctaaacatagaggaaaacatcggccaactactcggtgtccagagcatacaggtgtccctagaaaataagacagcccaggtcaaatacgatccgagctgtacatcaccggtggccttgcaacgggccatcgaggcgctgcccccaggaaactttaaggtgtcgctccccgacggtgcggagggaagcggcacagatcacaggagctccagctcccactcgccaggtagcccaccgcgcaaccaggtccagggaacttgttctacgacgctgatcgccattgcaggcatgacctgcgctagctgcgtacactctattgaaggaatgatcagccagctggagggtgtgcagcaaatctctgtttctttggcggagggcacagcgactgtactgtataatccatccgtgatctctcccgaagagttgcgtgccgctatcgaggacatgggcttcgaggcctctgttgtatctgagtcctgttcgaccaacccactcggtaaccattcggctggaaacagtatggtgcagacgacagacggcacgccgacgtccgtccaggaggtggccccgcatactggccgtctgccagctaatcacgctccagacatcctggccaagtccccacagtccacccgcgccgttgccccccagaagtgctttttgcagatcaagggaatgacgtgcgcgagttgtgtgtctaatattgagcgcaatctgcagaaggaagccggcgtcttgtccgtgctggtggcgttaatggcgggaaaagcggagatcaagtacgaccccgaggttatacaaccactcgagatagcccagttcattcaggatctgggcttcgaagcagctgtgatggaagactacgccggctcggatggaaatattgagctgaccattacaggtatgacctgcgccagctgtgtgcacaacatcgagtcaaagttgacccgtacgaatggcattacttacgccagcgtcgcgcttgccacctccaaggctttggtgaagttcgatccggaaataataggaccacgggacattataaagatcatagaggagataggattccacgcttcgctggcacaacgcaatccgaacgcgcaccaccttgatcacaagatggaaataaagcagtggaagaagagcttcttgtgcagccttgtgtttggtatccctgtgatggcgctaatgatctacatgctcatcccatccaacgagccccaccaaagcatggtcctcgatcacaatataatcccaggtctatccattttgaatctgatcttttttattctgtgcacctttgtccagttgctcggaggctggtacttttacgttcaagcttacaagagcctacgccatcgcagcgccaacatggacgttctaatcgttctcgccacaagcattgcttacgtgtattcactggtgattttggttgtggccgtagcggagaaggcagagagatccccggtgaccttcttcgacacgccccccatgctcttcgttttcatagcgctcgggcgttggttggagcatctggccaagtccaaaacctctgaggccttggccaaactcatgagcctccaggccacggaagccacagtggttaccctcggtgaggacaacttaattatcagggaggagcaagtcccgatggagctggtgcaaaggggcgacattgtgaaggtcgtccccggcggcaaattcccggtcgatggtaaagtgctagaaggcaatacgatggccgacgagagtctaataaccggtgaggcgatgcctgtgaccaagaaacccggatcaacagtgatcgctggcagtattaatgcgcatggaagcgtgttgattaaggctactcacgtcggtaatgataccaccttagctcagattgtgaagctcgtggaggaagcccagatgagtaaagcgcccattcaacagctagccgatcggttctccggatacttcgttccgttcataatcatcatgtcgacactgactctagtcgtgtggatcgtgatcggttttattgattttggcgtggtgcagcggtatttccccaatccgaacaaacatatctcacagaccgaggttatcattcgctttgcgtttcagactagcattacggtgctgtgtatagcctgcccctgcagcttgggactggcaacacctaccgccgtgatggtgggtacgggcgtcgccgcccaaaatggtatccttattaagggtggtaagcccttagaaatggcccacaagataaaaaccgtcatgttcgataagactggcactattacccatggggtgccgcgtgtgatgcgggtcctcttgctgggcgatgtcgcaacgctgccactccgaaaggtattggcagtcgttggaacagccgaggccagcagtgagcaccccctgggagtggcggtgaccaagtattgcaaggaggaactcggaacggagactctgggatattgcactgatttccaagccgtgccgggctgcggaattggctgcaaggtttcgaacgtagaggggattctggcgcactcggagcgtcccctgtccgctcctgcttcacacctcaacgaagctggaagtttgccggcggagaaggatgccgtaccccagaccttcagcgtgctgatcggcaatcgtgagtggctccgccgcaacgggctgaccatctccagcgacgtcagcgatgccatgactgatcacgagatgaagggccagacggcgatccttgtggcgatcgatggtgtcctgtgtggtatgatcgcgattgcagatgccgttaaacaagaggcggccctcgccgtgcacacgttacagagcatgggtgtcgatgtggtgttaatcaccggggataatcgaaagacggccagggccattgcgacgcaagtgggcataaataaggtcttcgcagaggtcctaccgtcccataaggtcgcaaaggtacaggaactccaaaacaagggcaagaaagttgcgatggttggagatggcgtgaatgattcgccggcgctggcccaagcggatatgggagtggcgatcggaaccggaaccgatgtggccatcgaagcggctgacgtggtgctgattagaaatgacctgctggatgttgtagctagtatacacctaagtaagcgtaccgtgcgacgcatccgtataaatttggtgctcgcgttgatttacaacctggtgggaattccaatcgcggccggcgttttcatgcctatcggcattgtgttacaaccatggatgggcagtgcggcgatggctgcgtcctcggtctccgtggtcctgtcctcccttcagttgaaatgctataaaaaaccggaccttgaacgctacgaagctcaggcccacggccacatgaagcccctcacggcctcgcaagtgtcggttcatattggcatggacgatcgctggagggattccccgcgcgctacaccgtgggaccaggtgtcgtatgtcagccaggtgtctttgagctcgttgaccagcgataagcccagtcgccattcagcagccgcggatgacgatggggacaagtggtcacttctgctgaacggccgtgatgaagagcagtacatc

SEQ ID NO: 280177 - DNA, 4395 bp, Artificial Sequence
  derived and/or modified sequence
atgccagagcaggagcggcagattaccgcccgagaaggcgcatcccgtaagatcttatccaagctgtctctcccaacccgggcttgggaacctgctatgaaaaagtctttcgcattcgacaatgtaggttacgagggggggttagatggcctgggcccatcatcacaggtggccaccagtaccgtccggattctggggatgacatgtcaatcatgtgtgaaatccatcgaggatagaatttcaaacctaaaggggatcatttctatgaaggtgtccctggaacagggaagtgctactgtaaaatacgtgcctagtgtcgtttgtctgcagcaggtttgccatcaaattggcgatatgggatttgaagcttctattgccgaggggaaagctgcttcctggcctagcaggagcctgccagcacaggaagctgttgtgaaactgagagtggaaggcatgacctgtcagtcatgcgtttcctccattgaaggaaaggtccgcaaactccagggagtggtgagggtgaaagtgtcactctccaatcaagaagctgtgatcacctatcagccctatctgatccagcctgaagacctccgcgaccacgtaaacgacatgggtttcgaggctgccatcaaatcaaaggtggctcccctcagtttaggccctattgacatcgagaggttacagtccaccaatcccaagcgacctctatcatccgcgaaccagaatttcaataatagcgagactctgggacaccagggctcacacgtggtcaccctgcaactgagaatagatggaatgcactgcaaatcttgtgtgctaaacatcgaagagaacattggacagctgctgggagtccagagtattcaagtctctttggagaataaaactgcgcaggttaagtatgacccgtcttgtacctcacctgtcgcactgcaaagagcgatcgaggcgttgcctccaggtaacttcaaggttagtctcccggacggcgccgaggggagcggaaccgatcaccggagtagctcatcccactcccccggtagtccgcccagaaaccaggttcagggcacctgcagcaccacacttatcgccatcgcaggcatgacgtgcgcatcttgtgtgcactctatcgagggaatgatctctcagctcgagggagtgcaacaaatctcagtgtccttggccgagggaaccgcgaccgtgttatacaatccaagcgttatatctcccgaggagctgcgcgcggccattgaggacatgggctttgaagcctctgtggtgagtgagtcatgttctactaatcctctaggcaatcactctgcgggtaactctatggtgcaaaccaccgatggtacccctacctccgtgcaagaggtggcgccacacactgggcgtttgccggccaaccatgcccccgacatactcgctaaaagcccccagagtactagggccgtggccccgcagaagtgtttcctgcaaatcaaggggatgacctgtgcttcgtgcgtcagcaacatagaacgcaacctgcagaaggaggccggagttctaagcgttcttgtcgctctgatggctggcaaagccgaaattaaatacgaccccgaggtgattcaaccactggagatcgcgcaattcatccaggacttggggtttgaagccgcagtcatggaagactatgctggctctgatggaaatatcgagttaacaattaccgggatgacttgtgcgtcttgcgttcacaatattgaatcaaagctgacccgcaccaacgggattacgtatgcttctgtggctttagccacgtccaaagctctagtaaagttcgacccagaaatcattggcccccgggacatcattaagattatcgaagagatcggatttcacgcctcgttggcgcagagaaatccaaatgcccaccacttggaccataaaatggagataaagcagtggaagaagtcattcctttgcagcctagtcttcggcatccccgtaatggcgctcatgatatacatgctgattcctagcaacgaacctcaccaatccatggttttggaccacaatattatccccggcctgagtattctgaacctgatcttcttcattctctgtacatttgtgcagctacttggaggttggtacttttacgtacaggcttacaagtctctcaggcataggtccgccaatatggatgtgttgatcgtacttgcaacatccatcgcctatgtgtattccctggtcattctggttgtagctgtggccgagaaagccgagagaagtcctgtgaccttcttcgacaccccccctatgttgttcgttttcatagcgctgggccgctggctggagcatctggctaaatccaaaacatcagaagcactggctaaactaatgtcacttcaggctaccgaggcgactgttgttactctgggagaagacaacctgatcattcgagaggagcaagttccgatggagctggttcagaggggagatatagtgaaagttgtgcccggaggcaaattcccggtcgacgggaaggttttggaaggcaatacaatggccgacgagagtctgatcaccggcgaggccatgccagtaacgaagaagcccggttctaccgtgattgcggggtctataaacgctcacggctcggtattaattaaggccacccatgtgggtaacgacaccacactggcacagatagtgaagttggtggaagaggcacaaatgagtaaggcccccatccagcaattggcagacagattttcgggatattttgtgccattcataataattatgtccaccctgactcttgtggtctggatagtgatcggcttcatcgacttcggggtggtgcagcgatactttccgaaccccaacaagcatattagtcaaacagaggtgataattcgcttcgcattccaaacatccatcacagttctgtgcatagcttgtccatgctcactcggcctggccactcctaccgctgtcatggtcggaaccggggttgcagctcagaacggtatcctcatcaaaggggggaagcccctggagatggctcacaagatcaagacagtgatgttcgacaaaacaggcaccatcactcacggggtacctagagtgatgcgggtgctactgctcggggacgtggccactctgccactgcgcaaagtgttggccgtcgtgggtacagctgaggctagtagtgagcaccctctgggagtagctgttacaaaatattgcaaggaagagcttggaaccgagacgctgggctactgtactgacttccaggcagtaccgggatgtggcattggttgcaaagtgtcaaacgtggaaggtattcttgcccactcggaacggcctctcagcgctccagcctctcacctcaacgaagcgggcagcctgccagcagagaaggatgctgttccacagacgttctccgttttgatcggcaaccgagagtggctacgtagaaacggcctgactatctcttctgatgtgtccgatgccatgaccgaccatgagatgaagggccagacagcaatcttggtggccatagacggcgtcctgtgtgggatgatcgcaatcgcagacgccgtgaagcaggaggccgcactggccgtgcatacactgcagagtatgggagtggatgtggtgctgatcacaggagataatagaaagaccgctcgtgccatcgctacacaggtgggcatcaacaaggtttttgccgaagtcctgcctagccataaagtggccaaagtgcaggagctccaaaacaagggaaagaaggttgccatggtgggcgacggcgtgaatgactcccctgccctggctcaagctgacatgggagtcgctattggaacaggcactgacgtggctattgaagcagctgatgtggtgctcatccggaacgatttgctcgacgttgtggcgtcgattcatcttagcaaacgcacggttcgcaggattagaattaacctcgtgctagctctgatatataatcttgtaggtatacccatcgccgctggcgttttcatgcccatcggaatcgtcctccaaccatggatgggttccgctgccatggccgcaagtagcgtcagcgtggtgctgtccagcctccagctcaaatgctacaagaaaccagatttggagaggtacgaggctcaggcgcatgggcatatgaagcccctcaccgccagtcaagtgagtgtgcacatcggcatggacgatcgctggcgggactcccccagggcaaccccatgggatcaggtttcgtacgttagccaggtcagcttatcttcacttacaagcgataagccgtctagacactcagccgccgctgatgacgacggggataaatggagcctccttctaaacgggcgtgacgaagagcagtacatc

SEQ ID NO: 280178 - RNA, 4541 nt, Artificial Sequence
  derived and/or modified sequence
gggaaauaagagagaaaagaagaguaagaagaaauauaagagccaccaugccggagcaggagaggcagauuacagcgagagagggcgcaucacggaagauccugucgaaacucucgcugcccacccgcgcaugggagccugcgaugaaaaaguccuucgcguucgauaacgugggauacgagggugggcuggauggacuggggccaucgucccaaguagcgacgagcacgguaagaaucuuggguaugacgugccagucauguguaaaguccauugaggaccgcaucucgaacuugaagggaauuaucucgaugaagguaucccuugagcagggaucggcgacugucaaguaugucccuucgguggugugccuucagcaggucugucaccagaucggggacauggguuuugaggcguccaucgccgaaggaaaagccgcauccuggcccagccgaucccuucccgcacaagaagcggugguaaagcuccgcgucgaagggaugacgugucaaucaugcgugucaagcauugaaggcaaagugcggaaacugcagggugugguacgagugaaagugucccugagcaaccaagaggcggugaucacuuaucagccauaucucauccagccagaggaucugcgggaucacgucaaugauaugggguuugaggcagcgaucaaaucgaaaguagcuccccugucgcuggggcccauugauaucgagcggcugcagucaacaaaccccaagaggccccuuagcucggccaaucagaauuucaauaacagcgaaacacucgggcaucaggggucccauguagugacccuucagcuccggauugaugggaugcauugcaaaagcuguguccucaacaucgaggagaauauuggucaguugcuuggggugcagucgauccaagugucgcuugaaaacaagaccgcgcaggugaaguaugauccuucaugcacaucaccgguggcgcugcagagggcgaucgaagcguugccuccgggaaauuucaaagucagccugccggauggggcggaaggaucggguacggaccaccggucaagcuccagccauucacccggcucgcccccaagaaaccagguccaggggacgugcuccacgacucucaucgcaaucgccgggaugacaugugcgucaugcguccacagcauugaggguaugaucucacagcuugagggagugcagcagaucagcgucagccucgcggagggaacggccacaguccucuauaacccuagcgucaucucgcccgaagagcugagagcggcuauugaggacaugggguucgaggcguccguggugucggagagcuguucgacgaacccacuggggaaucacucggcgggaaauucgaugguccaaacgacagauggaacgcccacguccgugcaagagguggcaccacauacgggaagauugcccgcgaaucacgcgccugacauucuugcgaagucgccccagucaacucgcgccguggcaccccaaaagugcuucuugcagaucaagggaaugacgugcgcaagcugcgugagcaacauugagaggaaccuucaaaaagaagccgggguccucucaguccucguggcguugauggcuggaaaggcggaaaucaaauacgacccagagguaauccagccucuugagaucgcgcaguuuauccaagaccucggauucgaagcugcagugauggaagauuacgcggggucagaugggaacaucgagcucacuaucacgggcaugaccugcgcuucguguguccacaauaucgaguccaagcugacuaggacgaacggaauuacauaugcgucaguagcucuggcgacguccaaagcccucgucaaauucgaucccgagaucauuggaccgcgggacaucauuaagauuauugaagaaaucggauuucacgcuagccucgcucagagaaaccccaacgcccaccauuuggaccacaagauggagauuaagcaguggaagaaaucauuccuuuguucccugguguuuggaaucccggucauggcgcuuaugaucuacaugcucaucccuucaaacgaaccucaccaaucgauggugcuggaucacaacauuauuccgggguugucaauccucaaccucaucuucuuuauccuuugcacuuuugugcagcuccuuggcggaugguauuucuaugugcaggcguacaaaucccugcgacacagaucagcaaauauggauguacugauuguccuggcgacaagcauugcguacguauacagcuuggucauuuugguaguggccguagccgaaaaggcagaaagaucaccggucacuuucuucgacacaccgccuaugcuuuuuguguucaucgcucucggacgcuggcuggaacaccuggcaaagagcaagacaucggaagcauuggccaaauugaugucgcuccaggccaccgaggcaacuguggugacguugggggaagauaaccugauuauucgggaagagcagguacccauggaacucgugcagagaggagauauugugaaggucguaccgggugggaaguuucccguagacggaaaaguguuggaagggaauaccauggcggaugagagcuugauuacgggagaagcgaugccugugacgaagaagccuggaucgacagucauugcgggaucgaucaacgcacaugguucgguacuuaucaaagcaacgcacguggguaaugacacuacucuggcccagaucguaaagcucguggaagaagcacaaaugagcaaagccccgauucagcaacuggccgaucgguucagcgguuacuucgugcccuuuaucauuaucaugucgacccuuacacucguaguguggaucguaauuggguucaucgacuuuggagugguccagcgguacuuuccaaauccuaacaaacauauuucgcaaacugaagugaucauccgcuuugcuuuccaaaccucaauuacaguacucuguaucgcguguccaugcucauugggcuuggcuacgcccacggccguaaugguagggacgggagucgcagcgcagaauggaauccugaucaagggcgggaaaccccuugagauggcacacaaaaucaagacagucauguucgacaagacggggacaauuacucacggugugccccggguaaugcgcguguuguugcucggggacguggcgacauugccgcugaggaaggucuuggcggucgugggcacagcggaagccucgucggagcacccgcugggaguggcgguaacgaaguauugcaaagaggaacucggcacugaaacgcugggcuacugcacagauuuucaagccgugcccgguugcgggauuggcuguaaagugagcaauguggaagggauucucgcgcacucagagcgaccacucucggcaccggcuucgcaucucaaugaggccggaucccugccagccgagaaggaugcugucccgcagaccuuuuccguguugaucggcaaccgggaguggcuuaggcgcaacggguugacgauuucgucggaugugucagacgccaugacagaucaugagaugaagggacagacagcgauccuggucgcgauugacggaguguugugcgguaugauugccaucgccgaugcgguaaaacaggaagcggcgcucgcuguccacacgcuccagucaauggggguagacguagugcugaucaccggggacaaccgaaagaccgcucgcgccaucgccacgcaagucgggauuaacaagguguucgccgaggugcuccccucgcacaagguagcaaaaguacaagaacugcaaaacaaagggaagaagguagcgauggugggggauggugugaacgacucgccggcacucgcucaggcggacauggguguagccaucggaacaggaacugacguagcuaucgaggcggccgacguaguccucauuaggaaugaccucuuggacgucgucgcaucgauccaucuuucgaagcgcacugucaggcgcaucaggauuaauuuggugcuggcccugaucuacaacuuggugggaauccccaucgcagcgggaguguucaugcccaucgguauuguacugcagccauggauggggucggccgcaauggcagcgucaagcguaucgguaguauugagcuccuugcagcucaagugcuacaagaaaccugacuuggagcgcuacgaggcacaggcgcacggccauaugaagccgcuuacggcaucccaaguguccguccacauugggauggaugauagguggcgggauucacccagggcaacacccugggaccaggugucauauguaucgcaggugucgcucucgucccuuacaucggauaagcccucaaggcacagcgcggcugcggacgacgauggugauaaauggucacuccugcugaauggacgcgacgaagaacaguacauuugaagcgcugccuucugcggggcuugccuucuggccaugcccuucuucucucccuugcaccuguaccucuuggucuuugaauaaagccugaguaggaag

SEQ ID NO: 280179 - RNA, 4398 nt, Artificial Sequence
  derived and/or modified sequence
augcccgagcaggaaagacagauaaccgcacgggagggcgccucuaggaaaauucuuagcaagcugucacuaccuacaagggcuugggagcccgcaaugaagaagucauucgcuuuugacaacgucggcuacgaggggggacuggauggucucgguccaagcagccaagucgcaaccagcaccgugcgcauccucggaaugacgugucagagcugugugaaaagcaucgaggaccgcaucagcaacuuaaagggcauuauuucuaugaaggugucuuuagagcagggaagugccacuguuaaauacgugcccaguguugugugccugcagcaagugugucaccagaucggcgacaugggauucgaagccucaauagccgaggguaaagccgcguccuggcccuccaggucccucccagcccaggaagcugucguaaaacucaggguagaagggaugacuugccagaguugcgucucaucgaucgaaggaaaaguucgcaaauugcaaggcguuguucgggucaaggugagucucuccaaucaagaagcuguaauuacguaccaacccuaccuuauccagccagaggaccucagggaccacguuaaugacaugggauucgaggcggccauuaaauccaagguugcgccgcugucucugggcccuaucgauaucgagcgccuccagagcacaaauccaaagagaccacuguccagcgcuaaucagaauuucaauaacagugaaacacuggggcaccagggcucacacgugguaaccuuacaacugcguauugacggaaugcacugcaaaagcugcguguugaauauagaggagaauaucggacaguuacugggugugcaaucaauccaagugagccuggaaaacaaaacugcccaggugaaauaugacccgucuugcaccagccccgucgcccugcaacgggcaaucgaggcccucccuccuggaaauuuuaagguuucacugccugacggugcugagggcagcggcacagaucaccggucuucuucuagccacucaccaggcucccccccaagaaaucaaguacagggaacuugcucuaccacacuaaucgcgauagccggcaugaccugcgcuucuugcguccacucaauugaggguaugaucagucagcucgaagggguucagcagaucagcgucagcuuggcagagggcacagccaccgugcuuuacaauccguccgucaucucgccagaagagcuccgggcugcaauugaagacaugggguuugaagccuccgucgucagugagagcuguaguacuaacccuuuggggaaucacagugccgggaauagcaugguucagaccacugacgggacgccaacaagugugcaggagguugccccccacacuggaagacugccagcgaaccacgcacccgauauucucgcaaagagcccccaaagcacccgggcugucgccccccaaaaaugcuuccuccagauaaaaggaaugacaugcgcaucaugcguaucaaauaucgagagaaaucugcaaaaagaggccggggugcugucgguguugguggcccucauggcugggaaggcagagaucaaauaugacccugaagugauccaaccgcuggaaaucgcucaguucauucaggauuugggcuuugaggccgcugugauggaagacuaugccggaucugaugggaauaucgagcugacuaucacugggaugaccugcgcuagcugcgugcauaacauugagaguaaguuaacccgcacuaacggcauuacuuaugcuucaguugcccuggccacuuccaaggcguuaguaaaguucgaccccgaaauuauugggccccgagauaucaucaaaauuauagaggaaauuggauuccacgcuucccuugcucagagaaauccuaaugcacaucaccuggaucacaagauggaaauuaaacaauggaaaaagagcuuucuguguagcuuggucuucggaauaccagugauggcccucaugaucuacaugcucauuccuucuaaugagccucaccagaguaugguucuggaucacaauauuauucccggauuaucaauucucaauuugaucuuuuuuauucuuuguaccuucgugcagcugcuaggaggaugguauuucuacguccaagccuacaagucacuucgacaccgcagcgcgaauauggacguucugaucgugcuggcuacuucaaucgcauacguguauagucuagugauccugguuguugcuguggccgagaaagcggagagauccccugucacguuuuucgauacacccccaauguuguuugucuucaucgcgcuaggccguuggcucgaacaccuugcaaagucaaagaccucggaggcccucgccaaguuaaugucccugcaggcaaccgaagcgaccguugugacuuugggcgaagacaaucuuaucauaagagaggaacaagucccaauggaacuggugcagcgcggggacaucgucaaggucguuccaggaggaaaguuuccuguggauggcaagguccuagaggggaauaccauggcagaugagucccuuaucaccggugaggcaaugcccguaacuaagaaaccaggauccacaguaauugcagguagcaucaaugcccauggcuccgucuuaauaaaggccacccaugucgguaaugauacuacccucgcucagauuguuaagcucguggaagaagcucagaugucuaaagcccccauucagcagcuagcggacagguuuuccggcuacuuugugccuuuuauuauuauaaugagcacacucacacuggucguguggaucgugauagguuucauugacuucgggguaguucagcgguauuuuccaaaccccaauaagcauaucagccagacagaggugaucauccgguucgcauuccagaccuccaucacagugcucuguaucgcauguccuugcucacugggacuagcuaccccuacagcugucauggugggcacaggcguggcugcgcagaacgggaucuugauuaagggaggcaaaccacuggagauggcccacaagauuaagaccgugauguuugauaagacugggacaaucacacacggcgugcccagggugaugcgaguacucuugcucggagacgucgcgacucuuccucuacgcaagguacucgcuguagugggcacugcggaagccagcagcgagcacccccuuggaguggcugugaccaaauauugcaaggaggagcugggaaccgagacguuaggcuacuguacagacuuucaggcuguaccagguugugggaucgggugcaaggugaguaacguagagggaauucuggcccacuccgaaaggccguugagugcccccgcaucccaccuuaaugaggcaggaucacuacccgccgaaaaagaugccgucccucaaacguuuagcguucuuauaggaaauagagaauggcucaggcggaacggauugaccaucaguuccgaugugagcgacgccaugaccgaucaugagaugaaagggcagacugcgaucuuaguugccauugauggcgugcuguguggaaugaucgcaaucgcggacgccgugaagcaggaagcagcucuggcgguccacacccuccagucuauggggguggacguugugcucauaacaggcgacaaccgcaaaacagcacgagccauagccacccaagucggaauuaacaaaguauucgcugaagugcuucccucccauaaaguugccaaagugcaggagcugcagaacaaaggcaagaagguggccauggugggugauggaguuaaugauucacccgcucuugcccaagcggacauggggguggccaucggaaccgggacugauguagcaauugaggccgcagauguggugcucauacgaaacgaccugcuggacgugguagccucuauacaucugagcaaaaggacuguccgaagaauaagaaucaaucucguucuugcccugauuuauaauuuggucgggauccccaucgcugcgggaguguucaugccgaucgggauugucuuacaaccauggaugggaagcgccgcgauggccgccagcucugugagcguggugcugucaucccuucagcugaaauguuacaaaaagcccgaccuagagcgcuaugaggcccaagcucacggacauaugaaaccucuaacagccagccaagugucaguccacaucggcauggacgauagguggcgcgauucaccgagggcuaccccuugggaccaggucuccuaugugagccaggucucccugucgagccugaccuccgacaagccaucucggcauagugccgcagccgacgacgauggugacaaguggagucugcuucugaacgguagagacgaagagcaauauaucuag

SEQ ID NO: 280180 - RNA, 4398 nt, Artificial Sequence
  derived and/or modified sequence
augccugagcaagagcggcagauuacagcuagagaaggagcaagucguaaaauacugaguaaacucagcuugccaacuagagccugggaacccgccaugaaaaaaucauucgcuuucgauaacgucggcuacgaagggggacuagacggccucggaccgagcucucaggucgcgaccaguaccguucggauccugggaaugaccugucaaaguugugugaaauccaucgaggaccguaucucuaacuugaaagguauuaucucaaugaaaguuagucuugaacaggguucugcaacugucaaguacguacccuccguugugugucuucaacaggugugccaucaaaucggggauauggguuucgaggcuuccaucgcugagggaaaggcugccagcuggcccagccgcucacuucccgcacaggaggccguaguuaagcugagggucgagggcaugacaugucaaucaugcgugaguaguauagagggaaaaguucgaaaguugcaaggagucgugagagugaaagucagucugagcaaccaggaagccguuauaacuuaccagccguaccuaauccaaccggaagaucucagggaccauguaaacgauauggguuucgaagcugccaucaagucuaaaguugccccucugagucugggaccuaucgauauugaacgucuucagaguacaaauccaaaaagaccccugucauccgccaaucaaaacuucaauaacagugagacacugggacaccagggaucucacgugguuacccuacagcugaggauugacgguaugcauugcaaaucuuguguauugaauauagaggaaaauauuggucagcuucugggaguacagucaauccagguuuccuuggaaaacaaaaccgcucaagugaaauaugacccaucaugcacaucccccguugcccugcaacgcgccaucgaagccuugccacccggaaauuucaaaguaagccuccccgauggggcggaaggcucaggcaccgaccauaggucuuccagcucucacucaccuggaagccccccccgaaaccagguucagggcacgugcagcaccaccuuaaucgcuaucgccgguaugacuugugccucauguguacacucuaucgaagggaugauaagccaacuggagggcguacagcagauaagcgucucccucgcugaagggaccgcaaccguccucuauaauccgucuguuauuucuccagaagaguuacgugcagcaauugaggauaugggauuugaggcuaguguaguguccgagucuugcucuaccaacccacuuggcaaccauucggccgguaacagcaugguucagacaacagacgguacaccaacuuccguucaagagguggccccacacaccggacgucugccagcuaaucacgccccugauauucuggccaagaguccccagucgacccgcgcaguugccccgcagaagugcuuccugcagauuaaaggaaugacgugcgcuagcugugugucuaacaucgaaaggaauuugcagaaggaggcugguguccuuagugugcuggucgcgcucauggcagguaaagcagaaaucaaauacgauccagagguuauccagccauuggagaucgcacaguucauacaggacuuaggauucgaggcagcuguaauggaagauuaugccgggucagauggaaauaucgagcucaccaucaccggaaugacaugcgccuccuguguccauaacauugaaucaaaacucacacgaaccaacggcauuacguacgcauccgucgcucucgccacuuccaaagccuuagucaaguuugauccagaaauuaucggcccacgugauauuauuaaaaucaucgaagaaauuggcuuccacgccucucuagcccaacguaauccgaacgcccaucaccuggaucacaaaauggagaucaaacaauggaaaaagaguuucuugugcagucucguguucggaauucccgugauggcacuaaugauauauaugcugauucccuccaacgagccgcaucaaucuaugguacuggaccacaacauuauuccugggcuuuccauucucaaccuaaucuuuuuuauucuuuguaccuucgugcagcugcuaggaggaugguauuucuacguccaagccuacaagucacuucgacaccgcagcgcgaauauggacguucugaucgugcuggcuacuucaaucgcauacguguauagucuagugauccugguuguugcuguggccgagaaagcggagagauccccugucacguuuuucgauacacccccaauguuguuugucuucaucgcgcuaggccguuggcucgaacaccuugcaaagucaaagaccucggaggcccucgccaaguuaaugucccugcaggcaacggaagcgaccguuguaacccugggugaggauaaucugauaauuagggaggaacaggucccuauggaacucgugcaaagaggcgauauagugaaggucgucccaggaggcaaguucccggucgacgguaagguguuggaaggcaauaccauggcugaugaaucacugaucaccggagaggcaaugccuguuaccaagaagccugguaguaccgugauugcugguagcauaaacgcccauggauccguguuaauuaaagccacacauguagguaacgacacuacccuagcucagaucgucaaacucgucgaagaggcccagaugucaaaagcucccauacaacaacuggccgauagguuuucaggcuacuuuguuccguuuaucauuaucaugucuacucuuacacucguugucuggaucgugaucggguuuauagacuucgggguaguacagagauacuucccuaauccgaacaagcacaucagucaaacagaggugaucauaagauuugcguuucaaaccucuauaaccgucuugugcauugccugccccugcucacucggacucgcgaccccuaccgccgugaugguuggcacgggcgucgcugcucagaauggaauauugaucaagggggggaagccacuugagauggcucauaaaauaaagacugugauguucgauaaaaccggaacaauuacacacgguguaccucgggugaugcggguccugcuccugggcgauguagcaacccuuccccugcgcaagguucuagccguaguagguacagccgaagcaucaagugagcauccucugggcguugccgugaccaaguauugcaaagaagagcugggcacagagacccucggauacuguacagacuuucaagccguuccagguugcgggauuggguguaaggugucuaacgucgaagggauccucgcccacagugagcguccgcugagugcuccugcuucucaucucaacgaggccggcucuuuacccgcggagaaagacgccgucccccagacauucuccgugcuuauuggaaauagggaaugguuacgcaggaauggccugacaauuucaucugacguuuccgaugccaugacugaccacgagaugaaagggcagacagcaauucuggucgcgaucgauggaguccugugcgggaugauugcuauugcagaugccgugaagcaggaagccgcucuggcuguucacacuuugcagagcaugggcguagaugucgucuugauuacaggugacaaucggaaaacagcaagagcuauagcaacacaagugggcauuaauaagguauuugccgagguccucccaucccauaaagucgccaagguacaggagcugcagaacaaaggcaagaagguggccauggugggagauggcguaaaugacucaccugcccuagcucaagccgacaugggcgucgcaaucggcacaggcacagauguugcuauugaagcagccgacgucguccuaaucagaaaugaucuacuggaugucguggcuucuauccaccuuucuaaaagaaccgugcgccgaauucggaucaaccugguacuggcacucauuuacaauuuggugggcauuccaaucgcagccggaguauucaugcccauaggaaucgugcuucagccauggauggguucugcagcaauggccgcgucaaguguuucaguggugcuuaguuccuugcaacugaagugcuauaagaaaccggaucuggaaagauacgaggcacaagcccacggccacaugaaaccucucaccgcuucucaagucucagugcacaucggaauggaugacagguggagagauuccccccgcgcgaccccuugggaucaaguauccuauguaagccaagugucgcuuucaagccugaccucugauaaaccaagcagacauuccgccgcugcugaugacgacggagauaaguggucccuacuacucaauggacgggacgaggaacaauauaucuag

SEQ ID NO: 280181 - protein, 1035 aa, Artificial Sequence
  derived and/or modified sequence
MPEQERQITAREGASRKILSKLSLPTRAWEPAMKKSFAFDNVGYEGGLDGLGPSSQVATSTVRILGMTCQSCVKSIEDRISNLKGIISMKVSLEQGSATVKYVPSVVCLQQVCHQIGDMGFEASIAEGKAASWPSRSLPAQEAVVKLRVEGMTCQSCVSSIEGKVRKLQGVVRVKVSLSNQEAVITYQPYLIQPEDLRDHVNDMGFEAAIKSKVAPLSLGPIDIERLQSTNPKRPLSSANQNFNNSETLGHQGSHVVTLQLRIDGMHCKSCVLNIEENIGQLLGVQSIQVSLENKTAQVKYDPSCTSPVALQRAIEALPPGNFKVSLPDGAEGSGTDHRSSSSHSPGSPPRNQVQGTCSTTLIAIAGMTCASCVHSIEGMISQLEGVQQISVSLAEGTATVLYNPSVISPEELRAAIEDMGFEASVVSGEAMPVTKKPGSTVIAGSINAHGSVLIKATHVGNDTTLAQIVKLVEEAQMSKAPIQQLADRFSGYFVPFIIIMSTLTLVVWIVIGFIDFGVVQRYFPNPNKHISQTEVIIRFAFQTSITVLCIACPCSLGLATPTAVMVGTGVAAQNGILIKGGKPLEMAHKIKTVMFDKTGTITHGVPRVMRVLLLGDVATLPLRKVLAVVGTAEASSEHPLGVAVTKYCKEELGTETLGYCTDFQAVPGCGIGCKVSNVEGILAHSERPLSAPASHLNEAGSLPAEKDAVPQTFSVLIGNREWLRRNGLTISSDVSDAMTDHEMKGQTAILVAIDGVLCGMIAIADAVKQEAALAVHTLQSMGVDVVLITGDNRKTARAIATQVGINKVFAEVLPSHKVAKVQELQNKGKKVAMVGDGVNDSPALAQADMGVAIGTGTDVAIEAADVVLIRNDLLDVVASIHLSKRTVRRIRINLVLALIYNLVGIPIAAGVFMPIGIVLQPWMGSAAMAASSVSVVLSSLQLKCYKKPDLERYEAQAHGHMKPLTASQVSVHIGMDDRWRDSPRATPWDQVSYVSQVSLSSLTSDKPSRHSAAADDDGDKWSLLLNGRDEEQYI

SEQ ID NO: 280182 - DNA, 3108 bp, Artificial Sequence
  derived and/or modified sequence
atgcccgagcaggagagacagatcaccgccagagagggcgccagcagaaagatcctgagcaagctgagcctgcccaccagagcctgggagcccgccatgaagaagagcttcgccttcgacaacgtgggctacgagggcggcctggacggcctgggccccagcagccaggtggccaccagcaccgtgagaatcctgggcatgacctgccagagctgcgtgaagagcatcgaggacagaatcagcaacctgaagggcatcatcagcatgaaggtgagcctggagcagggcagcgccaccgtgaagtacgtgcccagcgtggtgtgcctgcagcaggtgtgccaccagatcggcgacatgggcttcgaggccagcatcgccgagggcaaggccgccagctggcccagcagaagcctgcccgcccaggaggccgtggtgaagctgagagtggagggcatgacctgccagagctgcgtgagcagcatcgagggcaaggtgagaaagctgcagggcgtggtgagagtgaaggtgagcctgagcaaccaggaggccgtgatcacctaccagccctacctgatccagcccgaggacctgagagaccacgtgaacgacatgggcttcgaggccgccatcaagagcaaggtggcccccctgagcctgggccccatcgacatcgagagactgcagagcaccaaccccaagagacccctgagcagcgccaaccagaacttcaacaacagcgagaccctgggccaccagggcagccacgtggtgaccctgcagctgagaatcgacggcatgcactgcaagagctgcgtgctgaacatcgaggagaacatcggccagctgctgggcgtgcagagcatccaggtgagcctggagaacaagaccgcccaggtgaagtacgaccccagctgcaccagccccgtggccctgcagagagccatcgaggccctgccccccggcaacttcaaggtgagcctgcccgacggcgccgagggcagcggcaccgaccacagaagcagcagcagccacagccccggcagcccccccagaaaccaggtgcagggcacctgcagcaccaccctgatcgccatcgccggcatgacctgcgccagctgcgtgcacagcatcgagggcatgatcagccagctggagggcgtgcagcagatcagcgtgagcctggccgagggcaccgccaccgtgctgtacaaccccagcgtgatcagccccgaggagctgagagccgccatcgaggacatgggcttcgaggccagcgtggtgagcggcgaggccatgcccgtgaccaagaagcccggcagcaccgtgatcgccggcagcatcaacgcccacggcagcgtgctgatcaaggccacccacgtgggcaacgacaccaccctggcccagatcgtgaagctggtggaggaggcccagatgagcaaggcccccatccagcagctggccgacagattcagcggctacttcgtgcccttcatcatcatcatgagcaccctgaccctggtggtgtggatcgtgatcggcttcatcgacttcggcgtggtgcagagatacttccccaaccccaacaagcacatcagccagaccgaggtgatcatcagattcgccttccagaccagcatcaccgtgctgtgcatcgcctgcccctgcagcctgggcctggccacccccaccgccgtgatggtgggcaccggcgtggccgcccagaacggcatcctgatcaagggcggcaagcccctggagatggcccacaagatcaagaccgtgatgttcgacaagaccggcaccatcacccacggcgtgcccagagtgatgagagtgctgctgctgggcgacgtggccaccctgcccctgagaaaggtgctggccgtggtgggcaccgccgaggccagcagcgagcaccccctgggcgtggccgtgaccaagtactgcaaggaggagctgggcaccgagaccctgggctactgcaccgacttccaggccgtgcccggctgcggcatcggctgcaaggtgagcaacgtggagggcatcctggcccacagcgagagacccctgagcgcccccgccagccacctgaacgaggccggcagcctgcccgccgagaaggacgccgtgccccagaccttcagcgtgctgatcggcaacagagagtggctgagaagaaacggcctgaccatcagcagcgacgtgagcgacgccatgaccgaccacgagatgaagggccagaccgccatcctggtggccatcgacggcgtgctgtgcggcatgatcgccatcgccgacgccgtgaagcaggaggccgccctggccgtgcacaccctgcagagcatgggcgtggacgtggtgctgatcaccggcgacaacagaaagaccgccagagccatcgccacccaggtgggcatcaacaaggtgttcgccgaggtgctgcccagccacaaggtggccaaggtgcaggagctgcagaacaagggcaagaaggtggccatggtgggcgacggcgtgaacgacagccccgccctggcccaggccgacatgggcgtggccatcggcaccggcaccgacgtggccatcgaggccgccgacgtggtgctgatcagaaacgacctgctggacgtggtggccagcatccacctgagcaagagaaccgtgagaagaatcagaatcaacctggtgctggccctgatctacaacctggtgggcatccccatcgccgccggcgtgttcatgcccatcggcatcgtgctgcagccctggatgggcagcgccgccatggccgccagcagcgtgagcgtggtgctgagcagcctgcagctgaagtgctacaagaagcccgacctggagagatacgaggcccaggcccacggccacatgaagcccctgaccgccagccaggtgagcgtgcacatcggcatggacgacagatggagagacagccccagagccaccccctgggaccaggtgagctacgtgagccaggtgagcctgagcagcctgaccagcgacaagcccagcagacacagcgccgccgccgacgacgacggcgacaagtggagcctgctgctgaacggcagagacgaggagcagtacatctag

SEQ ID NO: 280183 - DNA, 3108 bp, Artificial Sequence
  derived and/or modified sequence
atgcctgagcaggaacgccagatcactgcccgcgagggcgctagtcgaaagatactctcaaagttgtcactgcccacccgcgcctgggagcctgcaatgaaaaaatccttcgctttcgacaatgttggctatgagggggggctggacggactcgggccatcctctcaggtcgccaccagtaccgttaggatcctgggaatgacatgccaaagctgtgtgaaatctattgaggataggatctcgaatctgaaaggcatcatcagcatgaaggtgtctttagagcagggcagtgcaactgtgaaatatgtccccagtgtggtatgtctgcagcaagtctgccaccagatcggggatatgggtttcgaagcatccatagcagagggcaaggccgcctcatggccttcaaggtcactacctgcccaggaagctgtggttaaactacgagtcgaaggcatgacctgtcagtcgtgtgtgagcagtattgaaggtaaagtgcgaaaactgcagggggtggtgcgggtgaaagtgtctttatccaatcaggaggccgtgattacataccagccctaccttattcaacctgaagatttacgagatcatgttaacgacatgggcttcgaagccgcgattaagagcaaagtggcaccgttatccctaggcccgattgacatcgaaagacttcaatcaacgaatcctaagagaccgctctcttccgccaaccagaactttaataacagcgaaacacttggccaccagggatcacatgtggtcacactccaacttcggatcgacgggatgcactgcaagtcctgcgtgcttaatatcgaagagaacattggtcagttactcggagtccagagtatacaagtgtccctggagaacaagacagcacaggtgaaatacgacccatcttgtacctcacccgtcgcccttcagcgggccatcgaggctttgcctcctggcaacttcaaggtcagcctgcccgacggcgctgaaggctctggcactgatcatagatcgagcagcagccatagccccggcagcccgccacggaaccaggtgcagggaacatgttccaccacccttatcgctattgcaggtatgacctgtgcgagctgcgttcacagcatagagggcatgattagccagcttgagggcgtacagcagattagcgtatcactggcagagggtaccgctaccgtgttatacaaccccagtgtcatctctcccgaagagctgagagccgccatcgaggatatgggttttgaagccagtgtcgtgtctggagaagcaatgcctgtcacaaaaaaacctgggagcactgtgatagctgggtcaataaatgctcatgggtccgtgttgatcaaagcaacccacgtaggaaatgacactacactagcacagatagtcaagttggtggaagaggcccagatgtctaaggcacctatacagcagcttgccgatcgcttctcaggatatttcgtgccatttattattatcatgtctactttgacattggtggtctggatagttatcggtttcatcgatttcggtgtagtgcaacgctacttcccaaatccgaataaacacattagccagacagaagtgatcattagattcgcctttcagacttcaatcacagtgctctgtattgcttgtccatgcagcctcgggcttgcgactcccaccgccgttatggtcggtaccggagtggctgctcaaaatgggattctgatcaaggggggcaagcccctcgagatggcccacaaaataaaaacagttatgttcgataaaactgggacgataactcacggagtgcctcgagtaatgcgggtgctcctacttggggatgtggctaccttgccgctcagaaaggtgttagcagtggtgggcactgcagaggctagctccgagcatccactgggcgtggcagttacaaaatattgtaaggaagaactcggtaccgagacacttggttactgcaccgattttcaggctgtccctggttgtgggattggatgtaaggtgtctaacgtggagggtatcctggcccacagcgagcgccccctgtccgctccagcttcccatcttaacgaggcgggctctcttcctgcagagaaagacgcagttccgcagactttctctgtcctcatcggcaatagagaatggctgcgcaggaacgggcttacgatttcctctgacgtctctgatgctatgactgaccatgaaatgaaggggcagacagcaatcctagtcgctatagacggggttctgtgtggtatgatcgccattgctgacgcggtgaagcaagaggcagccctggctgttcacactcttcagtcaatgggagttgacgttgtgttaattactggggataacaggaaaacagcccgagccatcgccactcaggtggggattaacaaggtgtttgcagaagtcttaccatcccacaaagtcgctaaggtgcaagagctgcagaataaggggaagaaggtagcaatggtgggtgatggcgtgaatgatagtcccgccctggcccaggctgatatgggggtggcaatcggaaccggaacagacgtggcgatcgaagcagcagatgtggtgctcatccgcaatgatctgctggacgtggttgcgtcaatccatctgtctaaaagaaccgtacgtagaatcagaattaatctggttctggctttgatctataacttagttggcataccaatcgcagccggagtctttatgcccattggaattgtgctccagccctggatgggctctgcagctatggccgcttcaagtgtctctgtggtgctgtcctcgttgcaattgaagtgctataagaagcctgacctcgaaagatatgaggctcaggcgcacgggcacatgaaaccactgacggcatcccaggtgtctgtgcatatcggaatggacgatcgttggcgtgattccccacgagcaaccccatgggatcaggtgtcttatgtctcacaggtgagtctttctagcctgacttccgataaaccctcccggcacagcgcagccgcagatgacgacggagacaagtggtctctcctactcaatggcagagatgaagagcagtatatttag

SEQ ID NO: 280184 - DNA, 3252 bp, Artificial Sequence
  derived and/or modified sequence
cgctctcctccaccgaccaggtgaccttttgctctgagccagatcagagaagaattcggtgtccgtgcgggacgatgcctgagcaggagagacagatcacagccagagaaggggccagtcggaaaatcttatctaagctttctttgcctacccgtgcctgggaaccagcaatgaagaagagttttgcttttgacaatgttggctatgaaggtggtctggatggcctgggcccttcttctcaggtggccaccagcacagtcaggatcttgggcatgacttgccagtcatgtgtgaagtccattgaggacaggatttccaatttgaaaggcatcatcagcatgaaggtttccctggaacaaggcagtgccactgtgaaatatgtgccatcggttgtgtgcctgcaacaggtttgccatcaaattggggacatgggcttcgaggccagcattgcagaaggaaaggcagcctcctggccctcaaggtccttgcctgcccaggaggctgtggtcaagctccgggtggagggcatgacctgccagtcctgtgtcagctccattgaaggcaaggtccggaaactgcaaggagtagtgagagtcaaagtctcactcagcaaccaagaggccgtcatcacttatcagccttatctcattcagcccgaagacctcagggaccatgtaaatgacatgggatttgaagctgccatcaagagcaaagtggctcccttaagcctgggaccaattgatattgagcggttacaaagcactaacccaaagagacctttatcttctgctaaccagaattttaataattctgagaccttggggcaccaaggaagccatgtggtcaccctccaactgagaatagatggaatgcattgtaagtcttgcgtcttgaatattgaagaaaatattggccagctcctaggggttcaaagtattcaagtgtccttggagaacaaaactgcccaagtaaagtatgacccttcttgtaccagcccagtggctctgcagagggctatcgaggcacttccacctgggaattttaaagtttctcttcctgatggagccgaagggagtgggacagatcacaggtcttccagttctcattcccctggctccccaccgagaaaccaggtccagggcacatgcagtaccactctgattgccattgccggcatgacctgtgcatcctgtgtccattccattgaaggcatgatctcccaactggaaggggtgcagcaaatatcggtgtctttggccgaagggactgcaacagttctttataatccctctgtaattagcccagaagaactcagagctgctatagaagacatgggatttgaggcttcagtcgtttctggagaagccatgccagtcactaagaaacccggaagcactgtaattgcggggtctataaatgcacatggctctgtgctcattaaagctacccacgtgggcaatgacaccactttggctcagattgtgaaactggtggaagaggctcagatgtcaaaggcacccattcagcagctggctgaccggtttagtggatattttgtcccatttatcatcatcatgtcaactttgacgttggtggtatggattgtaatcggttttatcgattttggtgttgttcagagatactttcctaaccccaacaagcacatctcccagacagaggtgatcatccggtttgctttccagacgtccatcacggtgctgtgcattgcctgcccctgctccctggggctggccacgcccacggctgtcatggtgggcaccggggtggccgcgcagaacggcatcctcatcaagggaggcaagcccctggagatggcgcacaagataaagactgtgatgtttgacaagactggcaccattacccatggcgtccccagggtcatgcgggtgctcctgctgggggatgtggccacactgcccctcaggaaggttctggctgtggtggggactgcggaggccagcagtgaacaccccttgggcgtggcagtcaccaaatactgtaaagaggaacttggaacagagaccttgggatactgcacggacttccaggcagtgccaggctgtggaattgggtgcaaagtcagcaacgtggaaggcatcctggcccacagtgagcgccctttgagtgcaccggccagtcacctgaatgaggctggcagccttcccgcagaaaaagatgcagtcccccagaccttctctgtgctgattggaaaccgtgagtggctgaggcgcaacggtttaaccatttctagcgatgtcagtgacgctatgacagaccacgagatgaaaggacagacagccatcctggtggctattgacggtgtgctctgtgggatgatcgcaatcgcagacgctgtcaagcaggaggctgccctggctgtgcacacgctgcagagcatgggtgtggacgtggttctgatcacgggggacaaccggaagacagccagagctattgccacccaggttggcatcaacaaagtctttgcagaggtgctgccttcgcacaaggtggccaaggtccaggagctccagaataaagggaagaaagtcgccatggtgggggatggggtcaatgactccccggccttggcccaggcagacatgggtgtggccattggcaccggcacggatgtggccatcgaggcagccgacgtcgtccttatcagaaatgatttgctggatgtggtggctagcattcacctttccaagaggactgtccgaaggatacgcatcaacctggtcctggcactgatttataacctggttgggatacccattgcagcaggtgtcttcatgcccatcggcattgtgctgcagccctggatgggctcagcggccatggcagcctcctctgtgtctgtggtgctctcatccctgcagctcaagtgctataagaagcctgacctggagaggtatgaggcacaggcgcatggccacatgaagcccctgacggcatcccaggtcagtgtgcacataggcatggatgacaggtggcgggactcccccagggccacaccatgggaccaggtcagctatgtcagccaggtgtcgctgtcctccctgacgtccgacaagccatctcggcacagcgctgcagcagacgatgatggggacaagtggtctctgctcctgaatggcagggatgaggagcagtacatctgatgacttcaggcaggcgggccggggcagggacttgcctccactcaccacaagctgagcaggacagccagca

SEQ ID NO: 280185 - DNA, 3108 bp, Artificial Sequence
  derived and/or modified sequence
atgcctgagcaggagcggcagatcacagcccgggagggcgccagcaggaagatcctgagcaagctgagcctgcccacccgggcctgggagcccgccatgaagaagagctttgcctttgacaacgtgggctatgagggcggcctggatggcctgggccccagcagccaggtggccaccagcacagtgcgcatcctgggcatgacctgccagagctgtgtgaagagcattgaagatcgcatcagcaacctgaagggcatcatctccatgaaggtgtccctggagcagggcagcgccaccgtgaagtatgtgcccagcgtggtgtgcctgcagcaggtgtgccaccagatcggggacatgggctttgaggccagcattgctgagggcaaggccgcctcctggcccagccgcagcctgcctgcccaggaggccgtggtgaagctgcgggtggagggcatgacctgccagagctgtgtgagcagcattgagggcaaggtgaggaagctgcagggcgtggtgcgggtgaaggtgtccctgagcaaccaggaggccgtcatcacctaccagccctacctgatccagcctgaggacctgcgggaccacgtgaatgacatgggctttgaggccgccatcaagagcaaggtggcccccctgagcctgggccccatcgacatcgagcggctgcagagcaccaaccccaagaggcccctgagcagcgccaaccagaacttcaacaacagcgagaccctgggccaccagggcagccacgtggtgaccctgcagctgagaattgatggcatgcactgcaagagctgtgtgctgaacattgaagaaaatattggccagctgctgggcgtgcagagcatccaggtgtccctggagaacaagacagcccaggtgaagtatgaccccagctgcaccagccctgtggccctgcagagggccatcgaggccctgcccccaggcaacttcaaggtgtccctgcctgatggagctgagggcagcggcacagaccacaggagcagcagcagccacagccctggcagccccccaagaaaccaggtgcagggcacctgcagcaccaccctgattgccatcgccggcatgacctgtgccagctgtgtgcacagcattgagggcatgatcagccagctggagggcgtgcagcagatctctgtgtccctggccgagggcacagccaccgtgctgtacaaccccagcgtcatcagccctgaggagctgcgggccgccatcgaggacatgggctttgaggcctctgtggtgtctggagaggccatgcctgtgaccaagaagccaggcagcacagtgattgctggcagcatcaatgcccacggctctgtgctgatcaaggccacccacgtgggcaatgacaccaccctggcccagatcgtgaagctggtggaggaggcccagatgagcaaggcccccatccagcagctggccgaccgcttcagcggctactttgtgcccttcatcatcatcatgagcaccctgaccctggtggtgtggatcgtcatcggcttcatcgactttggagtggtgcagcgctacttccccaaccccaacaagcacatcagccagacagaggtgatcatccgctttgccttccagaccagcatcaccgtgctgtgcatcgcctgcccctgcagcctgggcctggccacccccacagctgtgatggtgggcactggagtggccgcccagaatggcatcctgatcaagggcggcaagcccctggagatggcccacaagatcaagacagtgatgtttgacaagacaggcaccatcacccacggcgtgccccgggtgatgagggtgctgctgctgggagatgtggccaccctgcccctgaggaaggtgctggccgtggtgggcacagctgaggccagcagcgagcaccccctgggcgtggccgtgaccaagtactgcaaggaggagctgggcacagagaccctgggctactgcacagacttccaggccgtgcccggctgcggcatcggctgcaaggtgtccaatgtggagggcatcctggcccacagcgagcggcccctgagcgccccagccagccacctgaatgaggccggcagcctgcctgctgagaaggatgctgtgccccagaccttctctgtgctgattggcaaccgggagtggctgcggagaaatggcctgaccatcagcagtgatgtgtctgatgccatgacagaccacgagatgaagggccagacagccatcctggtggccattgatggagtgctgtgtggcatgattgccatcgcagatgctgtgaagcaggaggccgccctggccgtgcacaccctgcagagcatgggcgtggatgtggtgctgatcaccggggacaacaggaagacagcccgggccatcgccacccaggtgggcatcaacaaggtgtttgctgaggtgctgcccagccacaaggtggccaaggtgcaggagctgcagaacaagggcaagaaggtggccatggtgggagatggagtgaatgacagccctgccctggcccaggccgacatgggcgtggccatcggcaccggcacagatgtggccatcgaggccgcagatgtggtgctgatcagaaatgacctgctggatgtggtggccagcatccacctgagcaagaggacagtgcggcgcatccgcatcaacctggtgctggccctgatctacaacctggtgggcatccccatcgccgccggggtcttcatgcccatcggcatcgtgctgcagccctggatgggcagcgctgccatggccgccagctctgtgtctgtggtgctgagcagcctgcagctgaagtgctacaagaagccagacctggagagatatgaggcccaggcccacggccacatgaagcccctgacagccagccaggtgtctgtgcacatcggcatggatgaccgctggagggacagcccccgggccaccccctgggaccaggtgtcctatgtgtcccaggtgtccctgagcagcctgaccagtgacaagcccagccgccacagcgctgctgctgatgatgatggagacaagtggagcctgctgctgaatggaagagatgaggagcagtacatctag

SEQ ID NO: 280186 - DNA, 3108 bp, Artificial Sequence
  derived and/or modified sequence
atgcccgagcaggagcggcagatcaccgcccgggagggcgccagccggaagattctgagtaagctctccctgccaacccgggcctgggagcctgctatgaaaaagagctttgcgtttgataatgtgggttatgaggggggcttggacgggctgggcccctcaagccaggtggccacctctactgtccggattctggggatgacgtgtcaaagctgtgtcaagtcgatcgaggatagaatctcgaatctaaagggcattatttctatgaaagtgagcttagagcaagggagcgccaccgtgaaatacgtgccgtccgtcgtctgtctccaacaggtgtgccaccagattggagatatgggattcgaagcaagtatcgcagaaggtaaggccgcgagttggccaagcagaagcctcccggcccaggaagcagtagtaaaactgagagtcgaaggaatgacttgtcaaagctgcgtatccagcattgaagggaaggtgagaaaactgcaaggggtggtacgagtaaaagtgtccttgtcaaaccaggaggccgtcatcacctatcagccctatctgattcagcctgaggacctgcgggatcacgtgaatgatatgggcttcgaagccgctataaagagtaaagtcgccccgcttagcctcggccccattgatatcgagagactgcagtctaccaatcctaagagaccactctcttcggctaaccagaatttcaacaattccgaaaccttaggacatcagggctcccatgtcgttacactgcaactgcgaatcgacggtatgcactgcaagtcttgtgtgctcaatatcgaggagaatataggccagctattaggggtgcagtctatccaagtcagtctggaaaataaaactgcccaagtgaagtatgaccctagttgtacttcgccggtggctctccagagggcaatcgaagcactgccgcccggaaacttcaaggtgtccctgcctgatggcgcagaaggctcaggtactgatcaccgaagctcctcttcgcactctccgggcagtccacctagaaatcaggtgcaagggacatgcagcacaacacttattgccatagcggggatgacctgtgcatcctgcgtgcacagtatcgaaggtatgatctctcagctcgaaggcgtgcagcagatcagtgtctctttggcggaaggtactgctactgtgctgtacaatccctcagtaatcagtcccgaggaactaagagccgccatagaggacatgggattcgaagcttctgtcgtcagcggtgaggctatgccagtgaccaaaaaacctggttccactgtgatcgctggatctattaacgcacacggcagtgtcctgataaaggcaactcatgtcgggaatgatacgactctcgctcagatcgtgaagctcgttgaggaggcccagatgtctaaagcccccatccagcagttggccgaccgctttagtggctacttcgttccatttatcatcatcatgtcaactcttaccctggtggtttggatagtgatcggctttattgactttggcgtggtgcagcggtacttccccaatccaaacaaacacatttcccaaaccgaagtaatcatccgatttgcgttccagacatcaattaccgttctctgcattgcctgcccctgcagtctcggactggccacaccaacggccgtcatggttggaactggagttgccgcgcagaacggtatcctcattaaggggggtaagccactggagatggcccacaaaattaagactgtgatgttcgacaagaccggtactataactcacggagtccctagagtgatgcgggtgctgctgttaggagacgttgccactttaccgttgagaaaagtgctggccgtggtcggcacagcagaggcttcctctgagcatccccttggagtggccgttaccaagtactgtaaggaggaacttggtaccgagactctcggttattgcaccgacttccaggccgtgcccggatgcggcatagggtgcaaagtttcaaacgtcgagggcattctggctcactctgagcgcccgctctctgcccctgccagtcacctcaatgaagctggatccctgcccgccgaaaaggacgccgtgccacagaccttttcagttttgatcggcaatagagaatggcttcgacggaatgggcttacaataagcagcgacgtcagcgacgctatgactgatcacgaaatgaagggccagaccgcaatcctcgtggccatcgatggggtactgtgtggcatgatcgcaatcgctgatgccgtgaaacaggaggccgccctcgcagtgcatacccttcagagtatgggagttgacgtcgttctgatcaccggagataaccgaaagacagccagagccattgctacgcaggtcggcataaataaggtattcgccgaagtgctcccctcacacaaagtggccaaagtccaggagctgcagaataaggggaaaaaggtagctatggtcggcgacggagtcaacgattcacccgccctcgcacaggcagatatgggcgtggcgattggcaccgggacagatgtggcaatcgaggccgcagacgtggtgctcataagaaatgaccttcttgacgtggtggcaagtatccacctatctaagcgaacagtgagacgcatccggattaatctggtactggcacttatttataatctcgtgggaatccctattgctgctggcgtcttcatgcccattggcatagtgctgcagccctggatgggatctgccgccatggctgctagctccgtctctgtggtgctgagttccctacagctcaaatgttataaaaagcctgacctggagagatacgaagctcaagcccatggccacatgaaaccactcactgccagccaggtttcggtgcatatcggaatggacgaccggtggcgcgacagtccccgcgcgactccgtgggaccaggtgtcatatgtgtcccaagtttcattgtcgtctcttacgtcagataagccctccaggcatagcgcagcagctgacgatgatggcgacaagtggagccttctcctgaatggccgcgacgaggaacaatatatttag

SEQ ID NO: 280187 - DNA, 3108 bp, Artificial Sequence
  derived and/or modified sequence
atgcctgagcaggagcgacagatcaccgcacgcgaaggtgcgagtaggaaaattctgtcaaaattgagcctgcccacccgggcttgggagcccgcaatgaagaagtccttcgcctttgataatgtgggttacgaagggggtctggacggccttggcccatcatcccaggtggctacaagcaccgttaggattctgggaatgacctgtcagagctgtgtcaagtccatcgaggatcgaattagtaatctgaagggcattatctccatgaaagtctctctggaacaggggagtgccactgtcaagtacgtaccctctgttgtgtgtctccagcaagtgtgccatcagattggagacatgggatttgaggcgagcattgctgagggaaaggcagccagctggccatcccgatcactccctgctcaggaggcagtagttaaactgcgagtagaggggatgacttgccagtcctgcgtgtcctcaatcgagggaaaagtgcgaaaattgcagggagtggtcagagttaaggtgagcctttcgaaccaggaggctgttatcacctaccagccatacctcatccagccggaagacctgcgtgaccatgtgaacgatatgggcttcgaagctgctattaaaagtaaggtggcccctctgagtctcgggccaatcgacattgaacgtctgcaatccacaaaccctaagagacctctgtctagtgcaaaccagaattttaataactcagagactttggggcaccagggtagccatgtggtgacactccagctacgaatcgacggcatgcactgcaagtcctgcgtcctcaacattgaagaaaacattggccagctccttggcgtgcagagcatccaggtctctctggagaataaaacagcacaagttaagtatgacccctcttgcactagcccagttgctctgcaaagagccattgaagcactacctcctggtaacttcaaggtgagtcttcccgacggagcggaagggtccgggaccgatcacaggtctagtagctctcactctcctggatctcccccacggaaccaggttcagggtacctgctctacaaccttgatcgccattgcaggcatgacttgcgcctcctgcgtgcacagtatcgaggggatgatcagccaacttgaaggcgtacagcagatcagtgtgtcattggccgagggaactgctacagtactgtacaatcctagtgtgatatcccccgaggagctgcgcgcagctatcgaagacatgggctttgaagcctcagtggtgtctggtgaggccatgccagtcactaagaagccaggatctaccgtcattgcaggatctatcaatgcccacggaagtgtgctcatcaaggcaacacacgtgggtaatgacacaaccttggcccaaattgtcaagctggtggaagaggctcagatgtccaaggccccaatccagcagctggctgatcggtttagtgggtacttcgtgccttttatcatcattatgtctacccttacacttgttgtttggattgtcatcggctttatagatttcggcgtggtacagaggtattttccaaaccccaacaaacatattagccagactgaggtgatcatcagattcgccttccagaccagtatcaccgtattgtgcatagcctgcccatgcagtttgggacttgctacaccaactgctgtaatggtaggtacaggtgtggccgcacagaatggaatactcattaaaggagggaaacccctggaaatggctcacaagattaagaccgttatgttcgataagaccggtaccattacccacggcgtcccaagggtaatgagagtgttgctcttaggagatgtggctactctccccttgagaaaggtcctggccgtggtgggaaccgcagaagcttcttctgagcaccccctaggcgtggctgtgactaagtactgtaaggaggaactgggaactgagaccctagggtattgcaccgacttccaggcagtgcctggatgcgggatcggctgtaaagtgtcgaatgtggaggggatcctagcacattccgagcgccctctgagcgctccagccagtcacttgaatgaggccggtagcctgccagccgaaaaagacgctgttccacagacattttctgtgttaatcggcaacagagaatggctccgcagaaacggactaacaatttcttccgatgtgagtgacgcaatgactgatcatgaaatgaaggggcaaacggccatcctcgttgcgatagacggcgttctgtgcggcatgattgctatcgcggatgccgtcaaacaagaagctgccctggccgtccacacactgcagagtatgggcgtcgatgtggtacttattacgggtgataaccggaaaacagcgagggccatagccacacaggtgggaatcaataaggtgtttgcggaggtgttgccttctcacaaagtggccaaggtgcaggaactacagaataaaggtaaaaaagtcgctatggtaggcgatggtgtaaatgattccccagccctggcccaggcagatatgggcgtggctatcggaactgggaccgacgtggccatagaagctgccgatgtagttctgattcggaatgacctgctggatgtggtggcatccatccacctgtctaagagaactgttagacggatccgaatcaatttggttttggctctgatctataacctagtcggcatcccaatcgctgctggtgtcttcatgcctattggcattgttctccagccatggatgggaagcgcagccatggccgcttcttccgtaagtgtggtcctgtcaagcctgcagctgaagtgttataaaaagcccgacctggagcggtacgaagcccaggctcacggtcatatgaaaccgctgacagcgtcccaggtgtcagtccacatcggaatggacgatcggtggcgggactcaccacgagcgacaccttgggaccaggtttcctatgtgagtcaggtatctctctcctccctcactagcgacaagccttcccgtcacagtgctgcagctgacgatgacggggataaatggtcattgctgctcaatgggagggatgaggagcagtacatttag

SEQ ID NO: 280188 - DNA, 3108 bp, Artificial Sequence
  derived and/or modified sequence
atgcctgaacaggaaagacaaattactgccagagaaggggcctcccggaaaatcctgagcaaacttagcctgccaaccagagcatgggaacctgctatgaagaaaagtttcgcctttgacaacgttggatacgagggaggattggatggcttaggcccatcctctcaagtagcaacctccactgtccggatccttggaatgacatgtcagtcatgcgtgaaatctattgaggaccgtatatccaatctgaaaggcatcatcagtatgaaggtgtcactggagcaggggtcggcgactgttaaatacgttccttccgtggtctgtctccagcaggtctgtcaccagattggtgacatgggattcgaagctagcattgccgagggaaaagccgcctcatggccaagccggagcctacctgcccaggaagccgttgtgaagcttagagtagaaggcatgacatgtcagtcgtgcgtgtcatccattgaagggaaagtcagaaaactgcaaggggtcgtgcgggtgaaagtgtccctttccaatcaagaggcagtgattacctatcagccgtatctgatccagccagaggatctcagagaccacgtgaacgatatgggatttgaggctgccataaaatccaaggtagcccctttgagtcttggacccatcgatattgagcgcctgcagtcaactaatcctaagcgccctttgagcagcgccaaccaaaacttcaataattctgaaactttaggacatcaaggtagccatgtcgtaactcttcagctccgcatcgatggcatgcactgcaaaagttgcgtgttgaacattgaagagaatatagggcagttgctgggggtgcagagtattcaggtgtcactggagaacaaaaccgcacaagtgaaatacgacccatcatgcacatcacccgtggctctgcagcgcgcaatagaagccctgccacctggcaacttcaaggtgtccctcccagacggtgccgaaggatccggaacagatcaccgatcaagttccagccactctcctgggagcccgccaagaaaccaggtgcaaggaacttgctcaaccacacttatcgccatagcaggcatgacgtgcgcaagctgcgtgcatagtattgagggcatgataagtcagttggagggcgttcagcagatctcagtgagccttgccgaaggaaccgccacggtcctttacaacccaagcgttatcagccccgaagagctgcgggccgccatcgaggacatggggttcgaggcatctgttgtgagtggagaggcaatgcctgtaaccaaaaagcctgggtctaccgtcatcgcggggtcaatcaatgctcacgggtcagtgctcatcaaggctacccacgttgggaacgataccacccttgcacagattgtgaagttagtagaagaggcacagatgagcaaagcgcctattcagcagctcgccgacagattctcaggatacttcgtcccattcatcataattatgtccactttgacactggtcgtttggatcgttatcgggtttatcgatttcggcgtagtgcagaggtactttcctaaccctaacaagcatatttcacagaccgaagtcattattcggttcgcctttcaaacttcaataactgtattatgcatcgcctgcccgtgcagtctcggcctggccacccccactgctgtgatggtagggaccggtgttgctgcccagaatggtatactcatcaaagggggcaaaccactcgagatggcgcacaaaatcaagactgtgatgttcgataaaacagggacaatcactcatggcgtgccaagagtaatgcgagtgcttctgttgggtgacgtggctacccttcccctcaggaaagtcctcgctgtggtaggaactgccgaggcatcaagtgaacatcctctcggcgtcgcagtgacgaagtactgtaaagaagaactgggtaccgagaccctcggctactgcacagactttcaggccgtgcccggctgcgggatcgggtgtaaggtgtcaaatgtcgagggcatcttggcccacagcgagcgtccactctctgctcctgcttcacatcttaatgaagccgggtccctgcctgccgagaaagacgcagtgccccagaccttcagcgtcctgatcggcaaccgcgaatggcttcgtcggaatggactgactatctcctctgacgtttctgatgccatgacggaccacgaaatgaagggccaaacggccatcctggtcgctatcgacggagtgctgtgtgggatgatagccatagccgatgctgtgaagcaggaagcagccctcgccgtgcacacactccaatctatgggcgtggacgttgtgctaatcacaggtgacaaccgaaaaacggcaagggccattgctacacaggtcggaattaacaaggtattcgctgaggtcctcccaagccacaaagtagccaaggttcaggagctgcagaataaagggaagaaagttgccatggtcggtgacggtgttaatgactctccagctttggctcaggccgacatgggtgtcgcaattggaacaggtactgatgtggccatcgaggccgccgatgttgtacttataaggaacgatctcctcgacgttgtggcatccatccatctctccaagaggacagtgagacgtattcgaataaaccttgtcctcgcgctgatttataatctggtgggtatccccattgctgctggggtgtttatgcctataggcatagtgttgcagccctggatgggctctgccgcaatggctgccagcagcgtaagcgttgtcttgtccagtctccagcttaaatgctataagaaacctgacttggaaaggtatgaggcccaagcacatggccacatgaaaccactcactgccagccaagtctctgtgcatataggaatggatgaccggtggagggactcgcctcgagctacaccctgggatcaagtttcatatgtctcacaggtcagcctttcctccttgacctcggataagccttccaggcactccgctgctgctgatgatgatggggacaagtggtccttgcttcttaacggcagagatgaggagcaatatatttag

SEQ ID NO: 280189 - DNA, 3108 bp, Artificial Sequence
  derived and/or modified sequence
atgcccgagcaagaacgacagataacggccagagagggagcctcaagaaaaatcctgagcaaactgagcttgccaacaagagcttgggaaccagctatgaaaaaaagcttcgcgtttgataacgttggatacgagggaggactggacgggctcgggcccagttcccaggttgccacaagcactgtgcgaatattagggatgacatgtcagtcatgcgtcaagtccatcgaagatcgaatttccaacctgaagggtatcatttctatgaaagtttcattggagcagggcagtgccacagtaaaatacgtaccatccgtcgtgtgtctgcaacaagtgtgtcatcagattggagatatgggtttcgaagcgtctatagcggaaggaaaggctgcgagctggccatctcgaagcctcccagctcaggaggccgtcgtcaagctccgcgtcgaagggatgacatgtcagtcctgcgtctcttctatagagggtaaggtgcgtaaactgcagggagttgtgagagtaaaggttagcctgagcaatcaagaagcagttatcacgtatcagccatatcttattcagcccgaggacctgagggaccatgtgaatgacatggggttcgaagccgcaattaaatctaaagtcgcccctctatcactggggcctatcgatattgagagattgcagtctactaatcctaaacgcccactcagctccgctaatcagaactttaacaatagtgaaactttaggccatcaagggagtcatgtagttactctccaactgcgcatcgatggcatgcactgcaagtcttgtgtcttgaatatcgaggagaacatcggccagctgctgggagtccagtcaatccaagtaagtctggagaataaaacagcccaggtcaagtacgatccctcatgcacctcccctgtggctctgcaacgcgctattgaggccctccctccaggtaatttcaaagtctccctccccgacggagcagaaggtagcggcaccgaccataggtcctcaagttcacacagcccgggatcgccgcccagaaaccaggtgcaggggacttgcagtacaaccctgatcgctattgccggaatgacgtgcgcctcttgcgtccatagcatcgaagggatgatcagccaactggaaggtgtgcagcaaattagtgtgtccctcgcagaaggtacagcaactgtgctttacaacccctcagttatcagccccgaggaacttcgtgcagccatcgaggacatgggattcgaagcctccgtggtgtctggcgaggctatgcctgtcactaagaagcccggttcaacagttatcgccggaagcattaacgcacatggttccgttctgatcaaggctacccacgtgggcaacgacacgaccttggcacaaatcgtgaagcttgtggaagaagcccagatgtctaaagctcccatacaacagcttgcagatagattttccggctatttcgtccccttcatcatcataatgagtacactgacattagttgtatggatcgtgatcggctttatagatttcggagtcgtgcaacgctacttccccaacccaaataagcacatctctcaaacagaagtcatcatccgctttgccttccagacatctatcactgtcctctgcattgcctgtccctgcagcctcggcttggcaacaccaactgcagtgatggttggaactggagtagctgcccagaatggcatcctcatcaaagggggaaaaccactggaaatggcacataagattaagaccgtcatgtttgataaaactgggaccattacccatggtgtcccaagagtgatgagagtgctcctgctaggggacgtcgctacccttcccctgagaaaagtattggcagtcgtgggaacagctgaagccagctctgaacaccccctaggggtggcagttaccaaatactgcaaggaggaactgggcaccgaaactttaggatattgtacggacttccaagcggtccctggatgcggcatcggttgcaaagtgagtaacgtggagggaattttggcccactctgaaaggcccctctctgcaccagcgtctcacctgaacgaagccggaagtctgccagcagaaaaggacgctgtgccgcagacattctccgtcctgatcggaaaccgcgaatggctgagacgcaatgggctgactatctcaagcgacgtgagtgacgcaatgaccgaccacgaaatgaaaggacaaactgccattctggtggctatcgacggtgtactatgtggaatgattgcaattgctgatgccgtgaaacaggaagccgctctggctgtacacactctgcagagtatgggcgttgatgtggtcttgatcactggggacaatagaaaaaccgccagggccatcgctacacaggttggcataaataaagtgttcgccgaggtcttgccctcccataaagtcgccaaagtccaggaactgcagaataaaggaaagaaagtggctatggtgggggatggagtaaatgactctccagctttggcccaggcagatatgggagttgctattggaaccgggacagacgtggcaattgaggcagctgacgtcgtgcttattcggaatgacctcttggatgtagtggcttcgatccatctatctaaacgcacagtcagaagaattcggattaatttagttctcgcactgatctataaccttgtaggtataccaatcgccgccggagtgttcatgcccattgggatcgtgttgcagccctggatgggatccgcagcgatggccgctagctcggtgtcagtcgtgctctctagcttgcagctgaagtgctataaaaaacctgatctggagcgttacgaggcacaggctcacggtcacatgaaacccctgaccgcttctcaggtgtctgtgcatatcggcatggatgatcgatggagagactccccgagagctaccccctgggatcaagtttcatatgtgtcacaagtttcactcagttctctgacctccgataaacctagcagacacagtgccgccgcggatgatgatggagataaatggagcctcctgctaaatggtagagacgaagaacagtatatatag

SEQ ID NO: 280190 - RNA, 3108 nt, Artificial Sequence
  derived and/or modified sequence
augccugaacaggaaagacaaauuacugccagagaaggggccucccggaaaauccugagcaaacuuagccugccaaccagagcaugggaaccugcuaugaagaaaaguuucgccuuugacaacguuggauacgagggaggauuggauggcuuaggcccauccucucaaguagcaaccuccacuguccggauccuuggaaugacaugucagucaugcgugaaaucuauugaggaccguauauccaaucugaaaggcaucaucaguaugaaggugucacuggagcaggggucggcgacuguuaaauacguuccuuccguggucugucuccagcaggucugucaccagauuggugacaugggauucgaagcuagcauugccgagggaaaagccgccucauggccaagccggagccuaccugcccaggaagccguugugaagcuuagaguagaaggcaugacaugucagucgugcgugucauccauugaagggaaagucagaaaacugcaaggggucgugcgggugaaagugucccuuuccaaucaagaggcagugauuaccuaucagccguaucugauccagccagaggaucucagagaccacgugaacgauaugggauuugaggcugccauaaaauccaagguagccccuuugagucuuggacccaucgauauugagcgccugcagucaacuaauccuaagcgcccuuugagcagcgccaaccaaaacuucaauaauucugaaacuuuaggacaucaagguagccaugucguaacucuucagcuccgcaucgauggcaugcacugcaaaaguugcguguugaacauugaagagaauauagggcaguugcugggggugcagaguauucaggugucacuggagaacaaaaccgcacaagugaaauacgacccaucaugcacaucacccguggcucugcagcgcgcaauagaagcccugccaccuggcaacuucaaggugucccucccagacggugccgaaggauccggaacagaucaccgaucaaguuccagccacucuccugggagcccgccaagaaaccaggugcaaggaacuugcucaaccacacuuaucgccauagcaggcaugacgugcgcaagcugcgugcauaguauugagggcaugauaagucaguuggagggcguucagcagaucucagugagccuugccgaaggaaccgccacgguccuuuacaacccaagcguuaucagccccgaagagcugcgggccgccaucgaggacaugggguucgaggcaucuguugugaguggagaggcaaugccuguaaccaaaaagccugggucuaccgucaucgcggggucaaucaaugcucacgggucagugcucaucaaggcuacccacguugggaacgauaccacccuugcacagauugugaaguuaguagaagaggcacagaugagcaaagcgccuauucagcagcucgccgacagauucucaggauacuucgucccauucaucauaauuauguccacuuugacacuggucguuuggaucguuaucggguuuaucgauuucggcguagugcagagguacuuuccuaacccuaacaagcauauuucacagaccgaagucauuauucgguucgccuuucaaacuucaauaacuguauuaugcaucgccugcccgugcagucucggccuggccacccccacugcugugaugguagggaccgguguugcugcccagaaugguauacucaucaaagggggcaaaccacucgagauggcgcacaaaaucaagacugugauguucgauaaaacagggacaaucacucauggcgugccaagaguaaugcgagugcuucuguugggugacguggcuacccuuccccucaggaaaguccucgcugugguaggaacugccgaggcaucaagugaacauccucucggcgucgcagugacgaaguacuguaaagaagaacuggguaccgagacccucggcuacugcacagacuuucaggccgugcccggcugcgggaucggguguaaggugucaaaugucgagggcaucuuggcccacagcgagcguccacucucugcuccugcuucacaucuuaaugaagccgggucccugccugccgagaaagacgcagugccccagaccuucagcguccugaucggcaaccgcgaauggcuucgucggaauggacugacuaucuccucugacguuucugaugccaugacggaccacgaaaugaagggccaaacggccauccuggucgcuaucgacggagugcugugugggaugauagccauagccgaugcugugaagcaggaagcagcccucgccgugcacacacuccaaucuaugggcguggacguugugcuaaucacaggugacaaccgaaaaacggcaagggccauugcuacacaggucggaauuaacaagguauucgcugagguccucccaagccacaaaguagccaagguucaggagcugcagaauaaagggaagaaaguugccauggucggugacgguguuaaugacucuccagcuuuggcucaggccgacaugggugucgcaauuggaacagguacugauguggccaucgaggccgccgauguuguacuuauaaggaacgaucuccucgacguuguggcauccauccaucucuccaagaggacagugagacguauucgaauaaaccuuguccucgcgcugauuuauaaucugguggguauccccauugcugcugggguguuuaugccuauaggcauaguguugcagcccuggaugggcucugccgcaauggcugccagcagcguaagcguugucuuguccagucuccagcuuaaaugcuauaagaaaccugacuuggaaagguaugaggcccaagcacauggccacaugaaaccacucacugccagccaagucucugugcauauaggaauggaugaccgguggagggacucgccucgagcuacacccugggaucaaguuucauaugucucacaggucagccuuuccuccuugaccucggauaagccuuccaggcacuccgcugcugcugaugaugauggggacaagugguccuugcuucuuaacggcagagaugaggagcaauauauuuag

SEQ ID NO: 280191 - RNA, 3108 nt, Artificial Sequence
  derived and/or modified sequence
augcccgagcaagaacgacagauaacggccagagagggagccucaagaaaaauccugagcaaacugagcuugccaacaagagcuugggaaccagcuaugaaaaaaagcuucgcguuugauaacguuggauacgagggaggacuggacgggcucgggcccaguucccagguugccacaagcacugugcgaauauuagggaugacaugucagucaugcgucaaguccaucgaagaucgaauuuccaaccugaaggguaucauuucuaugaaaguuucauuggagcagggcagugccacaguaaaauacguaccauccgucgugugucugcaacaagugugucaucagauuggagauauggguuucgaagcgucuauagcggaaggaaaggcugcgagcuggccaucucgaagccucccagcucaggaggccgucgucaagcuccgcgucgaagggaugacaugucaguccugcgucucuucuauagaggguaaggugcguaaacugcagggaguugugagaguaaagguuagccugagcaaucaagaagcaguuaucacguaucagccauaucuuauucagcccgaggaccugagggaccaugugaaugacaugggguucgaagccgcaauuaaaucuaaagucgccccucuaucacuggggccuaucgauauugagagauugcagucuacuaauccuaaacgcccacucagcuccgcuaaucagaacuuuaacaauagugaaacuuuaggccaucaagggagucauguaguuacucuccaacugcgcaucgauggcaugcacugcaagucuugugucuugaauaucgaggagaacaucggccagcugcugggaguccagucaauccaaguaagucuggagaauaaaacagcccaggucaaguacgaucccucaugcaccuccccuguggcucugcaacgcgcuauugaggcccucccuccagguaauuucaaagucucccuccccgacggagcagaagguagcggcaccgaccauagguccucaaguucacacagcccgggaucgccgcccagaaaccaggugcaggggacuugcaguacaacccugaucgcuauugccggaaugacgugcgccucuugcguccauagcaucgaagggaugaucagccaacuggaaggugugcagcaaauuagugugucccucgcagaagguacagcaacugugcuuuacaaccccucaguuaucagccccgaggaacuucgugcagccaucgaggacaugggauucgaagccuccguggugucuggcgaggcuaugccugucacuaagaagcccgguucaacaguuaucgccggaagcauuaacgcacaugguuccguucugaucaaggcuacccacgugggcaacgacacgaccuuggcacaaaucgugaagcuuguggaagaagcccagaugucuaaagcucccauacaacagcuugcagauagauuuuccggcuauuucguccccuucaucaucauaaugaguacacugacauuaguuguauggaucgugaucggcuuuauagauuucggagucgugcaacgcuacuuccccaacccaaauaagcacaucucucaaacagaagucaucauccgcuuugccuuccagacaucuaucacuguccucugcauugccugucccugcagccucggcuuggcaacaccaacugcagugaugguuggaacuggaguagcugcccagaauggcauccucaucaaagggggaaaaccacuggaaauggcacauaagauuaagaccgucauguuugauaaaacugggaccauuacccauggugucccaagagugaugagagugcuccugcuaggggacgucgcuacccuuccccugagaaaaguauuggcagucgugggaacagcugaagccagcucugaacacccccuagggguggcaguuaccaaauacugcaaggaggaacugggcaccgaaacuuuaggauauuguacggacuuccaagcggucccuggaugcggcaucgguugcaaagugaguaacguggagggaauuuuggcccacucugaaaggccccucucugcaccagcgucucaccugaacgaagccggaagucugccagcagaaaaggacgcugugccgcagacauucuccguccugaucggaaaccgcgaauggcugagacgcaaugggcugacuaucucaagcgacgugagugacgcaaugaccgaccacgaaaugaaaggacaaacugccauucugguggcuaucgacgguguacuauguggaaugauugcaauugcugaugccgugaaacaggaagccgcucuggcuguacacacucugcagaguaugggcguugauguggucuugaucacuggggacaauagaaaaaccgccagggccaucgcuacacagguuggcauaaauaaaguguucgccgaggucuugcccucccauaaagucgccaaaguccaggaacugcagaauaaaggaaagaaaguggcuauggugggggauggaguaaaugacucuccagcuuuggcccaggcagauaugggaguugcuauuggaaccgggacagacguggcaauugaggcagcugacgucgugcuuauucggaaugaccucuuggauguaguggcuucgauccaucuaucuaaacgcacagucagaagaauucggauuaauuuaguucucgcacugaucuauaaccuuguagguauaccaaucgccgccggaguguucaugcccauugggaucguguugcagcccuggaugggauccgcagcgauggccgcuagcucggugucagucgugcucucuagcuugcagcugaagugcuauaaaaaaccugaucuggagcguuacgaggcacaggcucacggucacaugaaaccccugaccgcuucucaggugucugugcauaucggcauggaugaucgauggagagacuccccgagagcuacccccugggaucaaguuucauaugugucacaaguuucacucaguucucugaccuccgauaaaccuagcagacacagugccgccgcggaugaugauggagauaaauggagccuccugcuaaaugguagagacgaagaacaguauauauag

SEQ ID NO: 280192 - protein, 603 aa, Artificial Sequence
  derived and/or modified sequence
MEQVAEGARVTAVPVSAADSTEELAEVEEGVGVVGEDNDAAARGAEAFGDSEEDGEDVFEVEKILDMKTEGGKVLYKVRWKGYTSDDDTWEPEIHLEDCKEVLLEFRKKIAENKAKAVRKDIQRLSLNNDIFEANSDSDQQSETKEDTSPKKKKKKLRQREEKSPDDLKKKKAKAGKLKDKSKPDLESSLESLVFDLRTKKRISEAKEELKESKKPKKDEVKETKELKKVKKGEIRDLKTKTREDPKENRKTKKEKFVESQVESESSVLNDSPFPEDDSEGLHSDSREEKQNTKSARERAGQDMGLEHGFEKPLDSAMSAEEDTDVRGRRKKKTPRKAEDTRENRKLENKNAFLEKKTVPKKQRNQDRSKSAAELEKLMPVSAQTPKGRRLSGEERGLWSTDSAEEDKETKRNESKEKYQKRHDSDKEEKGRKEPKGLKTLKEIRNAFDLFKLTPEEKNDVSENNRKREEIPLDFKTIDDHKTKENKQSLKERRNTRDETDTWAYIAAEGDQEVLDSVCQADENSDGRQQILSLGMDLQLEWMKLEDFQKHLDGKDENFAATDAIPSNVLRDAVKKKKKKKFLGTYTFFLFFFFEKPDLVPLF

SEQ ID NO: 280193 - protein, 531 aa, Artificial Sequence
  derived and/or modified sequence
MVDVGKWPIFTLLSPQEIASIRKACVFGTSASEALYVTDNDEVFVFGLNYSNCLGTGDNQSTLVPKKLEGLCGKKIKSLSYGSGPHVLLSTEDGVVYAWGHNGYSQLGNGTTNQGIAPVQVCTNLLIKQVVEVACGSHHSMALAADGEVFAWGYNNCGQVGSGSTANQPTPRKVTNCLHIKRVVGIACGQTSSMAVLDNGEVYGWGYNGNGQLGLGNNGNQLTPVRVAALHSVCVNQIVCGYAHTLALTDEGLLYAWGANTYGQLGTGNKNNLLSPAHIMVEKERVVEIAACHSAHTSAAKTQGGHVYMWGQCRGQSVILPHLTHFSCTDDVFACFATPAVSWRLLSVEHEDFLTVAESLKKEFDSPETADLKFRIDGKYIHVHKAVLKIRCEHFRSMFQSYWNEDMKEVIEIDQFSYPVYRAFLQYLYTDTVDLPPEDAIGLLDLATSYCENRLKKLCQHIIKRGITVENAFSLFSAAVRYDAEDLEEFCFKFCINHLTEVTQTAAFWQMDGPLLKEFIAKASKCGAFKN

SEQ ID NO: 280194 - protein, 355 aa, Artificial Sequence
  derived and/or modified sequence
MVDVGKWPIFTLLSPQEIASIRKACVFGTSASEALYVTDNDEVFVFGLNYSNCLGTGDNQSTLVPKKLEGLCGKKIKSLSYGSGPHVLLSTEDGVVYAWGHNGYSQLGNGTTNQGIAPVQVCTNLLIKQVVEVACGSHHSMALAADGEVFAWGYNNCGQVGSGSTANQPTPRKVTNCLHIKRVVGIACGQTSSMAVLDNGEVYGWGYNGNGQLGLGNNGNQLTPVRVAALHSVCVNQIVCGYAHTLALTDEGLLYAWGANTYGQLGTGNKNNLLSPAHIMVEKERVVEIAACHSAHTSAAKTQGGHVYMWGQCRGQSVILPHLTHFSCTDDVFACFATPAVSWRLLSVVSIVIGK

SEQ ID NO: 280195 - DNA, 1596 bp, Artificial Sequence
  derived and/or modified sequence
atggttgatgtggggaagtggcctatcttcacattgctgagcccacaagaaattgcctccattcgtaaagcttgtgtctttggcactagtgcgagcgaggccctgtacgtcaccgataatgatgaggtcttcgtgttcggccttaactactccaattgcttaggcactggcgataatcagtcaaccctagttccaaagaagctagagggcctgtgcggcaaaaaaattaagtccctgtcatatggatcagggccacacgtcctgttaagtaccgaggacggagtggtgtacgcctggggtcataatggttactcccaattgggaaatggaactaccaatcagggaattgcccctgtccaggtttgtactaacctcctgatcaaacaggttgtggaagtggcctgtggtagccatcactccatggccctggccgccgacggggaagtgttcgcgtggggttataataactgtggacaagtcgggagcggctcaacagcaaaccagcccaccccgagaaaggtcaccaactgccttcacatcaaaagggttgtagggatagcctgtggccagacaagctcaatggcggtcctagacaacggagaggtgtacggctggggttacaatggaaacgggcagttagggctgggcaataacggaaatcaattaaccccagtgcgagttgcagccctgcactcggtctgtgttaaccaaatcgtttgcggatatgctcatactctggccctgacagatgagggcctgctctatgcttggggagccaacacgtatggccagttgggaaccggaaacaaaaataatctgttgtccccagctcacatcatggtcgaaaaggagagggtggtggagattgcagcctgccacagcgcgcacaccagcgcagctaagacccagggcggacatgtctatatgtggggacagtgccggggtcagtcagtgattctgccccacctcactcacttttcctgcactgatgacgtctttgcatgtttcgccacccctgctgtctcctggaggctcttgagcgtggagcatgaggatttcctgacagttgccgagagcctgaaaaaagagtttgactcgccggagaccgcagacttgaagtttagaatcgacggtaaatacattcatgtccataaggcagtactaaaaatccgatgcgaacatttcagaagcatgttccaatcctattggaacgaagatatgaaagaagtaattgaaattgaccagttctcatatcccgtgtatcgggcctttctccagtacctctatacagatactgttgatcttcctcccgaagatgccattgggttgcttgatttggcaacctcgtattgtgagaatcgtttgaaaaagttatgtcagcacataatcaaacgtggcatcacggtcgagaatgcattctctttgttcagcgcagccgtgcggtacgacgctgaagacttagaggagttttgcttcaaattttgcataaatcacttgaccgaggtcacccaaaccgcagccttttggcagatggatggcccactcctcaaagaattcattgccaaagcttccaagtgcggggcctttaagaattag

SEQ ID NO: 280196 - DNA, 1596 bp, Artificial Sequence
  derived and/or modified sequence
atggttgacgtgggtaagtggcccatttttaccctcctgagtccgcaggagatcgcttccattagaaaggcatgcgtgttcggcacctctgcgtctgaggccctatatgtgactgacaacgatgaagtgtttgtgttcggcctgaactattctaattgcctcggtactggagacaaccagagcacactcgttcctaagaagctggaaggcctgtgcgggaagaagatcaagtccctctcgtacggtagcggcccgcatgttctgttgtccactgaggatggagtagtttacgcttggggccacaatggctacagccagctgggtaatggaacaacaaaccaggggattgccccagtccaggtatgcacaaaccttctcatcaagcaagtggtggaggtggcctgcgggtcccaccactccatggcattagctgccgatggcgaagtgtttgcttggggctataacaattgcggacaggtcggctcaggatcgacagccaatcagcccacccctagaaaagtaacaaactgtctgcacataaagagagtggttggtatcgcttgcggccagacaagctccatggctgtgctcgacaatggggaagtgtatggatggggttataacggcaacggccagctggggctgggcaataatggcaaccagctgacccccgtgcgcgtggcagccctgcattctgtgtgcgtgaatcaaatagtttgtggatacgctcacactctcgctcttacagacgaaggcctgctgtacgcttggggggctaacacatacggccagctgggcacgggaaataaaaacaatctcctgtctcctgcgcacataatggtggaaaaagaaagagtcgtggaaatcgcagcatgccactctgcccacacatccgcagccaaaacccagggaggccatgtctatatgtggggacagtgccggggccagtccgtgatcctgccgcatctgactcacttcagctgtaccgatgatgtttttgcatgctttgctacaccagccgtctcttggaggttactttctgtcgagcacgaagatttcctgaccgtggccgaatctctcaagaaagagtttgattcccctgagaccgctgacctgaagtttagaatagacggaaaatacatccacgtgcacaaagctgttctgaaaatccgatgcgagcattttcgctccatgttccaatcttactggaacgaagatatgaaggaagtgatcgaaatagaccagtttagttacccagtgtaccgggctttccttcagtatctctacaccgatacagttgatcttcctcccgaagacgccatcggactgctcgacctcgcaacttcctactgcgaaaatagactgaagaagctgtgtcaacacataatcaagcgaggaattaccgttgaaaatgcattctctcttttcagtgcagccgttagatatgacgcagaggatctggaggagttctgcttcaagttctgtatcaaccacctaaccgaagtgacgcagacagcagccttttggcagatggatggtccgctgctgaaagagtttattgctaaagccagtaagtgcggtgcatttaagaattag

SEQ ID NO: 280197 - DNA, 1068 bp, Artificial Sequence
  derived and/or modified sequence
atggtggatgtggggaagtggcccatcttcaccctccttagcccgcaggagattgctagtattcgtaaagcatgtgtctttgggacgagtgcgtctgaagctctgtatgtcaccgacaatgacgaagtgtttgtgttcggtcttaactacagtaactgcctgggaacaggtgacaaccaatcaaccctcgtcccaaagaaactcgaaggtctctgtgggaagaaaattaaatccctcagctatggttctgggccgcacgtgctgcttagtacagaagatggtgtggtgtacgcctggggacataacgggtacagccaactggggaatggaaccacgaatcagggcatcgctcccgttcaagtctgcaccaatcttctgatcaagcaggtggtcgaggttgcttgcggctctcatcactcaatggctttagccgcggacggagaggtattcgcctgggggtataacaactgtgggcaagttggttcaggatctacggctaaccagcccaccccacggaaggttactaattgtctccatatcaagcgcgttgttggaattgcgtgcggccagacctcctccatggccgtgctggataatggggaagtgtatggttgggggtacaatggcaatggacagctcgggctcggaaataacggaaaccagctcacacccgtcagggtggctgcacttcactctgtgtgcgtgaatcagatcgtttgtggctacgctcacaccttggccctgacagatgagggcctcttgtatgcatggggcgccaatacctatggtcagctgggaactggaaataagaacaacctactgtctcccgcccacataatggtggagaaagagcgggtagtggagatagctgcctgtcacagcgcccacacatcagcagcaaagacgcagggcggccacgtgtatatgtgggggcaatgtagaggccagtcggttatcttaccacacctgactcacttttcatgcactgacgatgtttttgcttgttttgctacaccagctgtgagctggaggctgctgagcgtggtgtcaatagtcatcggtaaatag

SEQ ID NO: 280198 - DNA, 1596 bp, Artificial Sequence
  derived and/or modified sequence
atggtggatgtgggcaagtggcccatcttcaccctgctgagcccccaggagatcgccagcatcaggaaggcctgtgtgtttggcaccagcgccagcgaggccctgtatgtgacagacaatgatgaggtgtttgtgtttggcctgaactacagcaactgcctgggcaccggggacaaccagagcaccctggtgcccaagaagctggagggcctgtgtgggaagaagatcaagagcctgtcctatggcagcggcccccacgtgctgctgagcacagaagatggagtggtgtatgcctggggccacaacggctacagccagctgggcaatggcaccaccaaccagggcatcgcccctgtgcaggtgtgcaccaacctgctgatcaagcaggtggtggaggtggcctgtggcagccaccacagcatggccctggccgcagatggagaggtgtttgcctggggctacaacaactgtggccaggtgggcagcggcagcacagccaaccagcccacccccaggaaggtgaccaactgcctgcacatcaagagggtggtgggcatcgcctgtggccagaccagctccatggctgtgctggacaatggagaggtgtatggctggggctacaatggaaatggccagctgggcctgggcaacaacggcaaccagctgacccctgtgcgggtggccgccctgcacagcgtgtgtgtgaaccagatcgtgtgtggctacgcccacaccctggccctgacagatgagggcctgctgtatgcctggggcgccaacacctacggccagctgggcactggaaacaagaacaacctgctgagccctgcccacatcatggtggagaaggagcgggtggtggagattgctgcctgccacagcgcccacaccagcgctgccaagacccagggcggccacgtgtacatgtggggccagtgccggggccagagcgtcatcctgccccacctgacccacttcagctgcacagatgatgtgtttgcctgctttgccaccccagctgtgtcctggaggctgctgtctgtggagcacgaggacttcctgactgtggccgagagcctgaagaaggagtttgacagccctgagacagctgacctgaagttcagaattgatggcaagtacatccacgtgcacaaggctgtgctgaagatccgctgtgagcacttccgctccatgttccagagctactggaatgaagacatgaaggaggtgattgaaattgaccagttctcctaccctgtgtaccgggccttcctgcagtacctgtacacagacacagtggacctgcccccagaagatgccatcggcctgctggacctggccaccagctactgtgagaaccggctgaagaagctgtgccagcacatcatcaagaggggcatcaccgtggagaatgccttcagcctcttctctgctgctgtgcgctatgatgctgaggacctggaggagttctgcttcaagttctgcatcaaccacctgacagaggtgacccagacagctgccttctggcagatggatggccccctgctgaaggagttcatcgccaaggccagcaaatgtggggccttcaagaactag

SEQ ID NO: 280199 - DNA, 1068 bp, Artificial Sequence
  derived and/or modified sequence
atggtggatgtgggcaagtggcccatcttcaccctgctgagcccccaggagatcgccagcatcaggaaggcctgtgtgtttggcaccagcgccagcgaggccctgtatgtgacagacaatgatgaggtgtttgtgtttggcctgaactacagcaactgcctgggcaccggggacaaccagagcaccctggtgcccaagaagctggagggcctgtgtgggaagaagatcaagagcctgtcctatggcagcggcccccacgtgctgctgagcacagaagatggagtggtgtatgcctggggccacaacggctacagccagctgggcaatggcaccaccaaccagggcatcgcccctgtgcaggtgtgcaccaacctgctgatcaagcaggtggtggaggtggcctgtggcagccaccacagcatggccctggccgcagatggagaggtgtttgcctggggctacaacaactgtggccaggtgggcagcggcagcacagccaaccagcccacccccaggaaggtgaccaactgcctgcacatcaagagggtggtgggcatcgcctgtggccagaccagctccatggctgtgctggacaatggagaggtgtatggctggggctacaatggaaatggccagctgggcctgggcaacaacggcaaccagctgacccctgtgcgggtggccgccctgcacagcgtgtgtgtgaaccagatcgtgtgtggctacgcccacaccctggccctgacagatgagggcctgctgtatgcctggggcgccaacacctacggccagctgggcactggaaacaagaacaacctgctgagccctgcccacatcatggtggagaaggagcgggtggtggagattgctgcctgccacagcgcccacaccagcgctgccaagacccagggcggccacgtgtacatgtggggccagtgccggggccagagcgtcatcctgccccacctgacccacttcagctgcacagatgatgtgtttgcctgctttgccaccccagctgtgtcctggaggctgctgtctgtggtgtccatcgtgattggcaagtag

SEQ ID NO: 280200 - DNA, 1596 bp, Artificial Sequence
  derived and/or modified sequence
atggtggacgtgggcaagtggcccatcttcaccctgctgagcccccaggaaatcgcatctatcagaaaagcttgcgtgtttgggacctccgcttccgaggcgttgtatgtcacggacaacgacgaagtgtttgtgtttggcctgaattacagcaattgtctgggcaccggtgataatcagtcaactctggtgccaaaaaagctcgagggcctgtgtgggaaaaaaatcaagtcgttaagttatggctccggccctcacgtgctgctgtctactgaggacggagtcgtctacgcatggggacataatggctactctcagctcggcaacggtactacaaatcagggtattgcacccgttcaggtctgcactaacctgttgattaaacaggtcgtggaggtcgcgtgcggatctcaccactctatggcacttgctgcggacggggaagtcttcgcttggggctacaacaattgcggacaagtgggtagcggttccaccgccaaccagccaacccctcgcaaggtcactaactgtcttcatatcaagcgggtggtgggcatagcctgcggacagacatccagcatggctgtgctggataatggggaggtttacgggtggggctacaatgggaatgggcaacttggtcttggcaataacggaaaccaactgacacccgtgagggtagccgctctccattccgtgtgcgtgaatcaaatcgtttgtgggtatgcacatacgttggcgctcaccgatgagggcctcttatacgcctggggcgctaacacgtatgggcagctgggcaccggaaacaaaaataacctactgagtcccgcccacattatggtggagaaagaaagagtggtggaaattgcagcttgccatagcgcccatacctccgccgctaagactcaaggcggccatgtgtatatgtgggggcagtgccggggccagtccgttatactgccccatctcactcactttagttgtaccgatgacgtgttcgcctgctttgccacacctgccgtatcgtggcgactgctatctgtggagcatgaggatttcctgaccgtcgctgaatctttaaaaaaggagtttgactcccccgagacagctgatcttaagttccgaatcgatggtaaatacatccacgtccacaaggctgttctgaagattcgatgtgagcactttcgctcgatgttccagtcttattggaatgaagacatgaaggaagtcattgaaatcgaccagttctcgtaccccgtctaccgggcttttctgcagtacctgtacaccgatactgttgacctacctcctgaggacgccatcggattattggatctagcaacgtcttattgtgagaatagactgaagaaactgtgtcaacacattattaaacgaggcattactgtcgaaaatgcgttcagtctcttctccgctgctgtccgctacgacgcagaggatcttgaggaattctgctttaaattctgcatcaaccacctgacagaggttactcagacagctgcattttggcaaatggatggccccttgttaaaggaattcatcgccaaggcctccaagtgtggagctttcaagaattag

SEQ ID NO: 280201 - DNA, 1596 bp, Artificial Sequence
  derived and/or modified sequence
atggtggacgtgggcaagtggcccatcttcaccctgctgagcccccaggagatcgcatcgatcagaaaggcatgtgtgtttggtacttcggcatccgaggccttgtatgttactgataatgatgaggtgtttgtattcggtctcaactattctaattgtctgggcaccggcgacaaccaatccactctggttccaaaaaaacttgaggggttatgcggcaagaagatcaaatccctatcttatggctcaggccctcatgtgttgctgagtacggaggacggtgttgtgtatgcctgggggcataacgggtactctcaacttggcaacggcacaaccaaccagggcattgctcctgtccaggtgtgcaccaacctattaatcaaacaagtggttgaggtggcatgtggctcccatcacagcatggccctggccgctgatggcgaagtgtttgcatgggggtacaataattgcgggcaagtgggaagcggatcaacggctaatcagcccactccccgcaaggtcacgaactgtctacatataaagagggttgtcggaatcgcctgcggccaaacaagctccatggcagtacttgacaatggagaggtttatggttgggggtacaacggcaacgggcagctggggctcggaaataacggcaaccagttgacgcctgtgcgcgtggccgccctgcactccgtgtgtgtgaaccagatcgtgtgcggctacgcccacacacttgccttgaccgacgagggccttctgtacgcatggggggcaaatacgtacggccagctgggtaccggcaataaaaacaatttactgtctcctgcacatatcatggtcgaaaaggagagggtggtggaaatcgcagcgtgtcatagcgcccacacctccgccgccaaaacccaaggtggacatgtgtatatgtggggtcagtgccggggccaatccgtgatcctgccgcacctcactcacttcagttgtacggatgatgtctttgcctgctttgctactcctgccgtgagctggaggctcttaagtgtggagcacgaagactttctaacggtagctgaatctctcaagaaagaattcgacagtcccgagacggcagacttgaaattcagaattgacggcaagtatatccatgttcataaagcagtcctcaaaattcgttgtgaacacttccggagcatgttccagtcatactggaacgaggacatgaaggaggttattgagatcgaccagttcagctacccagtgtaccgggcctttctgcagtatctctacaccgacacagtggacttaccacctgaggatgccattggcttgctggacttggctacaagctactgcgagaatagacttaagaagctctgccaacatatcattaaaaggggtattaccgtggaaaacgccttctctctgttctccgcggccgtgagatacgacgctgaagacctcgaggagttttgctttaagttttgtatcaatcacctgactgaagtgacacagactgcagctttctggcaaatggatggtccccttttgaaggaattcatcgcaaaagcctccaagtgcggagcattcaagaattag

SEQ ID NO: 280202 - DNA, 1068 bp, Artificial Sequence
  derived and/or modified sequence
atggtggacgtgggcaagtggcccatcttcaccctgctgagcccccaagagatcgcttccatcagaaaggcttgcgtgtttggcacatctgctagtgaggccttatacgtcaccgataacgacgaggtgttcgtttttggcttaaattatagcaactgcctgggcacaggagacaaccaaagtactctcgttccaaaaaaactggagggcctttgcggcaagaagatcaagagtctgtcttacgggagtggaccccacgtcttgctgagcaccgaagacggggtggtgtacgcttggggacataatggctactcacagctcggcaacggcaccaccaaccagggcatagcacctgtccaggtctgtaccaacctcctaatcaaacaggtggtagaggtcgcttgcggctcccaccacagtatggccctggctgcagatggagaggtatttgcatgggggtataataattgtggacaagtgggttcagggtccaccgctaatcagcctacccccaggaaagtgaccaactgcttgcacattaagcgggtagtcggaattgcttgtgggcagacaagctcaatggccgtgctagacaatggcgaggtctatggctgggggtacaacgggaacggacaactgggcctaggtaataacggcaaccagctgacgcctgtacgagttgcagcgctgcattcagtctgtgtgaaccagattgtgtgcgggtacgctcacaccctcgccctgacggacgagggattactgtatgcgtggggcgccaatacctatgggcagctcggcacgggcaacaaaaataatctgctctctccagcccacatcatggtggaaaaagaacgagtggtggagatcgccgcctgtcactcagcccacacatctgctgcaaaaacacagggcggccacgtttatatgtggggccaatgcaggggccagtcagtcatcctgcctcacctgactcatttcagctgtacagacgacgtgtttgcatgctttgcaaccccagccgtgtcctggcggctgcttagtgtggtgtcgatcgtgatcggtaagtag

SEQ ID NO: 280203 - DNA, 1596 bp, Artificial Sequence
  derived and/or modified sequence
atggtggacgttggaaagtggcctatttttaccttgctgtccccgcaggaaatcgcatccattagaaaagcgtgcgtcttcggcacgtctgcatcagaggcgctctatgtaaccgacaacgacgaggtttttgtgtttggattgaattactcaaattgcctggggaccggggacaaccagtccaccctagtgcctaaaaaactggagggcctatgcgggaaaaaaatcaaatccctctcctacggcagtggaccgcacgtccttctgtcgacagaggatggtgtggtttacgcgtggggccataacgggtactcccagttgggtaacggcaccaccaaccaggggatagcaccggtgcaggtttgcacgaatctgttgatcaaacaggtggtggaggtggcttgcgggtctcatcactcgatggcactggctgcggacggggaagtgtttgcttggggctataacaactgcggccaggttgggtcaggaagcaccgctaatcagccaacccccagaaaggttacaaactgcttgcacattaaacgggttgtgggtattgcctgcgggcagacgagttcaatggccgtgcttgacaacggcgaagtgtatggttggggatacaacggcaatggtcaattaggcttgggcaacaacggcaatcagttgacacccgtacgggttgcggcattgcactctgtgtgcgtgaaccagattgtctgcgggtatgctcacaccctggccttgactgacgagggtctcctgtatgcttggggtgccaacacatatggacaactcggcaccggaaataaaaataacctcctgtcacctgcccatatcatggttgagaaggagcgagtcgtggaaatcgccgcatgccattcagcgcatactagtgccgctaaaacccaagggggtcatgtttacatgtggggccagtgccgaggccagagtgtcattctgccacaccttacacatttttcttgcacggatgacgtctttgcctgtttcgcaacaccggctgtcagttggcgtctgctctcagtggaacacgaggacttcctgacggtagctgagtcgctaaagaaagaattcgattcacccgagaccgcagatctgaaattccggattgatgggaaatacattcacgtgcataaggcagtgttgaagatccgttgtgaacactttcggtctatgttccagagttactggaacgaggatatgaaagaggtgatagaaatagatcagttcagttatcctgtgtatcgcgcatttctgcagtacctgtatactgatactgtggatttacccccagaggacgccattgggctgctggacctggcgaccagctactgcgagaaccgacttaagaagctgtgccaacatataatcaagcggggaattactgtggagaacgcatttagtctcttcagtgcagcggttcggtatgacgctgaggatctggaagaattttgtttcaaattctgtataaatcacctgactgaagtgacccaaacagcagccttttggcagatggacggaccgctgctcaaggagtttattgcgaaagcatccaaatgcggggctttcaagaattag

SEQ ID NO: 280204 - DNA, 1596 bp, Artificial Sequence
  derived and/or modified sequence
atggtcgacgtcggtaaatggcctatttttactttgttaagcccccaggaaattgcatctatacggaaagcctgtgtatttggaacttcagccagcgaggccttgtacgtgactgataatgatgaagtgttcgtctttggactgaattattcaaactgtctggggaccggagacaaccagagcaccctcgtgccaaaaaaactcgaagggctgtgtggtaaaaagatcaaatccctgtcctatggatctgggccacatgttctgctgagtacagaggatggtgtggtgtatgcttggggacacaacgggtactctcagttgggtaacggcaccaccaaccagggcatagctccagtccaggtgtgcacaaatctgctgatcaaacaggtggtcgaggtcgcttgcgggagccaccactcaatggcactggcggcagacggtgaagttttcgcctggggctataacaactgtgggcaggtgggctctgggagcaccgccaaccagcccacacccagaaaggtcactaattgtttacatattaagagagtggtgggaatcgcctgcggccagacttcctctatggccgtgctggacaacggagaagtgtatggatgggggtataacgggaacggccagctcggcctcggcaataatggcaatcaattgactcccgtgcgggtcgctgccctgcatagcgtgtgcgtgaaccagatcgtttgcggatacgcgcacacacttgctcttaccgacgagggactgctttacgcatggggcgcaaacacctacggtcagctgggtacgggcaacaagaataacctgctgagtccggcacacattatggtagagaaagaaagggtcgtagaaatagcagcgtgccactcagctcatacgagtgctgcaaaaactcaagggggacatgtgtacatgtggggacagtgcagggggcaatctgttattttgccgcatttaacacacttttcctgtactgacgacgtattcgcctgttttgccaccccagcggtttcctggagactgctttcagtggaacacgaggattttttgacagtggccgaaagtctgaagaaagagttcgacagccccgagacagctgacctcaagttcagaatagacggaaaatacattcacgtgcataaagcggtcctcaagattcgctgcgagcacttcagatccatgtttcagtcctactggaatgaagacatgaaggaggttattgaaatagaccagttctcctacccagtgtatagagctttcctacagtacctatatacagatacggtcgaccttccgcctgaagatgcgatcgggctcttggacctagcaaccagctattgcgaaaatcggctcaagaaactttgccaacacatcatcaagagggggatcacagtcgaaaatgcattcagtctgttctcagcagctgtccgatatgacgccgaggacctggaggaattctgctttaagttctgtatcaaccatctgacagaggtcacccaaaccgctgcgttttggcagatggatggaccattactcaaggagttcattgccaaggcaagcaaatgcggggcattcaaaaactag

SEQ ID NO: 280205 - DNA, 1068 bp, Artificial Sequence
  derived and/or modified sequence
atggtagacgtgggcaagtggccgatctttactctcctgtcgccacaggaaattgcaagtatccgcaaggcctgcgttttcggaacctccgccagcgaggctttgtatgtgaccgataacgacgaagtctttgtcttcggtctgaactactccaactgtctgggcacgggcgacaaccaatcaactctagtgccaaaaaaactggagggcctgtgtggcaaaaagatcaagtctttatcatacggaagcggcccacacgtgcttctctccacagaggacggcgtggtgtacgcctggggtcacaatgggtattcccagttgggcaacggtaccactaatcagggaattgccccagtgcaagtctgcaccaacctgctgataaagcaggttgtagaggtggcatgtgggtctcaccattccatggcactagcggctgacggcgaggtcttcgcctggggctacaataattgtggccaagtaggcagcgggtcaacggcaaaccagccaactccacgaaaggtcactaattgtcttcacatcaagcgagtcgtgggcatagcgtgcggtcagacttccagcatggccgttctcgacaatggcgaagtctacggatgggggtacaacggcaatggacaactgggtctagggaacaatggtaaccagttgactccggtccgcgtagccgctcttcacagcgtatgcgtgaatcagatagtctgcggctatgcgcacactctggctttgactgacgagggcctcctgtatgcttggggggctaatacatatgggcaactcgggacaggtaacaaaaacaacctgctctcgccagctcacatcatggtcgaaaaggagcgagtggtagagattgccgcatgtcattccgcccacacaagcgctgctaagacccagggcggtcatgtgtacatgtggggtcaatgcaggggacagagcgtcattctgccacacttgactcacttttcatgtacagacgacgttttcgcttgcttcgcaacccccgcagtcagttggcggctgctgagcgtcgtgtccatagtcatcgggaaatag

SEQ ID NO: 280206 - DNA, 3816 bp, Artificial Sequence
  derived and/or modified sequence
cagagatgtcggcttatttataggaattgcttgaagccagagtcatggtggatgtcggaaagtggcccatcttcactctactctcccctcaagagatcgcgtctattcggaaggcgtgtgtcttcggcacctcagccagtgaagcactgtacgttactgacaatgatgaggtctttgtatttggactgaactatagtaactgtctaggaactggagataaccagagtacacttgtacccaaaaagctagaaggcttatgtggaaagaagattaaaagcctcagttacgggagtggaccacatgttcttctcagcaccgaagatggagtggtttatgcctggggccacaatggatatagccagcttgggaatgggacgaccaaccaaggcattgctcccgtccaggtctgtaccaatctcttgatcaagcaagtggtggaagtagcttgtggctcacatcattcaatggctctggcagctgatggagaggtgtttgcttggggttataacaactgtggccaagtgggatcaggttctacagcaaatcaaccaactcctcgaaaagttacaaactgtttacatattaagagggtagttggcattgcctgtggtcagacttcatccatggctgttctggacaatggcgaggtatatggctggggttacaatggcaacggtcagctgggcctgggaaacaatggcaaccagctgacccctgtgagagtggcagctttgcacagcgtgtgtgtgaaccagattgtctgcggttacgcacatactctagcactaacagatgagggcttgctgtatgcctggggagctaacacatatgggcagctgggaactggcaataaaaataacctgctaagcccagcacacatcatggtggagaaagaaagggtggtagagattgcagcctgtcactctgcccacacgtctgcagccaagacgcagggtgggcacgtgtacatgtggggccagtgccggggtcagtccgtgatcctcccgcacctcacccacttctcctgcaccgacgacgtgtttgcctgctttgccactcccgccgtctcgtggcgcctcctgtctgtggagcatgaagactttttaacagttgcagagtcactgaagaaagaatttgatagtccagaaactgctgatctgaagtttcgaattgatggaaaatatattcatgtccataaagctgttttgaaaatcaggtgtgagcattttcgatccatgttccagtcgtattggaatgaagacatgaaggaagtgatagaaatcgatcagttttcttacccagtgtatcgtgcctttctccagtacctctacacagacacagtcgacctgccgccagaagatgctataggtcttctggatttggcgacatcttactgtgaaaacagactgaaaaaactttgtcagcacattatcaagagaggaattactgtggagaatgccttttcgctattctctgctgcagtcagatatgatgcagaggatttagaagaattctgctttaagttttgcatcaatcatttgacagaagttacacagactgcagcattttggcaaatggatggccctctgctaaaggaattcattgctaaagccagtaaatgtggagcctttaagaactgaagcgcaaggctgctgggttctgtgtgagtgctctggggcactgttgaggatgtgtccagtttgtgctctacgggtgatgtgattctgcaggtaaaagaccatcaggttgtttttttccacatctgggacacagttgtttgtgtaggaacataacaagggtgtacggcttttcttgagcccattttaaacaacccttgtttccagataagtgtattttaaatgtgacctttcgtaaatttgggctggaacatgtaaaagggtgaaagttagtcgtttttggtcttcttttcatttttgattagaggaacttctgaacttggaaaggggaagttggcagcaactctcctgggccacgtatcaacaatcttctgacagcaggagcagtgatagttggggaattgtgagatgaatggagaggccccatcgtgaattaaagatgctgacctggggattgttaagtgctgccttagttgctagtttagtagccttactgtgaaggaataattaagattgtttcagacttttgtttgtgtgcttgcgttgatgacttttttaacttcaagataaatcaaagtaataagtttaacgtatattaaacctgttgaaatgataattatgtaaagataaatattctaggttagtcaagatttctcttaagatttaagtgcataaagaatagtaatttagaagtatccgtgaaaagttgataatgaaagaaatttgatgaaggtgaatattttataaattagaatctccactacttatccaatggtgttttatttcattaaggtagaacttgagaactcaagtttaaattgtcccccaccaccttcttctataaatgcaaacttaagaggaaaataatgacatgtatagtatactcttgccttcctaaattatgactgctgaatcatcatatctactatatatgactggaagaagtggttcttcaagtcaaccctcttacaagacttagtggaatttgctttatctactttaggccaaatccatcacacattggcttatgtgaaactttatcatctttcacttttggttttcctctgtttttaaacatcttaggtataacagcacaatttcaccttgaaaaagcaccaaaattatggtgttcctgaaaagatcctattaaaagacagtagtttatttgaactggttatggaaggtgactttgggatgtaagagtgttcaactgtgagtttcatcatgtgtgtccgttgagcttgcttttaagagcaatgttttgctttgctctctggtccatgaactcatttccatttgagtgagttcccttagtgaattttgtctcctgcttggaaagtctctcttctgaacctggagcctgaatacattttcagagccaaattacaagtgggtgaagacatgctacaactactatttttagcaatgtttttaaatttgtgtctattggggtgggaaggggagtgaggccctaaagataggaattcactgatagctgaaatagatacaagcctaggagccccagcccccttttcttgaccatatcacaagtgattgaagcccagtgaattagtcggttagaattcgttctacaacatgatagaacttttcttactagcttcagaaatgcacattgatttgtgctatgatgggtggtgtttgtaacaatcactgttctataggcttatgatctgagcaaaatgtgaacttcagtatgtttactattgctcttacttgaaaactttttttcaaaaaaagcacaaattaaagtagtaaattcatatccatagatagttcattcattcaacaaatatttaccaagttcctaatataagtgaaggaccacttctcatattagattactaagtcatttgtatgaatatgtgtggcagtgaagagaacaggtctttcaaaaagcatttgattattttttttaaatacactctcttatttttctacttgtttttttgttaatcatagcaggatatgacaactcttatttgaattgattttttcatctaatgtaataatggaagccaaagtattcatatttcttaagatagccctaaatgtactcttgaacttcttactggaacaatgtttgatactctagtatgtaagctgtatttatgtaatatttagaacgacatgttaataaacaaagtaacattaaaacagg

SEQ ID NO: 280207 - DNA, 4025 bp, Artificial Sequence
  derived and/or modified sequence
gacccggcgggcccggcgccctggcgctcctcctcttcgctgccggtgggcaccgccgctcgctcgcacttctgcgcccattggagcttcggagatccctgcggtcccgcgggacggcgcggcagcagctgacctcgcagacaggatcttgctctcttgcccagactggaatacagtggtgtgaacacggctcactgcagcctcaacctcctggactcagagatgtcggcttatttataggaattgcttgaagccagagtcatggtggatgtcggaaagtggcccatcttcactctactctcccctcaagagatcgcgtctattcggaaggcgtgtgtcttcggcacctcagccagtgaagcactgtacgttactgacaatgatgaggtctttgtatttggactgaactatagtaactgtctaggaactggagataaccagagtacacttgtacccaaaaagctagaaggcttatgtggaaagaagattaaaagcctcagttacgggagtggaccacatgttcttctcagcaccgaagatggagtggtttatgcctggggccacaatggatatagccagcttgggaatgggacgaccaaccaaggcattgctcccgtccaggtctgtaccaatctcttgatcaagcaagtggtggaagtagcttgtggctcacatcattcaatggctctggcagctgatggagaggtgtttgcttggggttataacaactgtggccaagtgggatcaggttctacagcaaatcaaccaactcctcgaaaagttacaaactgtttacatattaagagggtagttggcattgcctgtggtcagacttcatccatggctgttctggacaatggcgaggtatatggctggggttacaatggcaacggtcagctgggcctgggaaacaatggcaaccagctgacccctgtgagagtggcagctttgcacagcgtgtgtgtgaaccagattgtctgcggttacgcacatactctagcactaacagatgagggcttgctgtatgcctggggagctaacacatatgggcagctgggaactggcaataaaaataacctgctaagcccagcacacatcatggtggagaaagaaagggtggtagagattgcagcctgtcactctgcccacacgtctgcagccaagacgcagggtgggcacgtgtacatgtggggccagtgccggggtcagtccgtgatcctcccgcacctcacccacttctcctgcaccgacgacgtgtttgcctgctttgccactcccgccgtctcgtggcgcctcctgtctgtggagcatgaagactttttaacagttgcagagtcactgaagaaagaatttgatagtccagaaactgctgatctgaagtttcgaattgatggaaaatatattcatgtccataaagctgttttgaaaatcaggtgtgagcattttcgatccatgttccagtcgtattggaatgaagacatgaaggaagtgatagaaatcgatcagttttcttacccagtgtatcgtgcctttctccagtacctctacacagacacagtcgacctgccgccagaagatgctataggtcttctggatttggcgacatcttactgtgaaaacagactgaaaaaactttgtcagcacattatcaagagaggaattactgtggagaatgccttttcgctattctctgctgcagtcagatatgatgcagaggatttagaagaattctgctttaagttttgcatcaatcatttgacagaagttacacagactgcagcattttggcaaatggatggccctctgctaaaggaattcattgctaaagccagtaaatgtggagcctttaagaactgaagcgcaaggctgctgggttctgtgtgagtgctctggggcactgttgaggatgtgtccagtttgtgctctacgggtgatgtgattctgcaggtaaaagaccatcaggttgtttttttccacatctgggacacagttgtttgtgtaggaacataacaagggtgtacggcttttcttgagcccattttaaacaacccttgtttccagataagtgtattttaaatgtgacctttcgtaaatttgggctggaacatgtaaaagggtgaaagttagtcgtttttggtcttcttttcatttttgattagaggaacttctgaacttggaaaggggaagttggcagcaactctcctgggccacgtatcaacaatcttctgacagcaggagcagtgatagttggggaattgtgagatgaatggagaggccccatcgtgaattaaagatgctgacctggggattgttaagtgctgccttagttgctagtttagtagccttactgtgaaggaataattaagattgtttcagacttttgtttgtgtgcttgcgttgatgacttttttaacttcaagataaatcaaagtaataagtttaacgtatattaaacctgttgaaatgataattatgtaaagataaatattctaggttagtcaagatttctcttaagatttaagtgcataaagaatagtaatttagaagtatccgtgaaaagttgataatgaaagaaatttgatgaaggtgaatattttataaattagaatctccactacttatccaatggtgttttatttcattaaggtagaacttgagaactcaagtttaaattgtcccccaccaccttcttctataaatgcaaacttaagaggaaaataatgacatgtatagtatactcttgccttcctaaattatgactgctgaatcatcatatctactatatatgactggaagaagtggttcttcaagtcaaccctcttacaagacttagtggaatttgctttatctactttaggccaaatccatcacacattggcttatgtgaaactttatcatctttcacttttggttttcctctgtttttaaacatcttaggtataacagcacaatttcaccttgaaaaagcaccaaaattatggtgttcctgaaaagatcctattaaaagacagtagtttatttgaactggttatggaaggtgactttgggatgtaagagtgttcaactgtgagtttcatcatgtgtgtccgttgagcttgcttttaagagcaatgttttgctttgctctctggtccatgaactcatttccatttgagtgagttcccttagtgaattttgtctcctgcttggaaagtctctcttctgaacctggagcctgaatacattttcagagccaaattacaagtgggtgaagacatgctacaactactatttttagcaatgtttttaaatttgtgtctattggggtgggaaggggagtgaggccctaaagataggaattcactgatagctgaaatagatacaagcctaggagccccagcccccttttcttgaccatatcacaagtgattgaagcccagtgaattagtcggttagaattcgttctacaacatgatagaacttttcttactagcttcagaaatgcacattgatttgtgctatgatgggtggtgtttgtaacaatcactgttctataggcttatgatctgagcaaaatgtgaacttcagtatgtttactattgctcttacttgaaaactttttttcaaaaaaagcacaaattaaagtagtaaattcatatccatagatagttcattcattcaacaaatatttaccaagttcctaatataagtgaaggaccacttctcatattagattactaagtcatttgtatgaatatgtgtggcagtgaagagaacaggtctttcaaaaagcatttgattattttttttaaatacactctcttatttttctacttgtttttttgttaatcatagcaggatatgacaactcttatttgaattgattttttcatctaatgtaataatggaagccaaagtattcatatttcttaagatagccctaaatgtactcttgaacttcttactggaacaatgtttgatactctagtatgtaagctgtatttatgtaatatttagaacgacatgttaataaacaaagtaacatt

SEQ ID NO: 280208 - DNA, 1971 bp, Artificial Sequence
  derived and/or modified sequence
ggcgggcccggcgccctggcgctcctcctcttcgctgccggtgggcaccgccgctcgctcgcacttctgcgcccattggagcttcggagatccctgcggtcccgcgggacggcgcggcagcagctgacctcgcagacaggatcttgctctcttgcccagactggaatacagtggtgtgaacacggctcactgcagcctcaacctcctggactcagagatgtcggcttatttataggaattgcttgaagccagagtcatggtggatgtcggaaagtggcccatcttcactctactctcccctcaagagatcgcgtctattcggaaggcgtgtgtcttcggcacctcagccagtgaagcactgtacgttactgacaatgatgaggtctttgtatttggactgaactatagtaactgtctaggaactggagataaccagagtacacttgtacccaaaaagctagaaggcttatgtggaaagaagattaaaagcctcagttacgggagtggaccacatgttcttctcagcaccgaagatggagtggtttatgcctggggccacaatggatatagccagcttgggaatgggacgaccaaccaaggcattgctcccgtccaggtctgtaccaatctcttgatcaagcaagtggtggaagtagcttgtggctcacatcattcaatggctctggcagctgatggagaggtgtttgcttggggttataacaactgtggccaagtgggatcaggttctacagcaaatcaaccaactcctcgaaaagttacaaactgtttacatattaagagggtagttggcattgcctgtggtcagacttcatccatggctgttctggacaatggcgaggtatatggctggggttacaatggcaacggtcagctgggcctgggaaacaatggcaaccagctgacccctgtgagagtggcagctttgcacagcgtgtgtgtgaaccagattgtctgcggttacgcacatactctagcactaacagatgagggcttgctgtatgcctggggagctaacacatatgggcagctgggaactggcaataaaaataacctgctaagcccagcacacatcatggtggagaaagaaagggtggtagagattgcagcctgtcactctgcccacacgtctgcagccaagacgcagggtgggcacgtgtacatgtggggccagtgccggggtcagtccgtgatcctcccgcacctcacccacttctcctgcaccgacgacgtgtttgcctgctttgccactcccgccgtctcgtggcgcctcctgtctgtggtgagtattgtgattggaaaataattggttcactgaatgggactatttggccagaattgcacatgtatggcatacccagctgaagcacttctgtacacatcttcagatttgtatatactacttaacctggacttgttataaaaggcttcccccagttcttatatcttaaaatggcacaggcattcttttcagaacaaatgtcctaacaatttaaatgttaagtttggaaaaaatatggtcattgactatatcctcctagatcaggggtccccacaccccaggccatatgcctgtactggtccgtggcctgttattaactgggttgcacggcaggaggtgagtggcagtgagcgaagcttcatctgtatttacagctgctccccatcactcacattaccgcctgagctccacctcccatcagatcagcagcggtattagattctcaaagaagcgtaagccctattgtgaactgcacatgcgagggatacaggttgcgagctccttatgagaatctaatgcctagatgatctgtcactgtctcccatcacccccagatggggccgtccagttgtaggaaaacaagctcaggactcccactgattctacattatggtgagttgtgtaattatttcattacatattacagtgtaacaataataaaaattaagtgc

SEQ ID NO: 280209 - DNA, 1596 bp, Artificial Sequence
  derived and/or modified sequence
atggtggacgtgggcaagtggcccatcttcaccctgctgagcccccaggagatcgccagcatcagaaaggcctgcgtgttcggcaccagcgccagcgaggccctgtacgtgaccgacaacgacgaggtgttcgtgttcggcctgaactacagcaactgcctgggcaccggcgacaaccagagcaccctggtgcccaagaagctggagggcctgtgcggcaagaagatcaagagcctgagctacggcagcggcccccacgtgctgctgagcaccgaggacggcgtggtgtacgcctggggccacaacggctacagccagctgggcaacggcaccaccaaccagggcatcgcccccgtgcaggtgtgcaccaacctgctgatcaagcaggtggtggaggtggcctgcggcagccaccacagcatggccctggccgccgacggcgaggtgttcgcctggggctacaacaactgcggccaggtgggcagcggcagcaccgccaaccagcccacccccagaaaggtgaccaactgcctgcacatcaagagagtggtgggcatcgcctgcggccagaccagcagcatggccgtgctggacaacggcgaggtgtacggctggggctacaacggcaacggccagctgggcctgggcaacaacggcaaccagctgacccccgtgagagtggccgccctgcacagcgtgtgcgtgaaccagatcgtgtgcggctacgcccacaccctggccctgaccgacgagggcctgctgtacgcctggggcgccaacacctacggccagctgggcaccggcaacaagaacaacctgctgagccccgcccacatcatggtggagaaggagagagtggtggagatcgccgcctgccacagcgcccacaccagcgccgccaagacccagggcggccacgtgtacatgtggggccagtgcagaggccagagcgtgatcctgccccacctgacccacttcagctgcaccgacgacgtgttcgcctgcttcgccacccccgccgtgagctggagactgctgagcgtggagcacgaggacttcctgaccgtggccgagagcctgaagaaggagttcgacagccccgagaccgccgacctgaagttcagaatcgacggcaagtacatccacgtgcacaaggccgtgctgaagatcagatgcgagcacttcagaagcatgttccagagctactggaacgaggacatgaaggaggtgatcgagatcgaccagttcagctaccccgtgtacagagccttcctgcagtacctgtacaccgacaccgtggacctgccccccgaggacgccatcggcctgctggacctggccaccagctactgcgagaacagactgaagaagctgtgccagcacatcatcaagagaggcatcaccgtggagaacgccttcagcctgttcagcgccgccgtgagatacgacgccgaggacctggaggagttctgcttcaagttctgcatcaaccacctgaccgaggtgacccagaccgccgccttctggcagatggacggccccctgctgaaggagttcatcgccaaggccagcaagtgcggcgccttcaagaactag

SEQ ID NO: 280210 - DNA, 1068 bp, Artificial Sequence
  derived and/or modified sequence
atggtggacgtgggcaagtggcccatcttcaccctgctgagcccccaggagatcgccagcatcagaaaggcctgcgtgttcggcaccagcgccagcgaggccctgtacgtgaccgacaacgacgaggtgttcgtgttcggcctgaactacagcaactgcctgggcaccggcgacaaccagagcaccctggtgcccaagaagctggagggcctgtgcggcaagaagatcaagagcctgagctacggcagcggcccccacgtgctgctgagcaccgaggacggcgtggtgtacgcctggggccacaacggctacagccagctgggcaacggcaccaccaaccagggcatcgcccccgtgcaggtgtgcaccaacctgctgatcaagcaggtggtggaggtggcctgcggcagccaccacagcatggccctggccgccgacggcgaggtgttcgcctggggctacaacaactgcggccaggtgggcagcggcagcaccgccaaccagcccacccccagaaaggtgaccaactgcctgcacatcaagagagtggtgggcatcgcctgcggccagaccagcagcatggccgtgctggacaacggcgaggtgtacggctggggctacaacggcaacggccagctgggcctgggcaacaacggcaaccagctgacccccgtgagagtggccgccctgcacagcgtgtgcgtgaaccagatcgtgtgcggctacgcccacaccctggccctgaccgacgagggcctgctgtacgcctggggcgccaacacctacggccagctgggcaccggcaacaagaacaacctgctgagccccgcccacatcatggtggagaaggagagagtggtggagatcgccgcctgccacagcgcccacaccagcgccgccaagacccagggcggccacgtgtacatgtggggccagtgcagaggccagagcgtgatcctgccccacctgacccacttcagctgcaccgacgacgtgttcgcctgcttcgccacccccgccgtgagctggagactgctgagcgtggtgagcatcgtgatcggcaagtag

SEQ ID NO: 280211 - protein, 498 aa, Artificial Sequence
  derived and/or modified sequence
MYVIESARQRPPKRKYLSSGRKSVFQKLYDLYIEECEKEPEVKKLRRNVNLLEKLVMQETLSCLVVNLYPGNEGYSLMLRGKNGSDSETIRLPYEEGELLEYLDAEELPPILVDLLEKSQVNIFHCGCVIAEIRDYRQSSNMKSPGYQSRHILLRPTMQTLICDVHSITSDNHKWTQEDKLLLESQLILATAEPLCLDPSIAVTCTANRLLYNKQKMNTRPMKRCFKRYSRSSLNRQQDLSHCPPPPQLRLLDFLQKRKERKAGQHYDLKISKAGNCVDMWKRSPCNLAIPSEVDDVKDDYVFECEAGTQYQKTKLTILQSLGDPLYYGKIQPCKADEESDSQMSPSHSSTDDHSNWFIIGSKTDAERVVNQYQELVQNEAKCPVKMSHSSSGSASLSQVSPGKETDQTETVSVQSSVLGKGVKHRPPPIKLPSSSGNSSSGNYFTPQQTSSFLKSPTPPPSSKPSSIPRKSSVDLNQVSMLSPAALSPASSSQRHES

SEQ ID NO: 280212 - protein, 738 aa, Artificial Sequence
  derived and/or modified sequence
MQQALELALDRAEYVIESARQRPPKRKYLSSGRKSVFQKLYDLYIEECEKEPEVKKLRRNVNLLEKLVMQETLSCLVVNLYPGNEGYSLMLRGKNGSDSETIRLPYEEGELLEYLDAEELPPILVDLLEKSQVNIFHCGCVIAEIRDYRQSSNMKSPGYQSRHILLRPTMQTLICDVHSITSDNHKWTQEDKLLLESQLILATAEPLCLDPSIAVTCTANRLLYNKQKMNTRPMKRCFKRYSRSSLNRQQDLSHCPPPPQLRLLDFLQKRKERKAGQHYDLKISKAGNCVDMWKRSPCNLAIPSEVDVEKYAKVEKSIKSDDSQPTVWPAHDVKDDYVFECEAGTQYQKTKLTILQSLGDPLYYGKIQPCKADEESDSQMSPSHSSTDDHSNWFIIGSKTDAERVVNQYQELVQNEAKCPVKMSHSSSGSASLSQVSPGKETDQTETVSVQSSVLGKGVKHRPPPIKLPSSSGNSSSGNYFTPQQTSSFLKSPTPPPSSKPSSIPRKSSVDLNQVSMLSPAALSPASSSQRTTATQVMANSAGLNFINVVGSVCGAQALMSGSNPMLGCNTGAITPAGINLSGLLPSGGLLPNALPSAMQAASQAGVPFGLKNTSSLRPLNLLQLPGGSLIFNTLQQQQQQLSQFTPQQPQQPTTCSPQQPGEQGSEQGSTSQEQALSAQQAAVINLTGVGSFMQSQAAAVAILAASNGYGSSSSTNSSATSSSAYRQPDTRALNQKN

SEQ ID NO: 280213 - DNA, 2062 bp, Artificial Sequence
  derived and/or modified sequence
aatcggaagtgcggccgccggaactggctgttggtgggggtgcagcactgagccgccgacggggcgggtgggctttgctgccgagcaggcggcgccgtcttggggcctagcggcgaggcgacccgcacagtactgtaagattgatgttaaaggcatggtgttcaccccacttcatcagcgtacataagttatctcttcttttggacccttattttatgccataatgtatgtcattgaaagtgcccgacagagacctcctaaaaggaaatacctatcaagtggaagaaaatctgtatttcaaaaactttatgacttgtatattgaagaatgtgaaaaagaacctgaagttaagaaattaagaagaaatgtgaacttgttagagaagcttgttatgcaagagactttgtcatgtttagtggtcaatctatacccaggaaatgagggatattctctgatgctcaggggaaaaaacggatcagattccgagaccattcgactgccctatgaagaaggagagttgcttgaatatttggatgcagaagaattacctcctattttggttgatctcctagaaaaatctcaggttaatatttttcattgcggatgtgtcatagcagaaatacgtgactacaggcagtccagtaacatgaaatctcctggttaccaaagtcggcacattctcttacgtccaacaatgcagactttaatttgtgatgtacattcaataacaagtgataaccacaaatggacccaggaagacaaacttttgcttgagagccagctcatcctagctacagctgaaccactctgtcttgatccttctatagcagtcacctgcactgcaaacagactgctctataacaagcaaaagatgaacactcgcccaatgaaacggtgtttcaagaggtattccagatcctctctgaatcggcagcaagatctatctcattgtccacctcctcctcagctgaggttacttgatttcttacaaaaaagaaaggaaagaaaagcaggtcagcattatgacctcaaaatttctaaggcaggaaattgtgtagatatgtggaaacggagtccctgtaatttggccataccttctgaagtagatgatgtaaaagatgattatgtatttgaatgtgaagctggtactcagtatcagaaaacaaagctgaccatcttgcagtcgcttggagatccactttactatggtaaaatacagccatgtaaagcagatgaagaaagtgacagccagatgtctccatcacactcgtccacagatgatcattcaaattggttcattattggatcaaagaccgatgctgagagggtagtcaatcagtaccaagaattagtccagaatgaagccaaatgtccggtcaagatgtcacacagctccagtggctcagccagtctgagtcaggtttctccagggaaagaaacagatcaaactgaaaccgtgtcagttcagtcttcggtattggggaagggtgtaaaacatcgacccccaccaatcaaacttccctcaagctcaggaaatagttcctcaggtaactattttacaccacaacagacaagcagctttctcaaatctccaactcctcctccttcttctaagccatcaagtattcctcggaaatcatctgtggatctcaatcaagttagcatgctttctccagctgccctatcacctgccagctcatcacaaagacatgaaagctaaaaaagaaaacacctcaagagcttttggttttacttttttggtttttgttttttgtttttgttttttaaaaaattgataaactgtgcatacttcattcacaacagattttctatacattctacatttaaacagaagtacacagttactgttaaagatgcagtattatctctcagatatttgctttattactgttttttgtaaatttgtttgtcaggataaacttgatgtgttaggaattaaacatgtatatttaggtgccaaatatgattgttaaccatatgtaacttattaaatatgtttacagtttatctcagacttttacactaaataagcaatattttt

SEQ ID NO: 280214 - DNA, 1497 bp, Artificial Sequence
  derived and/or modified sequence
atgtatgtcatagaaagcgcacgtcagaggccgcctaaaagaaagtacctcagctccgggcgaaagagtgtctttcagaagctgtatgatttgtatattgaggagtgcgagaaagagcctgaggtaaaaaagttgagaagaaacgttaatttgcttgaaaaactggtaatgcaggaaaccctgtcttgcctcgtggtcaatctctaccctggaaacgagggctacagcctcatgctcagaggcaagaacgggtctgactcagagacaattagattgccttatgaggagggcgaattgcttgagtacctggacgccgaagaactgcctccgatccttgtggatctccttgaaaagtcccaggttaatatctttcattgtgggtgtgtgatcgctgaaattcgggactatagacagtcatccaatatgaaatcccccggttatcaatcgcggcacatcctgttacgccctacgatgcagactctaatttgtgacgtgcactcgattacgagtgataaccacaagtggacccaggaggataaactactgctggaaagccagttgattctggccaccgctgagccactgtgcttagaccccagcattgcagtcacctgtacagctaatagactgctttataataaacaaaaaatgaatacaaggcccatgaaacgctgtttcaagagatacagccgctcgtccttgaatcgtcagcaggacctgtcccattgtcccccgcccccacagctcaggttgcttgattttttacagaagaggaaggagcggaaggcaggtcaacattacgacctcaaaatcagcaaagccggaaactgcgtggacatgtggaaacggtctccatgcaacttggccattccttcagaagtggacgacgtcaaggacgattatgtgttcgaatgcgaggctggtacacagtaccagaaaacaaaactaacgattttgcaatcattgggggatccattatattatggaaaaatacagccatgtaaagcggacgaggagtcagacagtcaaatgtcgccatcgcactcctctacagatgaccacagcaactggtttattattggaagcaaaaccgacgcagagagggtcgtcaatcagtaccaggaactagtgcagaacgaagcaaagtgccccgtcaagatgtcccactcttcaagcggatctgcttctctgtcacaggtgagcccaggtaaagagacggaccagactgaaactgtgtcagtgcagagttctgtgctcggtaagggcgtgaaacatcggccgcctccaataaagttgccttcgtcttccggtaactcatcatctggcaattacttcacacctcagcaaacaagctcctttttgaagagccccactcctccaccatcaagcaagccgagttccattccaaggaagtcttccgtggatctcaaccaggtttccatgctttcccctgccgcactgagccccgctagtagttcgcagagacacgagtcttag

SEQ ID NO: 280215 - DNA, 1497 bp, Artificial Sequence
  derived and/or modified sequence
atgtatgtgattgagagcgcccggcagaggcctcccaagaggaagtacctgagcagcggcaggaagtctgtgttccagaagctgtatgacctgtacattgaagaatgtgagaaggagcctgaggtgaagaagctgcggagaaatgtgaacctgctggagaagctggtgatgcaggagaccctgagctgcctggtggtgaacctgtacccaggaaatgaaggctacagcctgatgctgcggggcaagaatggaagtgacagcgagaccatccggctgccctatgaggagggggagctgctggagtacctggatgctgaggagctgccccccatcctggtggacctgctggagaagagccaggtgaacatcttccactgcggctgtgtgattgctgagatccgggactaccggcagagcagcaacatgaagagccctggctaccagagccgccacatcctgctgcggcccaccatgcagaccctcatctgtgatgtgcacagcatcaccagtgacaaccacaagtggacccaggaggacaagctgctgctggagagccagctgatcctggccacagctgagcccctgtgcctggaccccagcattgctgtgacctgcacagccaaccggctgctgtacaacaagcagaagatgaacacccggcccatgaagcgctgcttcaagcgctacagccgcagcagcctgaaccggcagcaggacctgagccactgccccccaccaccccagctgcggctgctggacttcctgcagaagaggaaggagaggaaggccggccagcactatgacctgaagatcagcaaggccggcaactgtgtggacatgtggaagaggagcccctgcaacctggccatccccagcgaggtggatgatgtgaaggatgattatgtgtttgaatgtgaggccggcacccagtaccagaagaccaagctgaccatcctgcagagcctgggggaccccctgtactacggcaagatccagccctgcaaggcagatgaggagagtgacagccagatgagccccagccacagcagcacagatgaccacagcaactggttcatcatcggcagcaagacagatgctgagcgggtggtgaaccagtaccaggagctggtgcagaatgaggccaagtgccctgtgaagatgagccacagcagcagcggcagcgccagcctgagccaggtgtcccctgggaaggagacagaccagacagaaacagtgtctgtgcagagctctgtgctgggcaaaggagtgaagcaccggcccccacccatcaagctgcccagcagcagcggcaacagcagcagcggcaactacttcaccccccagcagaccagcagcttcctgaagagccccaccccaccacccagcagcaagcccagcagcatccccaggaagagctctgtggacctgaaccaggtgtccatgctgagccctgctgccctgagccctgccagcagcagccagagacatgagagctag

SEQ ID NO: 280216 - DNA, 1497 bp, Artificial Sequence
  derived and/or modified sequence
atgtacgtgatcgagagcgcccggcagcggccccccaagcggaagtatctcagcagtggtcgcaaaagtgtgtttcagaaactatatgacctgtatatagaggagtgtgagaaggaacccgaggtgaagaagctgcggaggaacgtgaacctcctcgaaaagttagtgatgcaagagaccctgtcgtgtctagtggtgaatctctaccccggaaatgaggggtatagccttatgctgagaggcaaaaatggctctgacagtgaaaccatccgactgccatacgaagaaggagagctcctcgagtacttggatgccgaagagcttccacctatactggtcgacttattggagaaatctcaggtgaatatcttccattgcggctgcgtgatcgccgaaatccgcgattacaggcagtcctctaacatgaaatctcccggatatcagagccggcatatattactgagacctactatgcaaactctgatctgcgatgttcatagtattacatcggataaccataagtggacccaagaagataaattgctcctagaatcccaattaattcttgccacagccgagccgctatgtctggatccaagcatagcagttacgtgcacagcaaatagattattatataacaagcaaaaaatgaatactcgcccgatgaagcgctgctttaaaagatacagccgtagctccctgaatcgacagcaggatctgtcccactgtccacctccgcctcagcttcgcctcctggactttctgcagaaacgaaaggaacgaaaagccgggcagcactacgatctgaagatatctaaagctgggaattgtgtggacatgtggaagagatccccatgtaatctcgccattccaagcgaggttgatgacgtcaaggacgattatgtatttgaatgcgaagcaggaactcagtaccaaaagactaaactgaccattctgcagagtttaggggaccctttgtactatggaaaaatccagccttgtaaggctgacgaagagtccgactcgcaaatgtccccatcacacagcagtaccgacgaccattctaactggttcatcattggttcaaagaccgatgctgagagagtcgtcaaccaatatcaggagctagtccagaacgaggccaagtgccctgtgaaaatgagccatagctcatccggatctgcaagtttgtcacaagtaagccccggcaaggaaaccgaccagaccgaaacagtgagtgttcaaagctccgtgttgggtaagggagtgaagcaccggccccccccaattaaattgccatcctccagcggcaacagctcctcaggaaactactttactccacagcaaacctctagcttcctaaagtccccaaccccaccgccatcaagcaagccttcctccatccctcggaagtcttctgtggacctgaatcaggtctcaatgctgtcccctgctgctctgtcacccgcttcatcttctcagcggcacgagagctag

SEQ ID NO: 280217 - DNA, 1497 bp, Artificial Sequence
  derived and/or modified sequence
atgtatgtgatcgaaagtgcgcgacagcgaccccctaaacgcaaatacctaagcagtgggcgaaagtccgtttttcagaaattgtacgacctgtatatcgaggagtgcgaaaaggagcccgaggtgaaaaaactgcggagaaacgttaatttactggaaaagctggttatgcaggaaaccttatcttgtctagtggtgaacctttacccaggcaacgaggggtactctctgatgctccggggaaaaaacggatctgactcggaaaccatacgcctcccctacgaagaaggagagctcctggagtacttagatgccgaggaacttcctcccattctcgtggacctgctggagaaaagccaggttaacatcttccactgcggctgcgtcattgccgaaataagagactacagacagtctagcaatatgaagtcacctgggtatcaatccaggcatatattgctgcgtcctacaatgcagaccctgatctgcgatgtgcattcaataacaagtgataaccataagtggacccaagaggataagctgcttttggaatcccagctaattctagccacagcggagccactatgcctggacccctccattgccgtgacatgcaccgcaaacaggttactttacaataaacagaagatgaatacaaggcctatgaagagatgtttcaaaaggtatagtaggtcttcactgaatcggcagcaggacctgtcccactgccctcctccgcctcagctgcggctcctggatttcctccagaagcgaaaggagcggaaggccggacaacactatgatcttaagatctcaaaggcaggaaattgcgtggatatgtggaagaggtcgccatgcaacctcgctatcccctcagaagtagacgacgtgaaagatgattacgtgttcgaatgcgaagccggaacgcagtatcagaaaacgaagcttaccattctgcagtccctcggtgaccctttgtattacgggaaaatccagccgtgcaaggcagacgaggagtctgactctcagatgagcccttctcacagctctaccgatgaccattcaaattggttcatcattggctcaaaaacagacgctgagcgagtggtcaatcagtaccaagagcttgtgcaaaatgaggcaaaatgtccagtgaagatgagccactcttcatctggctccgcgtcactttcccaggttagccccggaaaggaaaccgaccaaaccgagacagtttccgtccagagctccgtgcttgggaagggggtgaaacacaggcctccacccataaaactgccttcatcttcagggaattctagtagcggaaattatttcaccccacagcagacttccagctttttgaagagtcctactccacctccttcatctaaaccttcttctattccccgaaaaagttctgttgatctcaatcaggtgagtatgttgtctccagcagcactgtcccccgcatcttcatcccagaggcacgagtcatag

SEQ ID NO: 280218 - DNA, 1497 bp, Artificial Sequence
  derived and/or modified sequence
atgtacgtgatcgagagcgccagacagagaccccccaagagaaagtacctgagcagcggcagaaagagcgtgttccagaagctgtacgacctgtacatcgaggagtgcgagaaggagcccgaggtgaagaagctgagaagaaacgtgaacctgctggagaagctggtgatgcaggagaccctgagctgcctggtggtgaacctgtaccccggcaacgagggctacagcctgatgctgagaggcaagaacggcagcgacagcgagaccatcagactgccctacgaggagggcgagctgctggagtacctggacgccgaggagctgccccccatcctggtggacctgctggagaagagccaggtgaacatcttccactgcggctgcgtgatcgccgagatcagagactacagacagagcagcaacatgaagagccccggctaccagagcagacacatcctgctgagacccaccatgcagaccctgatctgcgacgtgcacagcatcaccagcgacaaccacaagtggacccaggaggacaagctgctgctggagagccagctgatcctggccaccgccgagcccctgtgcctggaccccagcatcgccgtgacctgcaccgccaacagactgctgtacaacaagcagaagatgaacaccagacccatgaagagatgcttcaagagatacagcagaagcagcctgaacagacagcaggacctgagccactgccccccccccccccagctgagactgctggacttcctgcagaagagaaaggagagaaaggccggccagcactacgacctgaagatcagcaaggccggcaactgcgtggacatgtggaagagaagcccctgcaacctggccatccccagcgaggtggacgacgtgaaggacgactacgtgttcgagtgcgaggccggcacccagtaccagaagaccaagctgaccatcctgcagagcctgggcgaccccctgtactacggcaagatccagccctgcaaggccgacgaggagagcgacagccagatgagccccagccacagcagcaccgacgaccacagcaactggttcatcatcggcagcaagaccgacgccgagagagtggtgaaccagtaccaggagctggtgcagaacgaggccaagtgccccgtgaagatgagccacagcagcagcggcagcgccagcctgagccaggtgagccccggcaaggagaccgaccagaccgagaccgtgagcgtgcagagcagcgtgctgggcaagggcgtgaagcacagacccccccccatcaagctgcccagcagcagcggcaacagcagcagcggcaactacttcaccccccagcagaccagcagcttcctgaagagccccacccccccccccagcagcaagcccagcagcatccccagaaagagcagcgtggacctgaaccaggtgagcatgctgagccccgccgccctgagccccgccagcagcagccagagacacgagagctag

SEQ ID NO: 280219 - DNA, 876 bp, Artificial Sequence
  derived and/or modified sequence
atggtgagagagcagtacaccaccgccaccgagggcatctgcatcgagagacccgagaaccagtacgtgtacaagatcggcatctacggctggagaaagagatgcctgtacctgttcgtgctgctgctgctgatcatcctggtggtgaacctggccctgaccatctggatcctgaaggtgatgtggttcagccccgccggcatgggccacctgtgcgtgaccaaggacggcctgagactggagggcgagagcgagttcctgttccccctgtacgccaaggagatccacagcagagtggacagcagcctgctgctgcagagcacccagaacgtgaccgtgaacgccagaaacagcgagggcgaggtgaccggcagactgaaggtgggccccaagatggtggaggtgcagaaccagcagttccagatcaacagcaacgacggcaagcccctgttcaccgtggacgagaaggaggtggtggtgggcaccgacaagctgagagtgaccggccccgagggcgccctgttcgagcacagcgtggagacccccctggtgagagccgaccccttccaggacctgagactggagagccccaccagaagcctgagcatggacgcccccagaggcgtgcacatccaggcccacgccggcaagatcgaggccctgagccagatggacatcctgttccacagcagcgacggcatgctggtgctggacgccgagaccgtgtgcctgcccaagctggtgcagggcacctggggccccagcggcagcagccagagcctgtacgagatctgcgtgtgccccgacggcaagctgtacctgagcgtggccggcgtgagcaccacctgccaggagcacaaccacatctgcctgtag

SEQ ID NO: 280220 - DNA, 876 bp, Artificial Sequence
  derived and/or modified sequence
atggtgcgcgaacaatacacaaccgctaccgaaggcatctgcattgagcgaccggagaaccagtatgtatataagatcggcatctacggctggcggaagagatgtctatatttgttcgtcctcctgctgcttattatcctggtcgttaatctagctctgaccatctggatcttaaaagtaatgtggttttctccagccggcatgggccatctctgcgtgaccaaagacggcctgcgactggagggtgagtctgagttcctattcccactgtatgctaaggagattcattcaagggtagactccagtctcctgctccagagtacacagaatgtgacggtgaacgctaggaatagcgaaggtgaggtcactggaagactgaaagtgggacccaagatggtggaggtccaaaaccagcaatttcagataaattccaatgacggtaagcccttatttactgtggatgagaaagaggtggttgttggcaccgacaagctgcgcgtcaccgggccagaaggggccctctttgaacacagcgtggaaaccccgttggtaagggctgatcctttccaggatctgcgcctcgaaagtcctaccaggtcactgtcgatggatgcacccaggggcgtacacatacaagctcatgcagggaagatagaggcgctgtcacagatggatatcctcttccacagcagtgacggaatgctggtgctcgacgctgaaactgtctgtcttccaaaacttgtgcagggtacgtggggtccatccggaagctcccagtcgttgtacgagatatgcgtgtgtccagacggcaaactttacctcagcgtggcaggtgtctcgacgacctgtcaggagcacaatcacatttgtttatag

SEQ ID NO: 280221 - DNA, 876 bp, Artificial Sequence
  derived and/or modified sequence
atggtgcgggagcagtacaccacagccacagagggcatctgcatcgagaggcctgagaaccagtatgtgtacaagattggcatctacggctggaggaagcgctgcctgtacctgtttgtgctgctgctgctgatcatcctggtggtgaacctggccctgaccatctggatcctgaaggtgatgtggttctccccagctggcatgggccacctgtgtgtgaccaaggatggcctgcggctggagggggagagcgagttcctgttccccctgtatgccaaggagatccacagccgggtggacagcagcctgctgctgcagagcacccagaatgtgacagtgaatgccaggaacagcgagggggaggtgacaggccgcctgaaggtgggccccaagatggtggaggtgcagaaccagcagttccagatcaacagcaatgatggcaagcccctcttcaccgtggatgagaaggaggtggtggtgggcacagacaagctgcgggtgacaggccctgagggcgccctgtttgagcacagcgtggagacccccctggtgcgggctgaccccttccaggacctgcggctggagagccccaccaggagcctgtccatggatgccccccggggcgtgcacatccaggcccatgctgggaagattgaggccctgagccagatggacatcctcttccacagcagtgatggcatgctggtgctggatgctgagaccgtgtgcctgcccaagctggtgcagggcacctggggccccagcggcagcagccagagcctgtatgagatctgtgtgtgcccagatggcaagctgtacctgtctgtggccggcgtgtccaccacctgccaggagcacaaccacatctgcctgtag

SEQ ID NO: 280222 - DNA, 876 bp, Artificial Sequence
  derived and/or modified sequence
atggtgcgggagcagtacaccaccgccaccgagggcatctgcatcgagagacccgaaaatcagtatgtgtataaaataggaatctacggttggcgaaaacgctgcctgtatttattcgtgttgctgttgctcatcattttggtggtgaatctcgccctgaccatctggatcctgaaagtgatgtggttttctcctgctggcatgggccacctatgtgtgaccaaagatggcctgcgcttggaaggagaaagtgagtttttgttccccctctacgctaaggaaatccactctagagtggactccagtttgcttttgcagtcaacgcaaaatgtgactgtgaacgccagaaactcggagggtgaggttactgggcgactaaaagtaggccccaagatggtggaggtgcagaaccagcagtttcagattaacagtaatgacgggaaacctttatttactgtggacgagaaggaagtggtcgtaggcacagataagttgagggtcaccggtcctgagggtgctctgttcgaacactccgtcgagactcctctggtaagagcagacccattccaagacctgagacttgagtcgccaactcgctccctaagcatggatgctccacgcggcgtgcatattcaggcccacgccgggaagatcgaagccctgtcacagatggatatcctatttcacagctctgacgggatgctcgtactcgacgccgagacagtatgcctccctaagcttgtgcagggaacttggggcccgtccggcagctctcagtctctatacgaaatctgcgtctgtccagacgggaaactgtatctgtcagtcgcgggggtctctaccacatgccaagagcacaaccatatctgcctgtag

SEQ ID NO: 280223 - DNA, 876 bp, Artificial Sequence
  derived and/or modified sequence
atggtgagagagcagtacaccactgccactgaagggatctgcatcgagagacccgaaaaccagtatgtctataagattggcatatacggttggaggaagcgctgcctgtacctcttcgtcctgctcttgctgataatcctcgtggttaatctggcgctcactatctggattctgaaggtgatgtggttctctccagctgggatggggcacctttgcgtgacgaaggatgggctccggcttgagggcgaaagcgagttcctgttccccctctatgctaaggagattcattcacgggtcgacagcagcctgttgttgcaaagcacacagaacgtaacagtgaacgcacgcaatagcgagggtgaggtcactggccgattaaaggtcggtcccaagatggtcgaggtgcagaatcagcagttccagataaatagtaacgatggaaaaccactatttacggtagacgagaaagaagtggttgtgggtaccgacaagttgcgcgtcaccgggcctgagggtgcccttttcgagcattcagttgaaacaccactggtgcgcgcagatccatttcaggacctgcggttggaaagccccacacggtctctctccatggatgcgccaaggggggtccatattcaagcacatgctggtaagatagaagctctgtctcagatggatattttatttcatagtagtgatgggatgctcgtgctggacgcagagaccgtgtgcctgcccaagctggtgcaaggcacctggggcccatccggctcaagtcagagtttatatgagatctgtgtgtgtccagacggaaagctgtacctcagcgtggccggagtcagtaccacgtgtcaggaacataaccacatttgcctgtag

SEQ ID NO: 280224 - DNA, 876 bp, Artificial Sequence
  derived and/or modified sequence
atggttcgggaacagtacacaacggcaactgagggcatttgcattgaacgcccagaaaatcaatacgtttacaaaatcgggatttacggatggcgcaagcgatgcctgtacctattcgtcctcctactacttatcatcctcgtggttaatttggcgctcaccatttggatcctgaaagtgatgtggttttctcctgcagggatgggtcacctttgtgtgaccaaagacggcctacgcctcgaaggagagtccgaattcttgttccccctgtatgcaaaagaaattcactctcgcgtagattctagcttgcttctgcaaagtacgcagaatgttacggtaaatgcgagaaattcagagggcgaagtcaccggtcgcctgaaagtcgggcctaaaatggtggaggtccagaatcaacagttccagataaattccaatgatgggaagcctctgtttaccgtggacgaaaaggaagttgttgttggcactgataagttgagggtcactggacctgagggagccctgtttgaacattcggtcgagacacccctggtgcgtgccgaccctttccaggatctgagattggagtcccccaccagatctttatctatggacgctccacgcggcgtccacattcaggcacacgccggcaaaatcgaggcactgagtcagatggacattctctttcatagtagtgatgggatgctggtgcttgatgcggaaaccgtgtgtctgcctaagcttgttcaggggacatggggccccagcgggtctagtcaatcactctacgagatatgtgtatgccctgacgggaagctgtatttgtctgtcgcaggggtttcaacgacgtgtcaggagcataaccacatatgcctgtag

SEQ ID NO: 280225 - DNA, 876 bp, Artificial Sequence
  derived and/or modified sequence
atggttagggaacaatacacaacagcgactgaggggatttgcattgaaagacctgagaatcagtatgtctataagatcggtatttacggctggcgcaagcgctgtctttacctgtttgtgttgctcctcttgatcatcctggtcgtcaacctggctctaactatttggatcttaaaggtgatgtggttctcacctgctggtatggggcacctgtgtgtcaccaaggacggtttgcgattggagggcgaatcagagttcttgtttcccttatatgccaaggaaatccatagtcgggtcgatagctctttactgttgcaatctacccagaatgtcaccgtcaatgcacgaaacagtgaaggagaggttaccggccgcctcaaagtcggtccaaaaatggttgaggtgcaaaatcagcaattccagatcaactccaacgacggaaagcctctcttcacagttgacgagaaagaggtggtggtgggaactgacaaactacgggttacgggaccagagggagccctgtttgagcatagcgtggaaacccctctggttagagcagacccgttccaggatctgcgattggaaagcccaacaagatctctgagcatggatgcgcccagaggcgtccacatacaagcccacgcaggaaaaatcgaagcgttatcacaaatggacatcctgttccactcctcggatggcatgctggtgctggatgcagagactgtttgcctgccaaagctggttcaggggacatgggggccaagcggctcttctcagtctctgtatgaaatttgtgtgtgccccgacggtaaactgtacttgagcgtcgcaggggtgtcaaccacatgtcaagagcacaaccatatctgtctgtag

SEQ ID NO: 280226 - DNA, 876 bp, Artificial Sequence
  derived and/or modified sequence
atggtgcgggagcagtacaccaccgccaccgagggcatctgcatcgaaagacctgagaaccagtacgtttataagatcggaatttacggatggaggaagaggtgcctgtacctgttcgtgctgctgctcctgataatcctggtcgtaaatcttgcgttaactatatggatccttaaggtaatgtggtttagccccgccggcatggggcacctgtgcgtgacgaaagacgggcttagactggagggggaatcggagttcctcttccccttgtatgcaaaagaaatccatagtcgcgttgattcgtccctcctcctccagtctacacagaatgtaacagtgaacgcccggaactctgagggcgaagtcactgggcggctgaaggtcgggcccaaaatggttgaagtccagaatcagcagtttcagattaactccaacgatgggaaacctctgtttacagtggatgagaaagaagtggtagtgggcaccgataaactaagagtgacaggaccagagggggccctattcgagcatagtgtggagacacccttagtacgcgccgaccctttccaggaccttcggctggaatctcccactcggtcactcagcatggatgcaccgaggggagtgcatatccaggcccatgctggaaagatcgaagcactgtctcaaatggatattctatttcatagtagtgacgggatgctggttctagatgcagagaccgtgtgtctgcccaagctcgtgcaggggacctggggaccttcagggtcaagtcagtctctctacgagatctgcgtttgccccgatgggaaactgtacttatcagtggccggtgtctccactacctgccaggaacacaaccacatctgtctctag

SEQ ID NO: 280227 - DNA, 876 bp, Artificial Sequence
  derived and/or modified sequence
atggtgcgggagcagtacaccaccgccaccgagggcatctgcatcgagagaccagagaaccagtacgtttacaaaataggcatctacggatggcggaagcggtgcctatatctcttcgttttgttgctgcttattatcttggtagtaaatctggcactgaccatttggatcttaaaggtaatgtggttcagccccgctggcatggggcatctatgcgtcactaaagacggattgcgtttggagggcgagtccgagtttctgtttcccctatatgccaaggagatccatagtagggtggattcttcgctgctgctgcaatctactcagaacgttaccgtgaatgccaggaattctgaaggcgaagtgactggaagactgaaagtcgggcccaagatggtcgaagtgcaaaatcagcaattccagatcaacagcaacgatggcaaaccactcttcaccgtggacgaaaaggaagtagtcgtcggcacagataaattaagagtcaccgggccagagggggctctcttcgaacattctgtggaaacccccttagtgagggctgacccatttcaggaccttcgccttgagtcaccaactcgcagcctgagcatggatgcgccccgaggagtccacatccaggcacatgctggaaaaatagaggctcttagccagatggacattttgtttcactccagcgacgggatgctggtcctggacgcagaaacggtctgtctgcctaagctggtgcagggcacttggggcccttccggttccagtcaaagcctctacgagatctgcgtgtgtccagacggaaagttatacctctccgttgctggcgtatccaccacctgccaggaacataatcacatctgcttgtag

SEQ ID NO: 280228 - DNA, 876 bp, Artificial Sequence
  derived and/or modified sequence
atggttcgcgagcagtacactaccgccaccgaaggcatttgtattgagcggcctgagaaccagtacgtttataagatcgggatctacgggtggcggaagcgatgtctttacctttttgtccttttattacttatcattctggtcgtgaatcttgccttaacaatctggattttaaaagtcatgtggttttcacccgctggcatgggccatctatgcgtgacaaaggatggcttaaggctggaaggggagtccgagttcctgttccccctgtacgctaaagagatacactcaagggtagacagttccctgctcctccaatcaacccagaacgtgaccgttaacgccagaaactcggagggcgaggtgaccggacgactgaaggttgggccaaagatggtcgaggtgcaaaatcagcaattccagattaattcaaacgatggcaagcctttgtttacagtggacgagaaagaagttgtcgtaggaactgataagctccgcgtcacaggaccggagggcgcactctttgagcacagcgtggaaacaccgctggttcgagcagacccgtttcaggaccttcgactcgagtcccccacaaggtctctgagcatggacgccccacggggtgtgcatatccaagcacatgccggtaaaatcgaggccctctctcagatggacatcctcttccacagctccgacggcatgctagtgctggacgctgagaccgtctgcctgccaaaactggtgcagggcacgtggggtccctcagggtcctcccagagtctgtacgagatttgcgtttgcccggacggtaagttgtatctcagtgtggcgggagttagcacaacctgtcaggagcacaatcatatatgcctgtag

SEQ ID NO: 280229 - DNA, 876 bp, Artificial Sequence
  derived and/or modified sequence
atggtgcgggagcaatatactacggctactgagggtatttgcatagaacgccctgagaatcagtacgtttataagatcggtatctacgggtggcgcaaacgatgtctatatttattcgtgctgctcctcctaattatattggtggttaacctggctttgactatttggattctcaaggttatgtggttctcccctgccggaatgggccatctatgcgttacaaaagacggacttcgtctcgagggtgagtcagagttcctgttccccctgtacgccaaggaaatccatagcagggtggatagtagtctgctgctgcaatccacacagaacgtgacagttaacgctcgcaacagcgaaggtgaggtaacaggccgactcaaggtgggccctaagatggtggaagtccaaaatcagcaattccagattaattccaacgacgggaagcctttattcaccgtggatgaaaaagaagtcgtcgttggcaccgacaaactacgggtgaccgggcctgaaggcgcactgttcgagcatagcgtagagacccctcttgtcagggccgacccctttcaggacctcaggcttgaatctccgactaggagtctcagcatggacgctcctaggggagttcatatccaggcgcatgccggtaaaatcgaagcccttagccaaatggatattctgttccattcttcggatgggatgctggttctcgacgcggaaactgtgtgccttcctaagttggtgcaggggacctgggggcctagtggctcttctcaaagcctctacgaaatttgcgtgtgtccagacggcaagctttacttatccgtggccggtgtgtccacaacatgtcaagaacacaatcatatttgcctatag

SEQ ID NO: 280230 - DNA, 1415 bp, Artificial Sequence
  derived and/or modified sequence
atcctttgctctcattctgtaagtcatagaaaagtttgaaacattctgtctgtggtagagctcgggccagctgtagttcattcgccagtgtgcttttcttaatatctaagcacaaagctgtatcatcacaacctgtaggatggtgcgtgagcagtacactacagccacagaaggcatctgcatagagaggccagagaatcagtatgtctacaaaattggcatttatggctggagaaagcgctgtctctacttgtttgttcttcttttactcatcatcctcgttgtgaatttagctcttacaatttggattcttaaagtgatgtggttttctccagcaggaatgggccacttgtgtgtaacaaaagatggactgcgcttggaaggggaatcagaatttttattcccattgtatgccaaagaaatacactccagagtggactcatctctgcttctacaatcaacccagaatgtgactgtaaatgcgcgcaactcagaaggggaggtcacaggcaggttaaaagtcggtcccaaaatggtagaagtccagaatcaacagtttcagatcaactccaacgacggcaagccactatttactgtagatgagaaggaagttgtggttggtacagataaacttcgagtaactgggcctgaaggggctctttttgaacattcagtggagacaccccttgtcagagccgacccgtttcaagaccttagattagaatcccccactcggagtctaagcatggatgccccaaggggtgtgcatattcaagctcacgctgggaaaattgaggcgctttctcaaatggatattctttttcatagtagtgatggaatgcttgtgcttgatgctgaaactgtgtgcttacccaagctggtgcaggggacgtggggtccctctggcagctcacagagcctctacgaaatctgtgtgtgtccagatgggaagctgtacctgtctgtggccggtgtgagcaccacgtgccaggagcacaaccacatctgcctctgagctgcctgcgtcctctcggtgagctgtgcagtgccggccccagatcctcacacccagggagcagctgcacatcgtgaaagactgaggcagcgtggatgggaagtaaacgcttccagaggaactcagaaaaaattatgtgccagtgaaagtgtttggacaaaaactacatgatctcaaaatgcacgtggatgtgagacacaaaagttgacaaaatggaaaagcaatgtgtttttccactggattaattttcaccggaacaattgcgaattctctctgcctcgcctccccctatcttgtccgtgtgggcacacactgagtgttgagttgccgtgtggagttaatgtatgacgctccactgtggatatctaatgccctgttgagagtagccttgctcagtact

SEQ ID NO: 280231 - DNA, 873 bp, Artificial Sequence
  derived and/or modified sequence
atggtgcgcgagcagtacaccaccgccaccgagggcatctgcatcgagcgccccgagaaccagtacgtgtacaagatcggcatctacggctggcgcaagcgctgcctgtacctgttcgtgctgctgctgctgatcatcctggtggtgaacctggccctgaccatctggatcctgaaggtgatgtggttcagccccgccggcatgggccacctgtgcgtgaccaaggacggcctgcgcctggagggcgagagcgagttcctgttccccctgtacgccaaggagatccacagccgcgtggacagcagcctgctgctgcagagcacccagaacgtgaccgtgaacgcccgcaacagcgagggcgaggtgaccggccgcctgaaggtgggccccaagatggtggaggtgcagaaccagcagttccagatcaacagcaacgacggcaagcccctgttcaccgtggacgagaaggaggtggtggtgggcaccgacaagctgcgcgtgaccggccccgagggcgccctgttcgagcacagcgtggagacccccctggtgcgcgccgaccccttccaggacctgcgcctggagagccccacccgcagcctgagcatggacgccccccgcggcgtgcacatccaggcccacgccggcaagatcgaggccctgagccagatggacatcctgttccacagcagcgacggcatgctggtgctggacgccgagaccgtgtgcctgcccaagctggtgcagggcacctggggccccagcggcagcagccagagcctgtacgagatctgcgtgtgccccgacggcaagctgtacctgagcgtggccggcgtgagcaccacctgccaggagcacaaccacatctgcctg

SEQ ID NO: 280232 - protein, 629 aa, Artificial Sequence
  derived and/or modified sequence
MGCKVLLNIGQQMLRRKVVDCSREETRLSRCLNTFDLVALGVGSTLGAGVYVLAGAVARENAGPAIVISFLIAALASVLAGLCYGEFGARVPKTGSAYLYSYVTVGELWAFITGWNLILSYIIGTSSVARAWSATFDELIGRPIGEFSRTHMTLNAPGVLAENPDIFAVIIILILTGLLTLGVKESAMVNKIFTCINVLVLGFIMVSGFVKGSVKNWQLTEEDFGNTSGRLCLNNDTKEGKPGVGGFMPFGFSGVLSGAATCFYAFVGFDCIATTGEEVKNPQKAIPVGIVASLLICFIAYFGVSAALTLMMPYFCLDNNSPLPDAFKHVGWEGAKYAVAVGSLCALSASLLGSMFPMPRVIYAMAEDGLLFKFLANVNDRTKTPIIATLASGAVAAVMAFLFDLKDLVDLMSIGTLLAYSLVAACVLVLRYQPEQPNLVYQMASTSDELDPADQNELASTNDSQLGFLPEAEMFSLKTILSPKNMEPSKISGLIVNISTSLIAVLIITFCIVTVLGREALTKGALWAVFLLAGSALLCAVVTGVIWRQPESKTKLSFKVPFLPVLPILSIFVNVYLMMQLDQGTWVRFAVWMLIGFIIYFGYGLWHSEEASLDADQARTPDGNLDQCK

SEQ ID NO: 280233 - protein, 121 aa, Artificial Sequence
  derived and/or modified sequence
MGCKVLLNIGQQMLRRKVVDCSREETRLSRCLNTFDLVALGVGSTLGAGVYVLAGAVARENAGPAIVISFLIAALASVLAGLCYGEFGARVPKTGSAYLYSYVTVGELWAFITGWNLILSY

SEQ ID NO: 280234 - DNA, 1890 bp, Artificial Sequence
  derived and/or modified sequence
atgggctgcaaggtgctgctgaacatcggccagcagatgctgagaagaaaggtggtggactgcagcagagaggagaccagactgagcagatgcctgaacaccttcgacctggtggccctgggcgtgggcagcaccctgggcgccggcgtgtacgtgctggccggcgccgtggccagagagaacgccggccccgccatcgtgatcagcttcctgatcgccgccctggccagcgtgctggccggcctgtgctacggcgagttcggcgccagagtgcccaagaccggcagcgcctacctgtacagctacgtgaccgtgggcgagctgtgggccttcatcaccggctggaacctgatcctgagctacatcatcggcaccagcagcgtggccagagcctggagcgccaccttcgacgagctgatcggcagacccatcggcgagttcagcagaacccacatgaccctgaacgcccccggcgtgctggccgagaaccccgacatcttcgccgtgatcatcatcctgatcctgaccggcctgctgaccctgggcgtgaaggagagcgccatggtgaacaagatcttcacctgcatcaacgtgctggtgctgggcttcatcatggtgagcggcttcgtgaagggcagcgtgaagaactggcagctgaccgaggaggacttcggcaacaccagcggcagactgtgcctgaacaacgacaccaaggagggcaagcccggcgtgggcggcttcatgcccttcggcttcagcggcgtgctgagcggcgccgccacctgcttctacgccttcgtgggcttcgactgcatcgccaccaccggcgaggaggtgaagaacccccagaaggccatccccgtgggcatcgtggccagcctgctgatctgcttcatcgcctacttcggcgtgagcgccgccctgaccctgatgatgccctacttctgcctggacaacaacagccccctgcccgacgccttcaagcacgtgggctgggagggcgccaagtacgccgtggccgtgggcagcctgtgcgccctgagcgccagcctgctgggcagcatgttccccatgcccagagtgatctacgccatggccgaggacggcctgctgttcaagttcctggccaacgtgaacgacagaaccaagacccccatcatcgccaccctggccagcggcgccgtggccgccgtgatggccttcctgttcgacctgaaggacctggtggacctgatgagcatcggcaccctgctggcctacagcctggtggccgcctgcgtgctggtgctgagataccagcccgagcagcccaacctggtgtaccagatggccagcaccagcgacgagctggaccccgccgaccagaacgagctggccagcaccaacgacagccagctgggcttcctgcccgaggccgagatgttcagcctgaagaccatcctgagccccaagaacatggagcccagcaagatcagcggcctgatcgtgaacatcagcaccagcctgatcgccgtgctgatcatcaccttctgcatcgtgaccgtgctgggcagagaggccctgaccaagggcgccctgtgggccgtgttcctgctggccggcagcgccctgctgtgcgccgtggtgaccggcgtgatctggagacagcccgagagcaagaccaagctgagcttcaaggtgcccttcctgcccgtgctgcccatcctgagcatcttcgtgaacgtgtacctgatgatgcagctggaccagggcacctgggtgagattcgccgtgtggatgctgatcggcttcatcatctacttcggctacggcctgtggcacagcgaggaggccagcctggacgccgaccaggccagaacccccgacggcaacctggaccagtgcaagtag

SEQ ID NO: 280235 - DNA, 366 bp, Artificial Sequence
  derived and/or modified sequence
atgggctgcaaggtgctgctgaacatcggccagcagatgctgagaagaaaggtggtggactgcagcagagaggagaccagactgagcagatgcctgaacaccttcgacctggtggccctgggcgtgggcagcaccctgggcgccggcgtgtacgtgctggccggcgccgtggccagagagaacgccggccccgccatcgtgatcagcttcctgatcgccgccctggccagcgtgctggccggcctgtgctacggcgagttcggcgccagagtgcccaagaccggcagcgcctacctgtacagctacgtgaccgtgggcgagctgtgggccttcatcaccggctggaacctgatcctgagctactag

SEQ ID NO: 280236 - DNA, 1890 bp, Artificial Sequence
  derived and/or modified sequence
atggggtgtaaggtcctgctcaatattggccaacagatgcttaggcgcaaggtggttgattgttctcgggaggagactcggctttctcggtgtctaaacacttttgatctcgtggccctcggggtcggatcgacgctgggagctggagtgtacgtattggccggggccgtcgcccgcgaaaacgccggtcccgctatcgtgatctcttttctgatcgctgcacttgcctccgtgctggccggactctgttatggcgaatttggggcccgagtgcccaagacagggtcagcatacctgtactcttacgtgaccgtgggagagctgtgggcattcattaccggttggaatctcatcctctcttatataatcgggacgtcatccgtggcgagagcctggtcagccaccttcgacgaactgatcggccgtcccatcggagagttcagccggacacacatgactctgaatgctcctggcgtgctggccgagaacccggacatttttgctgttatcataattctaattctcacgggcctactgacactcggcgtgaaggagagcgccatggtgaacaaaatctttacctgtataaatgtgctcgtactgggtttcatcatggttagcggcttcgttaagggcagtgtgaagaattggcagctgactgaggaggactttgggaacacatcaggccgcttgtgcctcaacaacgacacgaaggagggaaagccgggcgtaggcggcttcatgccattcggcttctccggcgttctgtcaggcgccgccacgtgcttctacgccttcgtgggctttgattgcatcgcgacaactggggaggaagtgaaaaacccccagaaagccattccagtcggtattgtggcctcactgttaatctgctttattgcttatttcggcgtgagcgccgcacttactcttatgatgccatacttttgccttgataacaactcgcccctacccgacgccttcaaacacgtagggtgggagggcgccaaatacgcagtcgcagttggatccctgtgtgcgctctctgcttccctgctgggctctatgtttcccatgcctagagttatttacgccatggccgaagatggactgctatttaaatttttggcgaatgtaaacgatcgaaccaagacaccaatcatagcgaccctggctagcggcgccgttgcagctgtaatggcatttctctttgatctcaaagacttggtggacctgatgagtatagggaccctgctggcttacagcttagtggctgcctgcgttctcgtgctgcgatatcagcctgaacaacctaacttagtctaccagatggcttcaacctccgacgagctcgaccccgcggatcagaatgaactggctagcactaatgatagccagctggggtttctgcctgaagctgaaatgttcagcctcaagaccatcttatcgcctaagaacatggagcctagcaagatttccgggctgattgtgaacattagtaccagcctgattgcagtgttgatcatcactttttgtatcgtgaccgtccttggacgggaagccttgacaaaaggcgccctgtgggctgtgtttctgctggccggcagtgccctgctctgtgctgtggtgacgggagtcatatggcgacagcctgagagcaagactaagctctcattcaaggtaccctttctgccagtgctgcctatcctcagcatctttgttaacgtgtatcttatgatgcaacttgaccaaggaacttgggtccgcttcgcagtttggatgttaattggattcatcatctacttcgggtatgggctatggcacagcgaggaggccagcctggacgctgaccaagctagaaccccagatgggaatctggaccagtgtaagtag

SEQ ID NO: 280237 - DNA, 366 bp, Artificial Sequence
  derived and/or modified sequence
atgggctgcaaggtattactcaatatcggtcagcaaatgttgcggagaaaagtggtggattgcagcagggaagagacccgattatctaggtgtctgaatactttcgatctcgtggccctgggcgtggggagcactctgggcgccggtgtttacgtgctcgccggcgccgtggcaagagaaaatgctggaccagcaatcgtgatcagctttctgatcgctgctctggcttctgtgctggccggactttgttacggggaatttggtgcgagggtgccaaagaccgggagtgcctacttgtatagttacgtgacagtcggagagctatgggctttcattaccggttggaacctgatactctcctactag

SEQ ID NO: 280238 - DNA, 1890 bp, Artificial Sequence
  derived and/or modified sequence
atgggctgcaaggtgctgctgaacatcggccagcagatgctgcggaggaaggtggtggactgcagccgggaggagacccggctgagccgctgcctgaacacctttgacctggtggccctgggcgtgggcagcaccctgggcgctggggtgtatgtgctggccggggctgtggcccgggagaatgccggccctgccatcgtcatctccttcctgattgctgccctggcctctgtgctggccggcctgtgctacggggagtttggagcccgggtgcccaagacaggcagcgcctacctgtacagctatgtgacagtgggggagctgtgggccttcatcaccggctggaacctgatcctgagctacatcatcggcaccagctctgtggcccgggcctggagcgccacctttgatgagctgattggccggcccatcggggagttcagcaggacccacatgaccctgaatgcccctggggtgctggccgagaacccagacatctttgctgtgatcatcatcctgatcctgaccggcctgctgaccctgggcgtgaaggagagcgccatggtgaacaagatcttcacctgcatcaacgtgctggtgctgggcttcatcatggtgtctggctttgtgaagggctctgtgaagaactggcagctgacagaggaggactttggaaacaccagcggccgcctgtgcctgaacaatgacaccaaggagggcaagccaggagtgggcggcttcatgcccttcggcttctctggagtgctgtctggagctgccacctgcttctacgcctttgtgggctttgactgcatcgccaccactggagaggaggtgaagaacccccagaaggccatccctgtgggcatcgtggccagcctgctgatctgcttcatcgcctactttggagtgtctgctgccctgaccctgatgatgccctacttctgcctggacaacaacagccccctgcctgatgccttcaagcacgtgggctgggagggcgccaagtatgctgtggccgtgggcagcctgtgtgccctgagcgccagcctgctgggctccatgttccccatgcccagggtcatctatgccatggctgaagatggcctgctcttcaagttcctggccaacgtgaatgacaggaccaagacccccatcatcgccaccctggccagcggggctgtggccgctgtgatggccttcctgtttgacctgaaggacctggtggacctgatgagcatcggcaccctgctggcctacagcctggtggccgcctgtgtgctggtgctgcgctaccagcctgagcagcccaacctggtgtaccagatggccagcaccagtgatgagctggaccctgctgaccagaatgagctggccagcaccaatgacagccagctgggcttcctgcctgaggccgagatgttcagcctgaagaccatcctgagccccaagaacatggagcccagcaagatcagcggcctgattgtgaacatcagcaccagcctgattgctgtgctgatcatcaccttctgcatcgtgacagtgctgggccgggaggccctgaccaagggggccctgtgggccgtgttcctgctggccggcagcgccctgctgtgtgctgtggtgactggagtcatctggaggcagcctgagagcaagaccaagctgtccttcaaggtgcccttcctgcctgtgctgcccatcctgagcatctttgtgaatgtgtacctgatgatgcagctggaccagggcacctgggtgcgctttgctgtgtggatgctgattggcttcatcatctacttcggctacggcctgtggcacagcgaggaggccagcctggatgctgaccaggcccggaccccagatggcaacctggaccagtgcaagtag

SEQ ID NO: 280239 - DNA, 366 bp, Artificial Sequence
  derived and/or modified sequence
atgggctgcaaggtgctgctgaacatcggccagcagatgctgcggaggaaggtggtggactgcagccgggaggagacccggctgagccgctgcctgaacacctttgacctggtggccctgggcgtgggcagcaccctgggcgctggggtgtatgtgctggccggggctgtggcccgggagaatgccggccctgccatcgtcatctccttcctgattgctgccctggcctctgtgctggccggcctgtgctacggggagtttggagcccgggtgcccaagacaggcagcgcctacctgtacagctatgtgacagtgggggagctgtgggccttcatcaccggctggaacctgatcctgagctactag

SEQ ID NO: 280240 - DNA, 1890 bp, Artificial Sequence
  derived and/or modified sequence
atgggctgcaaggtgctgctgaacatcggccagcagatgctgcggagaaaggtagtcgactgcagccgcgaagagacgagactttcacggtgcctaaatacattcgacctggtcgctcttggggtgggtagtacccttggcgccggcgtctatgtgttggccggcgcagtggctagagagaatgccggtccagcgatcgtaatttcattcctcatcgctgccctggctagtgtgcttgcagggctctgttacggggagttcggggcccgggttccaaagacaggctcagcttacctatatagctacgtgactgtaggtgagttgtgggctttcatcaccggatggaacctcatcctttcttacattattggaacgtcatctgtggcaagagcttggtccgcaacttttgatgagttaattggtaggcctatcggggagttcagccgaacacacatgaccttgaacgcccccggagttctggctgagaaccctgatatcttcgcagtaatcattatcctaatactgaccggcctcttgacactcggagtgaaggagagtgcaatggtcaacaagatattcacatgtatcaacgtactcgtacttggctttataatggtgagcgggttcgtaaaagggtccgtcaaaaactggcagctgaccgaggaggattttgggaatacctcagggaggttatgtttaaataacgacacaaaagagggcaagcctggggtggggggcttcatgccctttggattttcaggcgtactgtcgggtgcagcaacttgcttttacgcattcgtcggtttcgattgtattgctacaacgggagaggaagtaaagaatccccagaaggcgatccccgtgggcattgtggccagcctgctgatctgttttattgcgtacttcggggttagtgcagcccttactctaatgatgccatacttttgccttgacaacaacagcccattacctgacgccttcaaacatgtcggatgggaaggcgctaaatatgctgtggcagttggaagcctgtgtgctctgagcgctagtctcttaggttctatgttccctatgcctagggttatatatgctatggctgaggacgggcttctgttcaaattcctggccaatgtcaacgacagaactaaaacgccaattatcgctacattggcaagtggggctgtggctgccgtgatggcctttctttttgatctgaaggacctagtggacctcatgtccattgggacccttttggcttactcactcgttgcagcatgtgtgctcgtactcagataccagcccgaacagcccaacctggtgtaccagatggcttccacttccgacgaacttgatcctgctgatcaaaacgagctggcctctacaaatgattcccagctaggcttcctgcccgaagccgagatgttctctcttaaaaccatcctcagccccaaaaatatggagccttctaagatatctggcttgatcgtgaatatttctacttcccttatcgctgtgctgataattacattttgcatcgtgacagtgctgggtagggaagccctaactaaaggcgctttatgggctgtgttcctcctggctggatcagctctgctgtgtgcagtggtcaccggtgtgatttggagacaaccagaatccaaaactaagctcagctttaaggtcccttttctccctgtccttccaattctcagcatattcgttaacgtttacctgatgatgcagctggatcagggaacttgggttcgattcgctgtgtggatgttgattggatttatcatctacttcggatatggtctgtggcactctgaggaggcttccctcgatgcagatcaggccagaacccctgacggcaatctggatcagtgtaagtag

SEQ ID NO: 280241 - DNA, 366 bp, Artificial Sequence
  derived and/or modified sequence
atgggctgcaaggtgctgctgaacatcggccagcagatgctgcggcggaaagtcgtcgattgtagcagagaagagacaaggctgtccaggtgcctgaacaccttcgatctggttgctttaggagtgggatctacactgggtgctggagtttacgtgcttgccggcgccgtggctcgagaaaacgctggccctgccatcgtgatttctttcctcatcgcagcgttggcatcagtactggccggcctgtgctatggagagtttggcgctcgtgtcccgaagacaggaagcgcatatctctatagctacgtgaccgtcggcgaactatgggcctttatcaccggttggaacctcattctatcctactag

SEQ ID NO: 280242 - DNA, 1890 bp, Artificial Sequence
  derived and/or modified sequence
atggggtgcaaagtgctgctaaacattggacagcaaatgctccgccgaaaagtagtggattgcagccgtgaggaaacccgcttgagccggtgcctgaatactttcgacttggtcgcattgggtgtgggtagcaccttgggggcaggagtgtatgtgcttgcaggcgctgttgcacgtgaaaatgccggtcccgctatagtcatctctttcctgattgctgcgctcgccagcgtcctagcaggcctttgttatggagagttcggtgccagggtcccaaagaccggctctgcgtacctgtacagctatgtaacagtaggggaactctgggctttcatcaccgggtggaacctgatcttatcatatattattggcaccagcagcgtggctcgcgcttggtccgccacttttgacgagctgattggtaggcccatcggagagttctccaggactcacatgactctgaatgctcccggtgtgttagctgagaatcccgatatcttcgccgtgattattatcctcattttgacgggtcttttgactctaggggtgaaagaatctgctatggttaacaagatttttacttgcataaatgtgctcgttcttggctttatcatggtgtccggtttcgtcaaaggttccgtgaagaattggcaactgaccgaggaagattttggaaacacctccgggcgactgtgcctgaataatgatactaaagagggcaaacctggcgtcggcggatttatgcctttcggatttagtggagtgttatctggagccgcaacctgcttttatgcctttgtgggctttgattgtatcgccaccaccggggaagaggtcaaaaacccccagaaagctattcccgtgggcatagttgcaagtctgttgatttgcttcatcgcgtatttcggagtctcagcagctctgacccttatgatgccttacttctgccttgacaataattcacccctcccagatgcattcaaacatgtgggatgggagggcgcaaagtatgctgtagcagtgggttcattgtgtgccctgtctgcgtctttgttggggtccatgttccctatgcccagagttatctatgccatggccgaagacgggttgctttttaaattcctggcaaatgtgaatgataggacgaaaactcctattattgccacccttgcaagtggagcagtggcggctgttatggctttcctgtttgacctaaaagacctggtggatttaatgtctatcggaaccttgctggcctactctctggtggccgcttgcgtccttgtgctgcgttatcagccagaacagccaaatctggtataccagatggcctcaacctctgacgagctagaccctgccgatcagaatgagctagcatcgacgaatgattctcagctcggtttcctccctgaagctgagatgttctctctgaaaaccattctcagccctaagaatatggaaccctccaagatctccgggttgattgtcaacattagcacatctctgattgctgtgttgatcatcacattctgtatcgtcacagttttaggtagagaggcactgacgaaaggggcactctgggcggtgttcttactggcagggagcgcacttctatgcgctgttgtgactggtgtcatttggagacagcccgaaagcaagaccaagctctcttttaaggtgccattcctccctgttttgccgatcctgtccatcttcgtaaacgtttatctcatgatgcagttagaccagggcacgtgggtgcgctttgctgtatggatgcttattgggttcatcatttactttgggtacggactgtggcactcagaggaagcttctctggatgctgatcaggcgagaactcccgacggcaatctggatcagtgcaagtag

SEQ ID NO: 280243 - DNA, 366 bp, Artificial Sequence
  derived and/or modified sequence
atgggatgcaaggtgctgctcaatattggccagcagatgctgcgccgaaaagtggtcgactgctcacgagaggaaaccaggctgtcccgctgtctgaatacattcgacctcgtcgcactgggggttggatcgactctgggagcaggggtgtacgttctggccggtgcggtggcacgcgagaatgcagggcctgccatcgtgatttccttcctgatcgccgcattggctagtgtgctcgctggtctttgctacggagaatttggcgctcgggtgcctaaaactggttctgcatacctctactcttatgtgacagttggggagctctgggctttcataacaggttggaatctcatcctgagctactag

SEQ ID NO: 280244 - DNA, 7243 bp, Artificial Sequence
  derived and/or modified sequence
gcggccgcgggctcccgctaaccgcagcctccactcctctccccgcgcgccgcgcccccgccccgccccgccccgcccggtctcgccggccgagcgtccgttggtccttgagcgcgtccgacagtctgtctgttcgcgatcctgccggagccccgccgccgccggcttggattctgaaaccttccttgtatccctcctgagacatctttgctgcaagatcgaggctgtcctctggtgagaaggtggtgaggcttcccgtcatattccagctctgaacagcaacatggggtgcaaagtcctgctcaacattgggcagcagatgctgcggcggaaggtggtggactgtagccgggaggagacgcggctgtctcgctgcctgaacacttttgatctggtggccctcggggtgggcagcacactgggtgctggtgtctacgtcctggctggagctgtggcccgtgagaatgcaggccctgccattgtcatctccttcctgatcgctgcgctggcctcagtgctggctggcctgtgctatggcgagtttggtgctcgggtccccaagacgggctcagcttacctctacagctatgtcaccgttggagagctctgggccttcatcaccggctggaacttaatcctctcctacatcatcggtacttcaagcgtagcgagggcctggagcgccaccttcgacgagctgataggcagacccatcggggagttctcacggacacacatgactctgaacgcccccggcgtgctggctgaaaaccccgacatattcgcagtgatcataattctcatcttgacaggacttttaactcttggtgtgaaagagtcggccatggtcaacaaaatattcacttgtattaacgtcctggtcctgggcttcataatggtgtcaggatttgtgaaaggatcggttaaaaactggcagctcacggaggaggattttgggaacacatcaggccgtctctgtttgaacaatgacacaaaagaagggaagcccggtgttggtggattcatgcccttcgggttctctggtgtcctgtcgggggcagcgacttgcttctatgccttcgtgggctttgactgcatcgccaccacaggtgaagaggtgaagaacccacagaaggccatccccgtggggatcgtggcgtccctcttgatctgcttcatcgcctactttggggtgtcggctgccctcacgctcatgatgccctacttctgcctggacaataacagccccctgcccgacgcctttaagcacgtgggctgggaaggtgccaagtacgcagtggccgtgggctccctctgcgctctttccgccagtcttctaggttccatgtttcccatgcctcgggttatctatgccatggctgaggatggactgctatttaaattcttagccaacgtcaatgataggaccaaaacaccaataatcgccacattagcctcgggtgccgttgctgctgtgatggccttcctctttgacctgaaggacttggtggacctcatgtccattggcactctcctggcttactcgttggtggctgcctgtgtgttggtcttacggtaccagccagagcagcctaacctggtataccagatggccagtacttccgacgagttagatccagcagaccaaaatgaattggcaagcaccaatgattcccagctgggctttttaccagaggcagagatgttctctttgaaaaccatactctcacccaaaaacatggagccttccaaaatctctgggctaattgtgaacatttcaaccagcctcatagctgttctcatcatcaccttctgcattgtgaccgtgcttggaagggaggctctcaccaaaggggcgctgtgggcagtctttctgctcgcagggtctgccctcctctgtgccgtggtcacgggcgtcatctggaggcagcccgagagcaagaccaagctctcatttaaggttcccttcctgccagtgctccccatcctgagcatcttcgtgaacgtctatctcatgatgcagctggaccagggcacctgggtccggtttgctgtgtggatgctgataggcttcatcatctactttggctatggcctgtggcacagcgaggaggcgtccctggatgccgaccaagcaaggactcctgacggcaacttggaccagtgcaagtgacgcacagccccgccccccggaggtggcagcagccccgagggacgcccccagaggaccgggaggcaccccaccctccccaccagtgcaacagaaaccacctgcgtccacaccctcactgcagccaaaggtgcaattacttgacctgcagccccagcccaccctcggctctgcagccggttctccgggccctggtcacctccagacagctgcctggccggggccactaggctgcggctggccactgtgtctcctcacttctctgaacaaagcagttcctcccctaccagctcagccccgagctgccgcagcctcaggcagaacggaggtcaccttctctccttatcttgggaaccaggccttcctcccggggactgttctgggattgaaattgtgcatactccaaactttcgcagccatcttcccgctcagccccagacacccagcaatcaagccagatgagtaccacaaaacagtgtgtccccagcagctccccaccccagagccaaatgacagtagtgcacttaaaaaggaaaatcaggcctgttgtccttctccggttgcattcagatgggtcattagggccggaccctgcctgccccttggcttctcagggctttgctctgacaccatgacagctgcccggggctgagggcagctggctccactcaaatgaggaagaagggatcactcccattagggcctgctttgcttatgcatgtgtgtgcacatgcatgtaaaccagggaccttcagctcacggcctccaggcctgggccagttcttgctgctcctgccgtctcccccgactggctgtgtcctgagtaactggaacatgagacagtatctgcaggactggccccatggtggccgagtcagaagtctgtttcctgtgagtcgccaccgttcactcagtcttgccctcccatgctttggagccagtctggtggctcctgtaaggttctcaaggctggtggcagctcagtctggggtcaggacatgtcggggtcatgcgtttctggccctgacataagctgtctggcctctctgtgacatgatgaaattgaaatcaatccacagtccatgaaattgtgacactccaccagattaagttagggcataacattaacttggaaatggccatgtcatcacccctgcggctgtcctatagctgagatgcgtgggtcgcaggggaggtgatttctaggcatattgctgtcccttttgtgtatctgtcatccggatgcttcggaccccacgcctctgcaagtgggagagacccgagcatcctccccacccccatagctccagtgcacgccacccccgtcttgcctgggtcggggcctgcggccagcaccatttcacacacactccttgtagatgggagccagaggaaacctgaacgtgggtggagcgttccactgagtctacttcaggagacagaaggcccatgctgatgggggaggaggagggatgtgggcattttggacaccaggggaaatggaaatgctgctttcaaaacttagtttcctttccatttcttcctagtctggcctttgacacaaatctggtagaaagaagcctgataaattgagggcacttgtaccctccctgtgcccccagaaggttcttggagagaagtgcaagaatttgtgaacacggcggtggagggcgggtggatggccatgggctgagcctccgtatcaggcctgctcaccttgctgggagctttattctgatctcattttgaatgttccagagggagcatcataagagcccagagctccgatttccaaagagtgatattgacatttatggagattggtgttgtaacatattttgataaatactaacttattttgttggggttttggttgtctcttgtcttaggacctggtagttatttgcttgatttttttttccgttattttctacataggcaaagagaattcgagggatagacagtctccaagaaaagtgaagtggtgggagagaattgcttttttcttttttttcttttctctagtttttctttctggctgagatttccgtgcaagacagcacccaatagactatttagagttgacatttgacattttaatgggcgccatggctcattttgtagattgagaaggtgcgtctcccctgctccaagtctcatcatgacagcgtgctgacagctgggagtctgtggccttcctcacgcagaggccttaaagctggacacagaagcacgcctaggctgggcagggatgggacccatgccccctccttagaggacgggcttcctggttaggaaaggacacgtgggggtgccttgcataatagttcactggtcaccgtgcttttatgagtagtgtttttgtgcacttgccaggggttttctctctgtgtgagaggggagtgatttaagcaatggtgtctggagtaagccttacaattttaatagactttttcttatcatatccctcatttctttccctgaaataaaaatacacacaagcaaaaaaaaaatgatagtttcacatctcttagttcccttgcccaaacaagaatattcttagttccactggccaggattttcctacatagtcagaacttacacattactagaggcacacccaccaaggagtattgtgtctacttttatctgtgcaccagccacaaatacccacattggaaagacccatttgtgatgggtaaacatcccttcctgtctcccacaacccctgtgactgccctgcatgtgttcatgacctccgaaggcccaaattcatgaagcagcaaacccagcagatctccacccccctgcctcaggacctctgctgaagagggggatgaagtgggtctccagggaggcagtgggggccttgttggcagctggctcgggagccggcttacaggagggcagctctgcagttgggaggggcaccgtccggaggagaccaggcctctacacaccccccactctacttatcatccctgctcacacacccttgtccaaggctttatgcatcggatttatttttccaaatcaagaggacagtgatagatgcattttccccaggctgtctcagaaaggtcgctaaatgtatactgttgtcagaattgctgagatctccccccacttttggtttttgcagcagtaaaaactctttccactgtgacttattttctctctcaggcagccagccacctggtcccttgtgctgactctagcacagtggccaggatccaatacgagtccaggggtgaccgcaggatggtgggggcagcgggcttctccacctaccccagccaccaaggccctgacgcactgcctcctgcaccttcagcacatccctgtgcacagctggaagggtgcatggcccgctcacctttgttcagatgggtggaaacgctgatgataccagctcctccctgccgtgcccctgccacggagcaggcattgtgaactggctggtgtttgcagtcccacgtggcatggcctccagcccaacccacagtggagactggagacagggcaatgagtctggtggggggcacgtggacatgccccataggggccccacccagacttaacaggcaaggtcctgggcattgcgcgacgcaggactcaatgctaaagcaagcctgcctggctctgtgccagggcccctcttctgattcacacatcccatttttacacagacccttccttcttaataaaggctgacagttctgttggcagccaagaacccacaccatgaagacagggagtgaggggcctttgtgcccaactccagcacagctgcgttctggggtgtgtgagaggcatgttcgtgtctgtgcgctggtggtctcgtgagacagttccgaggacggggaaattgcagggtggtgggggcgtgaggcttatatgtggaactgatgcagagttcgcctgcagacggatctggatatacactatgtataattgttacgtgtaatttaaaatatatctgtttgccatcgtcatgagaagattatatgtaaggctctgaagggagagggagatgtacattctgccaggctcctggggaccttatccgagtcatgaaattgattactgttgatccagtggtgcaagaagctacactccatgtgtcatcacgcttatgactcctaatgtatttttaaggcaaaaaatgtcagccgactccatcttcacccctcgattcctcgagtccagcctttctgtgccagtgcttcactgagccacaacgctctcgccatcgggacccggctgggcctggagtctcggggcacagttgccatggagccctcctgggtcattctacaaatgtgctgagtgccagctgaaaaccccacaggagatggagtaccttggccaagcttaaagagaagattttctcagggtatttattagtgtgtccagcagggtcaggaagcaggatggaaagatgcactcagactgttaatttattaacaaggcaaatgattttgtgtttcttgatgacagactattaagtttgggacttattttcccatttgagaagttataatatatatttaagatgataagtttcctgcttaagttgtgcctttcagcttcaatgagtttaaggagcactaagggtaatgataccaatgagggttggtttattatcaaacctgaatagctgtggtttctccagtaaatattttcttctactgaacatggagccattattaagagttgtgtgttttttattatgtacatttgtatatttttttgcttgtttgatgttctatttttctaatagttttcttttagtttcttaaagttgtgatactagatttagattctgatgctaactgcaaatcaggttggtctctgctgggtctctcctgcttttattttactttaaggacaagtgtagttgtcgtccaccacctttcaaaaaatgtgaaactgccctgcctcccctttttgctgacaacactgtgtacattgaccacttcctaccatactttatgttgtaaaatcaaactcttttgtggtacattatctcatgcttctgcaaattcgaataaattctatggcttccatgtg

SEQ ID NO: 280245 - DNA, 547 bp, Artificial Sequence
  derived and/or modified sequence
gatgtggccagtggtgtggatgtgaatattcatccctgtggaggaaaatagtggggtctctgagatttgattctgaaaccttccttgtatccctcctgagacatctttgctgcaagatcgaggctgtcctctggtgagaaggtggtgaggcttcccgtcatattccagctctgaacagcaacatggggtgcaaagtcctgctcaacattgggcagcagatgctgcggcggaaggtggtggactgtagccgggaggagacgcggctgtctcgctgcctgaacacttttgatctggtggccctcggggtgggcagcacactgggtgctggtgtctacgtcctggctggagctgtggcccgtgagaatgcaggccctgccattgtcatctccttcctgatcgctgcgctggcctcagtgctggctggcctgtgctatggcgagtttggtgctcgggtccccaagacgggctcagcttacctctacagctatgtcaccgttggagagctctgggccttcatcaccggctggaacttaatcctctcctacat

SEQ ID NO: 280246 - protein, 922 aa, Artificial Sequence
  derived and/or modified sequence
MDKKSFEMVLDEIRKVVDLLRYFSWAEPQLKAMKALQHKMVAVQPTEVVNILNCFTFSKDKLVALELLASNIIDAQNSRPIEDLFRVNMSEKKRCKRILEQAFKGGCKAPHAMISSCGTIPGNPYPKGRPSRINGIFPGTPLKKDGEECTNEGKGIAARILGPSKPPPSTYNPHKPVPYPIPPCRPHATIAPSAYNNAGLVPLANVIAPPPPPYTPNPVGTENEDLSNPSKPIQNQTFSTPASQLFSPHGSNPSTPAATPVPTASPVKAINHPSASAAATVSGMNLLNTVLPVFPGQVSSAVHTPQPSIPNPTVIRTPSLPTAPVTSIHSTTTTPVPSIFSGLVSLPGPSATPTAATPTPGPTPRSTLGSSEAFASTSAPFTSLPFSTSSSAASTSNPNSASLSSVFAGLPLPLPPTSQGLSNPTPVIAGGSTPSVAGPLGVNSPLLSALKGFLTSNDTNLINSSALSSAVTSGLASLSSLTLQNSDSSASAPNKCYAPSAIPTPQRTSTPGLALFPGLPSPVANSTSTPLTLPVQSPLATAASASTSVPVSCGSSASLLRGPHPGTSDLHISSTPAATTLPVMIKTEPTSPTPSAFKGPSHSGNPSHGTLGLSGTLGRAYTSTSVPISLSACLNPALSGLSSLSTPLNGSNPLSSISLPPHGSSTPIAPVFTALPSFTSLTNNFPLTGNPSLNPSVSLPGSLIATSSTAATSTSLPHPSSTAAVLSGLSASAPVSAAPFPLNLSTAVPSLFSVTQGPLSSSNPSYPGFSVSNTPSVTPALPSFPGLQAPSTVAAVTPLPVAATAPSPAPVLPGFASAFSSNFNSALVAQAGLSSGLQAAGSSVFPGLLSLPGIPGFPQNPSQSSLQELQHNAAAQSALLQQVHSASALESYPAQPDGFPSYPSAPGTPFSLQPSLSQSGWQ

SEQ ID NO: 280247 - DNA, 2769 bp, Artificial Sequence
  derived and/or modified sequence
atggacaagaagagcttcgagatggtgctggacgagatcagaaaggtggtggacctgctgagatacttcagctgggccgagccccagctgaaggccatgaaggccctgcagcacaagatggtggccgtgcagcccaccgaggtggtgaacatcctgaactgcttcaccttcagcaaggacaagctggtggccctggagctgctggccagcaacatcatcgacgcccagaacagcagacccatcgaggacctgttcagagtgaacatgagcgagaagaagagatgcaagagaatcctggagcaggccttcaagggcggctgcaaggccccccacgccatgatcagcagctgcggcaccatccccggcaacccctaccccaagggcagacccagcagaatcaacggcatcttccccggcacccccctgaagaaggacggcgaggagtgcaccaacgagggcaagggcatcgccgccagaatcctgggccccagcaagcccccccccagcacctacaacccccacaagcccgtgccctaccccatccccccctgcagaccccacgccaccatcgcccccagcgcctacaacaacgccggcctggtgcccctggccaacgtgatcgccccccccccccccccctacacccccaaccccgtgggcaccgagaacgaggacctgagcaaccccagcaagcccatccagaaccagaccttcagcacccccgccagccagctgttcagcccccacggcagcaaccccagcacccccgccgccacccccgtgcccaccgccagccccgtgaaggccatcaaccaccccagcgccagcgccgccgccaccgtgagcggcatgaacctgctgaacaccgtgctgcccgtgttccccggccaggtgagcagcgccgtgcacaccccccagcccagcatccccaaccccaccgtgatcagaacccccagcctgcccaccgcccccgtgaccagcatccacagcaccaccaccacccccgtgcccagcatcttcagcggcctggtgagcctgcccggccccagcgccacccccaccgccgccacccccacccccggccccacccccagaagcaccctgggcagcagcgaggccttcgccagcaccagcgcccccttcaccagcctgcccttcagcaccagcagcagcgccgccagcaccagcaaccccaacagcgccagcctgagcagcgtgttcgccggcctgcccctgcccctgccccccaccagccagggcctgagcaaccccacccccgtgatcgccggcggcagcacccccagcgtggccggccccctgggcgtgaacagccccctgctgagcgccctgaagggcttcctgaccagcaacgacaccaacctgatcaacagcagcgccctgagcagcgccgtgaccagcggcctggccagcctgagcagcctgaccctgcagaacagcgacagcagcgccagcgcccccaacaagtgctacgcccccagcgccatccccaccccccagagaaccagcacccccggcctggccctgttccccggcctgcccagccccgtggccaacagcaccagcacccccctgaccctgcccgtgcagagccccctggccaccgccgccagcgccagcaccagcgtgcccgtgagctgcggcagcagcgccagcctgctgagaggcccccaccccggcaccagcgacctgcacatcagcagcacccccgccgccaccaccctgcccgtgatgatcaagaccgagcccaccagccccacccccagcgccttcaagggccccagccacagcggcaaccccagccacggcaccctgggcctgagcggcaccctgggcagagcctacaccagcaccagcgtgcccatcagcctgagcgcctgcctgaaccccgccctgagcggcctgagcagcctgagcacccccctgaacggcagcaaccccctgagcagcatcagcctgcccccccacggcagcagcacccccatcgcccccgtgttcaccgccctgcccagcttcaccagcctgaccaacaacttccccctgaccggcaaccccagcctgaaccccagcgtgagcctgcccggcagcctgatcgccaccagcagcaccgccgccaccagcaccagcctgccccaccccagcagcaccgccgccgtgctgagcggcctgagcgccagcgcccccgtgagcgccgcccccttccccctgaacctgagcaccgccgtgcccagcctgttcagcgtgacccagggccccctgagcagcagcaaccccagctaccccggcttcagcgtgagcaacacccccagcgtgacccccgccctgcccagcttccccggcctgcaggcccccagcaccgtggccgccgtgacccccctgcccgtggccgccaccgcccccagccccgcccccgtgctgcccggcttcgccagcgccttcagcagcaacttcaacagcgccctggtggcccaggccggcctgagcagcggcctgcaggccgccggcagcagcgtgttccccggcctgctgagcctgcccggcatccccggcttcccccagaaccccagccagagcagcctgcaggagctgcagcacaacgccgccgcccagagcgccctgctgcagcaggtgcacagcgccagcgccctggagagctaccccgcccagcccgacggcttccccagctaccccagcgcccccggcacccccttcagcctgcagcccagcctgagccagagcggctggcagtag

SEQ ID NO: 280248 - DNA, 2769 bp, Artificial Sequence
  derived and/or modified sequence
atggataagaaaagtttcgagatggtgctcgacgagatcagaaaggttgtagatctcctccgctattttagctgggccgaaccacaactgaaggcaatgaaggcactgcagcacaaaatggtcgcagttcagccgactgaggtggtcaacattttgaactgcttcaccttctctaaggataagctggtagcactagaactgctggcatcgaatatcattgacgcacagaattcccggcccattgaggatttatttcgggttaatatgagcgaaaagaagagatgtaagcggattttggagcaggcgttcaaaggcggctgtaaggccccgcatgccatgatctctagctgtggcaccattcctggaaatccatatcccaagggtcggccaagcagaataaatggcatttttcccggtaccccgctaaaaaaggatggagaggaatgcaccaatgaagggaaaggcatcgcagccaggatccttggcccaagtaaaccccccccttccacatataaccctcataagcccgtgccatacccaatcccaccatgtcggccccacgccaccattgctccttccgcttacaacaatgccggtctggtgcccttagctaacgtgatagctccccccccgcccccttatacacccaaccccgtgggcaccgagaacgaggacctgtcaaatccatcgaaacctatccagaatcagacattttccaccccagcctctcagctgtttagccctcacggctctaatcctagtacgcctgccgccacacctgtgcctaccgcaagcccagtcaaggcaatcaatcatcctagcgcttctgctgcggccacagttagcgggatgaatctgctcaacactgtcctgccagttttcccgggtcaggtctcaagtgcagttcacacgccccagccatccatccccaacccaaccgttatacggacccccagcctccccacggcgccggtgacttcaatccactccacaaccaccacccccgtcccatccatctttagcgggctggtgtccttacccggccccagcgctactcctacagccgccactccgacacccggtccaactccaaggagcactctcgggtcttccgaagccttcgcaagcacaagtgccccctttacctcactcccgttcagtacctcgagctctgccgccagcacgagcaatcctaactcagcttccctctcctccgtgttcgccgggctgccacttcctttgccacccaccagccagggcctcagcaaccctacaccggtgattgctggtgggtcaacaccctcggttgccggtccattgggggtaaatagcccgctgctctccgcactgaaaggcttcctcactagtaacgacacgaacttgataaactcttccgccctgagctccgctgttacgtccgggctggctagtctctcgtcactaacccttcagaactcagactcatcggcctccgctccgaataagtgttatgccccatccgcaattccaacaccccaaagaaccagcactcctggccttgctcttttccccgggctaccttccccggtggctaacagtactagcactcctctgaccctgcccgttcagtctccactggccacagcagcttccgcatcgaccagtgtgccggtatcctgtggctcttcagcctcacttctgcggggccctcatcctgggactagtgatctccatatatcgagcacaccagccgctaccacactgcccgtgatgataaagactgaacccacctcacccacacctagtgcttttaagggtcccagtcatagtgggaaccccagccatggaaccctcggattgtccggcaccctgggaagggcctacacttcaacatcagtgcccatttctttgtccgcgtgcctgaatcctgccttatcgggtctgtcttctctgagcacaccattaaacggatcgaacccactgagttctatttccctccctccgcatggatctagcactccaattgcccctgtgttcaccgctcttccatctttcacctccctgactaacaacttccccttgaccggaaatccttctttgaatccctccgtgtctttgccaggaagtctcattgctacttcgtctaccgcagctacatccaccagtctccctcatccctcctccaccgcagctgtactcagcgggctgagcgccagcgccccagtgtccgctgctccattcccactcaacttgtccactgcagttccatcattgttttcagtaacacaaggacctctgagtagctctaacccctcttacccaggcttctccgtatcaaacactccaagtgtcactcccgctcttccatctttccctggtttgcaggctcctagcaccgtggcagccgtgacccctctacctgtcgccgccacagcaccatcccccgctcctgttctgcctggctttgcctccgcttttagttccaattttaactcggcactggtggcgcaggcaggtctcagtagcggtcttcaggcagctgggtcttcagtattcccaggattgctgtctctgcccgggataccaggcttcccccagaacccctcccagagctctctgcaggagctgcaacataacgcggcagcccagagtgccttactgcagcaggtccactccgcctctgcattggaaagctacccagcccaacccgatggatttccaagctatcctagcgcccctggcactcctttctccctgcagcctagtctgtcacagagcgggtggcagtag

SEQ ID NO: 280249 - DNA, 2769 bp, Artificial Sequence
  derived and/or modified sequence
atggacaagaagagctttgagatggtgctggatgagatcaggaaggtggtggacctgctgcgctacttctcctgggccgagccccagctgaaggccatgaaggccctgcagcacaagatggtggccgtgcagcccacagaggtggtgaacatcctgaactgcttcaccttcagcaaggacaagctggtggccctggagctgctggccagcaacatcattgatgcccagaacagccggcccatcgaggacctcttccgggtgaacatgtctgagaagaagcgctgcaagaggatcctggagcaggccttcaagggcggctgcaaggcccctcatgccatgatcagcagctgtggcaccatccctggcaacccctaccccaagggccggcccagccgcatcaatggcatcttccctggcacccccctgaagaaggatggagaggagtgcaccaatgaaggcaagggcattgctgcccgcatcctgggccccagcaagcccccacccagcacctacaacccccacaagcctgtgccctaccccatccccccctgccggccccacgccaccatcgcccccagcgcctacaacaatgccggcctggtgcccctggccaacgtgattgcccctcctcctccaccctacacccccaaccctgtgggcacagaaaatgaagacctgagcaaccccagcaagcccatccagaaccagaccttcagcaccccagccagccagctgttcagcccccacggcagcaaccccagcaccccagctgccacccctgtgcccacagccagccctgtgaaggccatcaaccaccccagcgccagcgctgctgccaccgtgtctggcatgaacctgctgaacacagtgctgcccgtcttccctggccaggtgagcagcgctgtgcacaccccccagcccagcatccccaaccccaccgtcatccgcacccccagcctgcccacagcccctgtgaccagcatccacagcaccaccaccacccctgtgcccagcatcttcagcggcctggtgtccctgcccggccccagcgccacccccacagctgccacccccaccccaggccccacccccaggagcaccctgggcagcagcgaggcctttgccagcaccagcgcccccttcaccagcctgcccttcagcaccagcagcagcgctgccagcaccagcaaccccaacagcgccagcctgagctctgtgtttgctggcctgcccctgcccctgccccccaccagccagggcctgagcaaccccacccctgtgattgctgggggcagcaccccatctgtggccggccccctgggcgtgaacagccccctgctgagcgccctgaagggcttcctgaccagcaatgacaccaacctgatcaacagcagcgccctgagcagcgctgtgaccagcggcctggccagcctgagcagcctgaccctgcagaacagcgacagcagcgccagcgcccccaacaagtgctacgcccccagcgccatccccaccccccagaggaccagcaccccaggcctggccctcttccctggcctgcccagccctgtggccaacagcaccagcacccccctgaccctgcctgtgcagagccccctggccacagctgccagcgccagcacctctgtgcctgtgtcctgtggcagcagcgccagcctgctgcggggcccccaccctggcaccagtgacctgcacatcagcagcaccccagctgccaccaccctgcctgtgatgatcaagacagagcccaccagccccaccccatctgccttcaagggccccagccacagcggcaaccccagccacggcaccctgggcctgagcggcaccctgggccgggcctacaccagcacctctgtgcccatcagcctgagcgcctgcctgaacccagccctgagcggcctgagcagcctgagcacccccctgaatggcagcaaccccctgagcagcatcagcctgcccccccacggcagcagcacccccatcgcccctgtgttcaccgccctgcccagcttcaccagcctgaccaacaacttccccctgaccggcaaccccagcctgaaccccagcgtgtccctgcccggcagcctcatcgccaccagcagcacagctgccaccagcaccagcctgccccaccccagcagcacagctgctgtgctgagcggcctgagcgccagcgcccctgtgtctgctgcccccttccccctgaacctgagcacagctgtgcccagcctcttctctgtgacccagggccccctgagcagcagcaaccccagctacccaggcttctctgtgagcaacacccccagcgtgaccccagccctgcccagcttccctggcctgcaggcccccagcacagtggccgctgtgacccccctgcctgtggccgccacagcccccagccctgcccctgtgctgcccggctttgccagcgccttcagcagcaacttcaacagcgccctggtggcccaggccggcctgagcagcggcctgcaggccgccggcagctctgtgtttcctggcctgctgagcctgcccggcatccctggcttcccccagaaccccagccagagcagcctgcaggagctgcagcacaatgctgctgcccagagcgccctgctgcagcaggtgcacagcgccagcgccctggagagctacccagcccagccagatggcttccccagctaccccagcgcccctggcacccccttcagcctgcagcccagcctgagccagagcggctggcagtag

SEQ ID NO: 280250 - DNA, 2769 bp, Artificial Sequence
  derived and/or modified sequence
atggacaagaagagcttcgagatggtgctggacgagatccggaaggttgtggacctgttgcggtatttttcctgggccgagccccaactaaaggcgatgaaggccctacagcataagatggtcgccgtccagccgactgaggttgtgaatatcttgaactgttttactttctcaaaagacaagctggtcgctctcgaattgctggccagcaatattatcgatgcccaaaactcacggccaattgaggatttgttcagggtcaatatgtcagaaaagaagagatgtaagcggattttggaacaggcattcaagggcggctgtaaagcaccccatgcgatgatctcgtcttgtggcactatacccggaaatccatacccaaaaggtcgaccctcaaggataaatggcatctttcctggcactcccctaaagaaggacggcgaggagtgtactaacgagggaaaaggcattgcggctagaatcttggggccttccaagcctccccccagcacgtacaacccacataagcccgtgccttaccctatcccgccttgcaggcctcatgcgactatcgctccatcagcctacaacaatgcagggctcgttcctttggccaatgtgatcgcccccccgcctcctccatacactcctaatcctgttgggactgagaatgaggatttgtccaatccctctaaacctatccagaaccaaaccttctccaccccagcctcacaactgttcagcccgcacgggtcgaacccatcgaccccagccgcgacacccgtaccaaccgccagtcccgtgaaagccattaatcaccccagtgcttctgctgctgcgactgtcagtggaatgaacctgctgaacacggtcctgccggtctttcctggacaggtgagttcagctgtgcacacaccacagccgagtattcccaaccccacagtgatacggactcccagcctgcccacagcccctgttacatctatccactccaccaccaccaccccagtgccctcgattttcagcggcctcgtgtcgctgccgggaccaagcgcaactccaacagctgctactcctacccccggtccgacaccacggtccacgctgggtagcagtgaggcattcgcatcaacgtcggccccattcacctcgttaccctttagcacttcaagctccgcagcttccacctcaaatcccaattctgcaagcttatcatccgtattcgccggactgcccttgccacttccccctacatcccagggactctccaacccaacccccgtgattgcaggcgggagtacaccctccgtcgctggaccccttggagtcaactcccctcttctctcagcccttaaagggttccttaccagcaatgacaccaatttgattaacagtagcgcattaagcagcgcagtcacgagtggcctggctagcctcagttctctgactctccagaacagcgacagctcagcctccgcccccaataaatgctacgcgccgtcagctataccaaccccacagcggacctctacgccaggtctggccctttttcccggcctgccttctcctgtcgctaattccactagtacacccctcactttgcctgtacagtctcccttagcaacagctgcaagcgcttccacctccgtcccagtgtcttgcggcagcagcgcaagtctgctgcgcgggccacaccctgggacttccgatctgcacataagttccacaccagcagccaccactttgcctgtcatgattaaaacagaacctacaagtccaactccctccgcattcaaaggtccaagtcacagtggcaatccatcgcacggtacactggggctttctgggaccctgggacgagcttacacatccacttctgtgcctatatcactaagtgcttgcctcaaccctgcactgtcaggtctgagctcactgagcacccctctgaatggatccaatcccctaagcagcataagcctgcctccccacggcagttctaccccaattgccccagtttttactgccctccctagctttaccagtcttaccaataatttcccgctgaccggcaatccctcattgaacccgagcgtgtctttaccgggatcccttattgctacctctagcacagctgccaccagtacatccctgccccatccttccagtaccgctgctgtgctgagtggtctaagcgcctctgccccggtgagtgcagcaccttttcctttaaatctgtcgactgcagtaccttcactgtttagcgtcacgcaaggcccattgtctagtagcaacccttcttatccaggcttctctgtcagtaataccccaagcgtgactcctgcacttcccagtttcccaggtctgcaggcaccctcaaccgtggccgctgtcaccccgctccctgtggccgcaactgcaccttctcccgcccccgtccttcccggttttgcctccgcgtttagcagcaatttcaattcagccctggtggcccaagcaggcctgtcgagcggcctccaagccgctgggtcctccgtgttccccggcctgctgtccctccctgggattcctggattcccacagaaccccagccaaagcagcctccaagagttacagcacaacgcagcagcacagtcagcgcttcttcagcaggtgcattctgcctcagccttggaaagttatcctgcacagccggatgggtttccttcctacccttccgctccaggaaccccattcagtttgcaacccagtcttagtcagtcaggctggcagtag

SEQ ID NO: 280251 - DNA, 2769 bp, Artificial Sequence
  derived and/or modified sequence
atggataagaaaagtttcgagatggtccttgacgaaatacgaaaggtggtggacctgctaaggtacttctcttgggcagaaccgcagttgaaggccatgaaggcgctccagcataagatggttgccgttcaaccaactgaggtcgtgaatattctgaactgcttcaccttttcaaaagataaattggtggctctggagcttctggcttccaacatcatcgatgcccagaacagtcgcccaatagaggatctgtttcgcgtcaacatgtctgagaagaagaggtgtaaacgcatcctcgaacaagctttcaaaggtgggtgcaaggctcctcacgcaatgatctcttcttgtggtaccatcccaggcaacccataccccaagggcagaccctctcgcatcaatggaatttttccaggcactcccctgaagaaggatggagaggagtgcacgaacgaaggcaagggaatcgccgcaagaattttgggtccatccaaaccccctcctagcacttacaatccccacaagccagtgccatacccaatcccaccttgcaggccccacgccactattgcaccaagtgcgtataacaacgcaggtctggtgcccttggcaaacgtgatcgccccacccccacctccctacacacctaatcccgtcggcactgagaatgaggatctgagtaatccaagcaaaccgattcagaatcaaactttttctacaccagcatctcaactgttctctccccatggctctaatccttctacaccagctgcgaccccggtgccgacagcttctcccgtgaaggcaattaatcatccctctgccagcgctgcagccactgtgagcggaatgaacttactgaatactgtcctgcccgtttttcccggacaggtctcctcagctgtgcacactccccagccctcgatcccgaatcctacggtgatccggaccccaagcctccctacagctccagttacatctattcactctaccactaccacaccggtccctagtattttttcaggcctggtgtcactgcctggcccatccgctacacccaccgcagccacccccactcctggccctacacctcggtctactctcggctcaagtgaggcctttgcttctacatcagctccatttactagtcttcccttcagtaccagttctagtgctgccagtacctctaatccaaactccgcatcattgtcttccgtcttcgccggactcccactgccgcttccacctacttctcagggtctctctaatcccactcctgtcattgcaggaggaagcactccttccgttgctggacctctgggagtgaactccccgctgctcagcgccttaaaggggtttctcacatctaatgacactaatctgatcaactcatccgccttatccagtgccgtcacaagtggcctggcctccttaagctcactgaccttgcagaattcagacagctccgctagcgcccctaacaaatgttatgcacctagtgctattccaacccctcagagaacgtccactccagggttggctctgttccctggtctgcccagtcccgtcgctaactcaacatctacccctctgactctgcccgttcagagccccctggcaaccgctgcatccgcttcaactagtgtaccggtctcatgcggcagctccgcaagcctcctccggggacctcaccccggtacttcggacttgcacattagcagcacccctgcagcaacaaccctacccgtgatgattaagaccgaacccactagtccaacgccaagcgcctttaaaggcccatcacattcaggcaatccctctcatggcaccctcgggctctccggcaccctgggccgagcatacaccagcacttccgtacctattagcctgagcgcctgcctgaaccctgccctgagtggtctaagtagcctgtcaacacccttgaacgggagcaatcctttatcaagtatctcactgccaccacacggctcttcaacaccaatcgctccggtttttacggccctccccagctttacctcgctgacgaacaacttcccactcaccggaaacccctccctcaacccatcagtgtctttgcccggttccctgattgccactagctccacagctgctaccagtaccagcctgccccatccaagtagcacagctgctgtgttgagcggtctgagcgccagtgcccctgtgtcggccgcacccttccccctcaacctgtcaacagcggtgcctagtctcttttccgtgacccagggcccactcagctcatcgaatccttcttatccaggcttctcagtatccaatacgccctcggtgacgccagcgctcccctcattccctggattgcaggccccttctactgtggctgccgttacgcctctccctgttgccgctacagctccatcccccgctcctgttctacctggttttgcctctgcatttagcagtaacttcaattcggccctagtggctcaggccggactgtcctctggactgcaggcggcagggtcttcagtgttccctggcctcctgtctttgcccggaatacccggattcccacagaatcccagtcaatctagccttcaggaactgcaacataacgccgctgcccagtccgctcttctccagcaggtacattctgctagcgccctcgaaagttatcctgctcagccggatggcttcccaagttatcctagcgccccaggaacgcccttctccctgcagccctctctgtctcaatctggttggcagtag

SEQ ID NO: 280252 - DNA, 5141 bp, Artificial Sequence
  derived and/or modified sequence
acaccaggaccccacctctggctttcaggaaagaggggcccaagctggcggcgcagtgttgagtttacttgggcgcgactggctttattgtaggtccccatgagctggtgggggctgtaggggtaaccaggcagggcgtctggcgctgttggggctgcgtttttccggagtccccctatgcgaggccgtgcccctcttcgcccggctcctggtgctccccagccgccggcccgctcccggaagctgcagcagctggtaacaaagagcctgccgggccgcctgctgccggggccgaggtatccaggagtcgggcggagcggctggggatgagcgcgagccggaccatgcgtccgggttcgcggcggtgagggtcgcggccggcggccgaggcgcaggtgcgggtcgagagaccggcgcctccctccccgccgcccgtggactctgagcgcaggtgtttctactctgccggccgctccacctgggaaagcgccttcaagagctacctctggcggcacctggccctcagctgcagggaaaccgcactcaaacctgccgccgagcccgggtttttctgcaaaactcagaggacctggctcttgcccgaggtgccctgaaccattgtgtgaataagctggggaagcctgactggagtgttttttctttttaataaaaagagtttttctgaatctcaatttttagaaattttttttgcgaagtttgcaatactctctacctcttcgcatcctctcttgctcgtggagtctttttcctcctcagctataaatattttttactatcggcggagcagaccagggatgaacgtcttttaattgcaagtataactgttaaaaccacgtcgggatagtagtcaagatggataaaaagtcctttgaaatggtgctggatgaaattagaaaggtggttgatttgctgagatatttttcctgggccgagccccagttgaaggcaatgaaagcattacagcataaaatggtggctgtccagccaacagaagtggtcaatatactcaactgtttcactttcagtaaagacaaactagttgctcttgaactgttagcctcgaacattattgatgcacagaattctcgtcctattgaagatttattcagggtaaatatgtctgagaagaaacggtgcaagagaatacttgaacaggctttcaaggggggctgcaaagctcctcatgctatgatatcttcttgtggaacaatcccaggaaatccatatcccaaaggaagacctagccgcataaatggaattttcccaggaactcctttgaaaaaagatggtgaagaatgtactaacgaaggcaaaggaatagctgcacgaattcttgggccatccaaaccacctccttcaacatataatccacataaacctgttccttatccgatacctccatgccgaccacatgcaactattgcaccaagtgcttataacaatgcaggtctggtaccattagcgaatgtcatagctccacctccacctccatatactcctaatcctgtaggaacagagaatgaagacctttcgaatccgtcaaaacctatacagaatcaaacattttccaccccagcaagtcaactcttttctcctcatggttctaatccttcaacacctgctgcaactcctgttcctactgcatccccagtcaaggcaattaatcatccatcagcatcagcagctgccaccgtttctggaatgaacctgctgaatactgtccttcctgtgttcccagggcaggtctcctcagccgttcacacacctcagccatcaataccaaacccaacagttatcagaaccccttcattgcccactgcacctgttacatccatccacagtacaaccaccactcctgttccttccattttttctggcctagtgtcactgccaggtccttctgccactcctaccgcagccactcctaccccaggacctacaccacggtccactcttggttccagtgaagcatttgcttctacttctgcacctttcactagcctccccttttccaccagctcttctgctgcttctaccagcaacccaaattctgcttcattgtcatcagtttttgcagggctccctttgcccttaccaccaacatcccaaggcctatccaacccgactcctgtaattgctggtggctctactcccagcgttgccggtccacttggtgtgaacagtcctcttttgtctgcgttaaaaggttttctgacatccaatgacaccaatttaatcaactcctctgctttatcctctgctgtcacaagtgggctggcttcactatcttctcttactcttcagaactctgactcttctgcttcagcccctaacaagtgctatgccccatcagccatccctaccccacagaggacttccactccagggttggccctgttcccaggcctgccgtctcccgtggctaactcaacttccactcccctgacattgcctgtacagtctcctttagccactgctgcatcagcttccacgtcagtgccagttagctgtggctcctcagcctcccttttgcgtggcccccacccaggtacctcagatctgcatatttcatctacccctgctgcaacaactcttcctgttatgatcaaaactgagcccacaagtcctactccctcggccttcaaaggtccatctcattctgggaatccctctcatggcactttaggtttgtcagggacattgggccgtgcatatacttcaacatccgtgcccatcagtttatctgcttgccttaatcctgcattgtcaggtctctccagcttgagtactcctttaaatggttcaaatcctctttcctctatttcccttccaccacatggttcctccactcccattgcaccagtattcactgctcttccttcttttacttctttgaccaacaattttcctttaactggcaacccatctcttaatccgtcagtatctctcccagggtcattaatagccacctcatctaccgctgccacctccacatctctccctcatcctagctcaacggcagctgttctctcagggctttctgcttcagcaccagtctcagcagcacctttccccctcaacctgtccactgctgttccctcacttttctctgttactcaaggacctctgtcatcttcaaatccctcctatccaggcttttctgtctctaataccccaagcgttacccctgctcttccctcattcccggggctgcaggcgccctctacagtcgcagctgtcacaccactacctgtggctgccacagccccatccccagctccagtcctcccaggattcgcctcagcattcagttccaatttcaactccgctcttgttgcacaagccggtttatcatctggacttcaagctgcaggcagttctgtttttccaggccttttgtccctcccgggtatccctgggtttcctcagaatccttcacaatcatccttgcaagaattacagcataatgcggctgcgcagtcagcattgttacagcaggtccattcagcttcggctctggaaagctatccagctcagcctgatgggtttcctagttatccttcagcgccaggaacaccattttctttgcaaccaagcctgtcccagagtgggtggcagtgaatacttttaacttttattctccttcagagcaacatcagaattgcctgagaactgcaatgaacaatctgacaaatgtgaagctggccaaaagtcggaaaatgagaatgagggtaatcctggagaaattgtgacaacaatttgaaaattgtggttgcattttaaagtgtgaacactcccctatgtaaatatgctgacaataaattgtatggagaatggtatttaaaaagtgtttggagacttttcacctgtcctataaaattttgaattgtgtatgtgatctacatagaaagaatattaaagagtaggttgaactctttatagccgaatacagccttaaatatgcttgtatagcatccactggcagaagtaatagttgtgcctcagacttgggggttgcatgtggccctgggggagttactacccttggtatgcatgagcggttcctattagcatcagtgggaactcagtactctgtatgtatccacaaaagggaacttgagacccacagttattcttaatttctgatattaacaaccgtacatactgctgaatttaactcaaaatatttcaggtaagtgaaagtggtgcttaatgtagactatagaatgactttcaggtgttttcaactgaaagtatatatccagaactgcatccttatagaaatacaagtaagacttaggataatttgccttcaaaacagttttcctaatctcagcagtatccagtgagtgaagaacacttgactgactcttgggccacctctgttacttactgtactatggaagctcctggtgaatgtttacaattatgggatgtagtatttctatttgtactttaagtcaaatgcttatatgaaatatgtgacaacaaatagagaagactggctctgttagtaattatgcagtatgtactctatttaaggatctgtggtagtataacatgagtgaatgtcattaattttgaagtaataactgccacatgtgggaagtaggggagtaaggagaatgaattccaatctgtgattaaaagtgtaaactatagactctactgtagtacatttcaggatctagaagttttacttttataaagatggtgtccggaagatgttgctaatgtattttacttcaacatagggaacaaactttttaagtatattaataaacctgtatggttagtttttaacagttttttaaaataaactatggatatgacaaatattctgtgttttactaagtgcttggataggctttctaattttgtatacgtgctagagttaattattgaacatttttatccaaatttagttgtaactctgtttatactactgattgctcattcgtttaaatgatattttaatgtaaaagtcataaccaacatatgaacagacagatttatgtctttaaacacagaatgtaagctatagtttaatctgataccagttgctggaagttgccatttgtttttcttaaatctatacccataaaacttcttttaagatt

SEQ ID NO: 280253 - DNA, 3018 bp, Artificial Sequence
  derived and/or modified sequence
ggactgtgggagcggcttccttggattccgcgcttggcaacggctcggcgtcgcgctttggccaaccgctgcgtcgtccctgggcccgaataactgtcgcccgcttccctcagcgtgaggtgaagcacttcaaattgcctgatgaaagttgaatcaggaatgaagataaaagtacacaacaatgcagaaagcggtacttagcctcacaaagatggaaacattccaaaaacgtgaaaaactgcagtaggcttcttggaagtagaccaagggtgtccaatctttggcttccctgggccacatcggaagaagaattgtcttgggccacacatgaaattcacaaacactaaggtacaaatgatgcaaaatgtgcacctggctccagagacagatgaagatgatctttattccggctataatgactacaatccaatctatgatatcgaggaattggagaatgatgcagcttttcagcaagctgtgaggactagtcatggcagaagacctccaataactgctaaaatatcaagcacggcagttactagacctatagctactggatatgggtccaagacatctctggcatcatcaataggaagaccaatgacaggggctattcaggatggagttactagacccatgacagcagtgagagcagctggttttaccaaagcagctttgagaggctctgcatttgacccccttagtcagtcaaggggccctgcttcccctttggaagccaagaaaaaagatagcccagaggaaaaaataaagcaattagagaaggaagtaaatgagttggtagaagaaagctgtattgccaatagttgtggagacttaaaattggccttagaaaaggcaaaagatgcaggaagaaaagagagagtcctggtgagacagcgagaacaagttacaactccagaaaatatcaatttggatttaacttactcagttcttttcaatttggccagtcagtattcagttaatgaaatgtatgccgaagcacttaacacttatcaagttatagtcaaaaataagatgtttagcaatgcaggaatattgaaaatgaatatgggaaatatctatttaaagcaaagaaattattccaaagccattaaattctaccgaatggcattagaccaagttccaagtgtcaataagcaaatgaggattaaaataatgcagaatattggagttacatttattcaggctggtcagtattcagatgctattaattcatatgagcacataatgagcatggcaccaaatctgaaggcaggctacaacctaactatctgttattttgctattggagaccgagaaaaaatgaagaaggcattccaaaaattgattactgttccattagaaattgatgaagataaatatatttcaccaagtgatgatcctcatactaacttagtaactgaagctataaaaaatgatcacctcaggcaaatggaacgtgaaaggaaagccatggcagaaaaatatattatgacatctgcaaaactcattgctcctgtaattgaaacatcttttgctgcaggttatgattggtgcgtggaagtggtgaaagcttctcaatatgtagagctagccaatgatctggaaataaacaaagcagttacatacttgagacaaaaagactataaccaagctgtagagatcttaaaagtgttggaaaaaaaggacagtagagtgaaaagtgcagctgcaaccaatctctcagccctgtattatatgggaaaggattttgcacaagccagcagctatgcagatatagctgtgaactctgatagatataatccagcagctcttactaataaagggaatacagtttttgcaaatggtgattatgagaaggccgctgaattctataaagaggctctaagaaatgattcttcttgtactgaagcactttataatattggccttacctatgagaaactaaatcggctagatgaggctttggactgtttcctgaaacttcacgcaatcctacgaaacagtgccgaagttctttaccagatagcaaatatatatgaattaatggaaaatcccagtcaagctattgaatggctaatgcaggtggtcagtgttattccaaccgatcctcaagttttatctaagctaggagaattatatgatcgtgaaggagataaatctcaagcatttcaatattactatgagtcatataggtattttccttgtaatattgaagtcattgagtggcttggagcctattacattgacacccaattttgggaaaaagctattcagtactttgaaagagcttctcttatacagcctacacaagtgaaatggcagctgatggtagctagttgtttcagaagaagtggtaactaccaaaaagcattagatacttacaaagatactcacagaaaatttccagaaaatgtcgaatgtctgcgtttcttagttcgtctctgcacagatcttggattaaaagatgctcaagaatatgccagaaaactgaagaggttggaaaaaatgaaagaaataagggaacagcgcataaagtcaggcagagatggcagtgggggctcccgtggcaaaagagaaggaagtgctagcggtgatagtggccagaactatagtgccagtagtaaaggtgaacgactaagtgccagactcagagctttacctgggacaaatgaaccttatgaaagtagcagtaacaaagaaatagatgcctcctatgtggacccacttggccctcaaatagaacgaccaaaaactgcagccaagaaaaggatcgatgaggatgattttgctgatgaagaattaggagatgatttgcttccagaataatattcactttaatatttattaaaggaaagaaattgccttatgagatcatcctcatgttaaaccttggattaaatatctaacctgtaattattttttttcactgtcaaaacttaagtaagtgtattctattctgtatgtatgcatttaagttgtttttttcttttaaggaataaaaacaggtaaaactaa

SEQ ID NO: 280254 - DNA, 2716 bp, Artificial Sequence
  derived and/or modified sequence
gcttccttggattccgcgcttggcaacggctcggcgtcgcgctttggccaaccgctgcgtcgtccctgggcccgaataactgtcgcccgcttccctcagcgtgaggtacaaatgatgcaaaatgtgcacctggctccagagacagatgaagatgatctttattccggctataatgactacaatccaatctatgatatcgaggaattggagaatgatgcagcttttcagcaagctgtgaggactagtcatggcagaagacctccatccaagacatctctggcatcatcaataggaagaccaatgacaggggctattcaggatggagttactagacccatgacagcagtgagagcagctggttttaccaaagcagctttgagaggctctgcatttgacccccttagtcagtcaaggggccctgcttcccctttggaagccaagaaaaaagatagcccagaggaaaaaataaagcaattagagaaggaagtaaatgagttggtagaagaaagctgtattgccaatagttgtggagacttaaaattggccttagaaaaggcaaaagatgcaggaagaaaagagagagtcctggtgagacagcgagaacaagttacaactccagaaaatatcaatttggatttaacttactcagttcttttcaatttggccagtcagtattcagttaatgaaatgtatgccgaagcacttaacacttatcaagttatagtcaaaaataagatgtttagcaatgcaggaatattgaaaatgaatatgggaaatatctatttaaagcaaagaaattattccaaagccattaaattctaccgaatggcattagaccaagttccaagtgtcaataagcaaatgaggattaaaataatgcagaatattggagttacatttattcaggctggtcagtattcagatgctattaattcatatgagcacataatgagcatggcaccaaatctgaaggcaggctacaacctaactatctgttattttgctattggagaccgagaaaaaatgaagaaggcattccaaaaattgattactgttccattagaaattgatgaagataaatatatttcaccaagtgatgatcctcatactaacttagtaactgaagctataaaaaatgatcacctcaggcaaatggaacgtgaaaggaaagccatggcagaaaaatatattatgacatctgcaaaactcattgctcctgtaattgaaacatcttttgctgcaggttatgattggtgcgtggaagtggtgaaagcttctcaatatgtagagctagccaatgatctggaaataaacaaagcagttacatacttgagacaaaaagactataaccaagctgtagagatcttaaaagtgttggaaaaaaaggacagtagagtgaaaagtgcagctgcaaccaatctctcagccctgtattatatgggaaaggattttgcacaagccagcagctatgcagatatagctgtgaactctgatagatataatccagcagctcttactaataaagggaatacagtttttgcaaatggtgattatgagaaggccgctgaattctataaagaggctctaagaaatgattcttcttgtactgaagcactttataatattggccttacctatgagaaactaaatcggctagatgaggctttggactgtttcctgaaacttcacgcaatcctacgaaacagtgccgaagttctttaccagatagcaaatatatatgaattaatggaaaatcccagtcaagctattgaatggctaatgcaggtggtcagtgttattccaaccgatcctcaagttttatctaagctaggagaattatatgatcgtgaaggagataaatctcaagcatttcaatattactatgagtcatataggtattttccttgtaatattgaagtcattgagtggcttggagcctattacattgacacccaattttgggaaaaagctattcagtactttgaaagagcttctcttatacagcctacacaagtgaaatggcagctgatggtagctagttgtttcagaagaagtggtaactaccaaaaagcattagatacttacaaagatactcacagaaaatttccagaaaatgtcgaatgtctgcgtttcttagttcgtctctgcacagatcttggattaaaagatgctcaagaatatgccagaaaactgaagaggttggaaaaaatgaaagaaataagggaacagcgcataaagtcaggcagagatggcagtgggggctcccgtggcaaaagagaaggaagtgctagcggtgatagtggccagaactatagtgccagtagtaaaggtgaacgactaagtgccagactcagagctttacctgggacaaatgaaccttatgaaagtagcagtaacaaagaaatagatgcctcctatgtggacccacttggccctcaaatagaacgaccaaaaactgcagccaagaaaaggatcgatgaggatgattttgctgatgaagaattaggagatgatttgcttccagaataatattcactttaatatttattaaaggaaagaaattgccttatgagatcatcctcatgttaaaccttggattaaatatctaacctgtaattattttttttcactgtcaaaacttaagtaagtgtattctattctgtatgtatgcatttaagttgtttttttcttttaaggaataaaaacaggtaaaact

SEQ ID NO: 280255 - protein, 432 aa, Artificial Sequence
  derived and/or modified sequence
MTAVRAAGFTKAALRGSAFDPLSQSRGPASPLEAKKKDSPEEKIKQLEKEVNELVEESCIANSCGDLKLALEKAKDAGRKERVLVRQREQVTTPENINLDLTYSVLFNLASQYSVNEMYAEALNTYQVIVKNKMFSNAGILKMNMGNIYLKQRNYSKAIKFYRMALDQVPSVNKQMRIKIMQNIGVTFIQADREKMKKAFQKLITVPLEIDEDKYISPSDDPHTNLVTEAIKNDHLRQMERERKAMAEKYIMTSAKLIAPVIETSFAAGYDWCVEVVKASQYVELANDLEINKAVTYLRQKDYNQAVEILKVLEKKDSRVKSAAATNLSALYYMGKDFAQASSYADIAVNSDRYNPAALTNKGNTVFANGDYEKAAEFYKEALRNDSSCTEALYNIGLTYEKLNRLDEALDCFLKLHAILRNSAEVLYQIAN

SEQ ID NO: 280256 - DNA, 1299 bp, Artificial Sequence
  derived and/or modified sequence
atgaccgccgtgagagccgccggcttcaccaaggccgccctgagaggcagcgccttcgaccccctgagccagagcagaggccccgccagccccctggaggccaagaagaaggacagccccgaggagaagatcaagcagctggagaaggaggtgaacgagctggtggaggagagctgcatcgccaacagctgcggcgacctgaagctggccctggagaaggccaaggacgccggcagaaaggagagagtgctggtgagacagagagagcaggtgaccacccccgagaacatcaacctggacctgacctacagcgtgctgttcaacctggccagccagtacagcgtgaacgagatgtacgccgaggccctgaacacctaccaggtgatcgtgaagaacaagatgttcagcaacgccggcatcctgaagatgaacatgggcaacatctacctgaagcagagaaactacagcaaggccatcaagttctacagaatggccctggaccaggtgcccagcgtgaacaagcagatgagaatcaagatcatgcagaacatcggcgtgaccttcatccaggccgacagagagaagatgaagaaggccttccagaagctgatcaccgtgcccctggagatcgacgaggacaagtacatcagccccagcgacgacccccacaccaacctggtgaccgaggccatcaagaacgaccacctgagacagatggagagagagagaaaggccatggccgagaagtacatcatgaccagcgccaagctgatcgcccccgtgatcgagaccagcttcgccgccggctacgactggtgcgtggaggtggtgaaggccagccagtacgtggagctggccaacgacctggagatcaacaaggccgtgacctacctgagacagaaggactacaaccaggccgtggagatcctgaaggtgctggagaagaaggacagcagagtgaagagcgccgccgccaccaacctgagcgccctgtactacatgggcaaggacttcgcccaggccagcagctacgccgacatcgccgtgaacagcgacagatacaaccccgccgccctgaccaacaagggcaacaccgtgttcgccaacggcgactacgagaaggccgccgagttctacaaggaggccctgagaaacgacagcagctgcaccgaggccctgtacaacatcggcctgacctacgagaagctgaacagactggacgaggccctggactgcttcctgaagctgcacgccatcctgagaaacagcgccgaggtgctgtaccagatcgccaactag

SEQ ID NO: 280257 - DNA, 1299 bp, Artificial Sequence
  derived and/or modified sequence
atgaccgcagtccgggcagcaggttttactaaggccgcactccgtggctctgcattcgatcctctttctcagtcacgaggcccggcttctcccctggaggcaaagaaaaaagatagtccagaggagaagataaaacagttggaaaaggaagttaacgagctcgtagaggaatcttgtatcgccaacagctgcggagaccttaagctggctcttgagaaagcaaaagacgctggcaggaaagaaagggttctcgtgaggcagcgagaacaggtcaccactccggagaatataaatctcgacctcacgtactctgtgcttttcaatttggcctcacagtattccgtgaacgagatgtacgccgaagcgcttaatacataccaagtgattgtgaagaataaaatgttttcaaatgctggcattctcaaaatgaacatggggaacatttaccttaaacagagaaattatagcaaggccattaagttttaccgaatggcgctagatcaggtgcccagcgtgaacaagcagatgcgcatcaagattatgcaaaacatcggtgttacattcattcaggccgatagggagaaaatgaagaaagctttccagaagctgattactgtccctttagagatagacgaggataagtacatatcccccagtgacgatccccatacaaatttagtaaccgaagctataaagaacgaccatctgagacagatggaaagagagagaaaagccatggcagagaagtacatcatgacctcagcgaaacttatagcccccgtgattgagacttcatttgccgcgggatatgactggtgcgtggaagtagtgaaggcctcccagtatgtggaactggccaatgacctggaaattaacaaagcagttacctacctccgtcagaaagattataatcaagcagtagagattttgaaggtgctggaaaaaaaggatagtcgcgtgaagagcgccgccgctactaatctcagcgctctctattacatggggaaggattttgcccaggctagttcatacgcagacatcgcagtgaattctgatcggtacaatccagccgccttgaccaataagggcaatacagtattcgcaaatggcgattacgagaaggctgcggagttttataaggaagccttgagaaatgattcatcctgcacagaggccctgtacaatatcgggctgacatacgagaaactgaatagacttgatgaagcgctagattgctttctgaaactgcatgccatcctgagaaacagtgcggaggtattatatcaaatagctaactag

SEQ ID NO: 280258 - DNA, 1299 bp, Artificial Sequence
  derived and/or modified sequence
atgacagctgtgcgggctgctggcttcaccaaggccgccctgcggggcagcgcctttgaccccctgagccagagccggggccctgccagccccctggaggccaagaagaaggacagccctgaggagaagatcaagcagctggagaaggaggtgaatgagctggtggaggagagctgcatcgccaacagctgtggggacctgaagctggccctggagaaggccaaggatgctggcaggaaggagcgggtgctggtgcggcagcgggagcaggtgaccaccccagagaacatcaacctggacctgacctacagcgtgctcttcaacctggccagccagtacagcgtgaatgagatgtatgcagaggccctgaacacctaccaggtgattgtgaagaacaagatgttcagcaatgccggcatcctgaagatgaacatgggcaacatctacctgaagcagaggaactacagcaaggccatcaagttctacaggatggccctggaccaggtgcccagcgtgaacaagcagatgaggatcaagatcatgcagaacatcggcgtgaccttcatccaggccgaccgggagaagatgaagaaggccttccagaagctgatcaccgtgcccctggagattgatgaggacaagtacatcagccccagtgatgacccccacaccaacctggtgacagaggccatcaagaatgaccacctgcggcagatggagcgggagaggaaggccatggccgagaagtacatcatgaccagcgccaagctgattgcccctgtgattgagaccagctttgctgctggctatgactggtgtgtggaggtggtgaaggccagccagtatgtggagctggccaatgacctggagatcaacaaggctgtgacctacctgcggcagaaggactacaaccaggccgtggagatcctgaaggtgctggagaagaaggacagccgggtgaagtctgctgctgccaccaacctgagcgccctgtactacatgggcaaggactttgcccaggccagcagctatgctgacattgctgtgaacagcgaccgctacaacccagctgccctgaccaacaagggcaacacagtgtttgccaatggagactatgagaaggctgctgagttctacaaggaggccctgagaaatgacagcagctgcacagaggccctgtacaacatcggcctgacctatgagaagctgaaccggctggatgaggccctggactgcttcctgaagctgcacgccatcctgagaaattctgctgaggtgctgtaccagatcgccaactag

SEQ ID NO: 280259 - DNA, 3054 bp, Artificial Sequence
  derived and/or modified sequence
cgcaccacccccttcccgccgcgctctctcccgcccccgcgcttccggccccgcccgcccccgcgcggaggactgtgggagcggcttccttggattccgcgcttggcaacggctcggcgtcgcgctttggccaaccgctgcgtcgtccctgggcccgaataactgtcgcccgcttccctcagcgtgaggtgaagcacttcaaattgcctgatgaaagttgaatcaggaatgaagataaaagtacacaacaatgcagaaagcggtacttagcctcacaaagatggaaacattccaaaaacgtgaaaaactgcagtaggcttcttggaagtagaccaagggtgtccaatctttggcttccctgggccacatcggaagaagaattgtcttgggccacacatgaaattcacaaacactaaggtacaaatgatgcaaaatgtgcacctggctccagagacagatgaagatgatctttattccggctataatgactacaatccaatctatgatatcgaggaattggagaatgatgcagcttttcagcaagctgtgaggactagtcatggcagaagacctccaataactgctaaaatatcaagcacggcagttactagacctatagctactggatatgggtccaagacatctctggcatcatcaataggaagaccaatgacaggggctattcaggatggagttactagacccatgacagcagtgagagcagctggttttaccaaagcagctttgagaggctctgcatttgacccccttagtcagtcaaggggccctgcttcccctttggaagccaagaaaaaagatagcccagaggaaaaaataaagcaattagagaaggaagtaaatgagttggtagaagaaagctgtattgccaatagttgtggagacttaaaattggccttagaaaaggcaaaagatgcaggaagaaaagagagagtcctggtgagacagcgagaacaagttacaactccagaaaatatcaatttggatttaacttactcagttcttttcaatttggccagtcagtattcagttaatgaaatgtatgccgaagcacttaacacttatcaagttatagtcaaaaataagatgtttagcaatgcaggaatattgaaaatgaatatgggaaatatctatttaaagcaaagaaattattccaaagccattaaattctaccgaatggcattagaccaagttccaagtgtcaataagcaaatgaggattaaaataatgcagaatattggagttacatttattcaggctgaccgagaaaaaatgaagaaggcattccaaaaattgattactgttccattagaaattgatgaagataaatatatttcaccaagtgatgatcctcatactaacttagtaactgaagctataaaaaatgatcacctcaggcaaatggaacgtgaaaggaaagccatggcagaaaaatatattatgacatctgcaaaactcattgctcctgtaattgaaacatcttttgctgcaggttatgattggtgcgtggaagtggtgaaagcttctcaatatgtagagctagccaatgatctggaaataaacaaagcagttacatacttgagacaaaaagactataaccaagctgtagagatcttaaaagtgttggaaaaaaaggacagtagagtgaaaagtgcagctgcaaccaatctctcagccctgtattatatgggaaaggattttgcacaagccagcagctatgcagatatagctgtgaactctgatagatataatccagcagctcttactaataaagggaatacagtttttgcaaatggtgattatgagaaggccgctgaattctataaagaggctctaagaaatgattcttcttgtactgaagcactttataatattggccttacctatgagaaactaaatcggctagatgaggctttggactgtttcctgaaacttcacgcaatcctacgaaacagtgccgaagttctttaccagatagcaaatatatatgaattaatggaaaatcccagtcaagctattgaatggctaatgcaggtggtcagtgttattccaaccgatcctcaagttttatctaagctaggagaattatatgatcgtgaaggagataaatctcaagcatttcaatattactatgagtcatataggtattttccttgtaatattgaagtcattgagtggcttggagcctattacattgacacccaattttgggaaaaagctattcagtactttgaaagagcttctcttatacagcctacacaagtgaaatggcagctgatggtagctagttgtttcagaagaagtggtaactaccaaaaagcattagatacttacaaagatactcacagaaaatttccagaaaatgtcgaatgtctgcgtttcttagttcgtctctgcacagatcttggattaaaagatgctcaagaatatgccagaaaactgaagaggttggaaaaaatgaaagaaataagggaacagcgcataaagtcaggcagagatggcagtgggggctcccgtggcaaaagagaaggaagtgctagcggtgatagtggccagaactatagtgccagtagtaaaggtgaacgactaagtgccagactcagagctttacctgggacaaatgaaccttatgaaagtagcagtaacaaagaaatagatgcctcctatgtggacccacttggccctcaaatagaacgaccaaaaactgcagccaagaaaaggatcgatgaggatgattttgctgatgaagaattaggagatgatttgcttccagaataatattcactttaatatttattaaaggaaagaaattgccttatgagatcatcctcatgttaaaccttggattaaatatctaacctgtaattattttttttcactgtcaaaacttaagtaagtgtattctattctgtatgtatgcatttaagttgtttttttcttttaaggaataaaaacaggtaaaactaatactttaggccagtgacttccttagctttttgaaaacattgacacacaggaagaaataaatttcataac

SEQ ID NO: 280260 - DNA, 1299 bp, Artificial Sequence
  derived and/or modified sequence
atgaccgccgtgcgggccgccggcttcaccaaggccgccctgcggggttccgcctttgacccgctctcgcagtccagaggaccggcctctcctctggaagccaagaaaaaggattcccctgaggagaaaatcaaacagttggagaaggaagtcaatgagctcgtggaagagtcttgcatcgcaaactcctgcggtgatctgaaattggcgctggagaaggcgaaggatgcgggaagaaaggaacgagtgctggtccgacagcgcgagcaggtcacgacccccgagaatatcaatctggacctaacctatagcgtcttatttaatctcgctagccagtacagcgtgaacgagatgtatgctgaagctcttaacacttatcaagtcatagtgaaaaacaagatgttctcaaatgcagggattctcaagatgaatatgggcaacatctacctgaagcagcgaaattacagcaaagctatcaaattctatcggatggcactcgaccaggtgccctctgtcaacaagcagatgcgcatcaagataatgcagaacattggagtcacttttatccaagctgatcgggagaaaatgaaaaaagcattccagaagttaatcacagtgccccttgagatcgacgaggataaatatatatctccaagtgacgacccccatacgaatcttgtaactgaggcgataaagaatgatcacctgcgccagatggagagggagcgtaaagcaatggccgaaaaatacataatgacaagcgcgaaattaatcgccccagtgattgagacgtctttcgcagcaggatatgactggtgcgtcgaagttgtgaaagcttcccagtacgttgagttagctaatgatctggaaatcaacaaggctgtgacgtacctccgccagaaagattacaaccaggccgtggaaatcctgaaggtgctggagaaaaaggatagtagggttaagtcagccgctgcaacgaacttgtctgccctctactatatgggtaaagactttgcacaggcaagctcttatgccgacattgccgtcaatagcgacagatataaccccgctgctttgactaacaaaggaaacaccgtctttgcgaacggcgattatgagaaggcagctgaattttataaagaggctttgcgcaacgacagttcctgtactgaggccctttataacataggactgacatacgaaaaactgaatcgcctggatgaagcactggattgcttcctgaagctgcatgccatactacgaaattctgccgaggtgctctaccagatagctaactag

SEQ ID NO: 280261 - DNA, 1299 bp, Artificial Sequence
  derived and/or modified sequence
atgaccgctgtgcgggctgcgggtttcacgaaggccgctctcagaggttcagcgtttgatcccctgtcacagtcgcgaggcccagcgtctcccctggaggccaagaaaaaagacagtcccgaagaaaagatcaagcagttagagaaagaggtgaacgaattggtcgaggaatcatgcatagccaactcctgtggggacctgaagttagccttagagaaagccaaggatgctggtagaaaggaaagggtccttgtgcggcaaagagagcaggtgaccactcctgagaacattaacctcgacctcacatattctgtgctgttcaatctcgcaagccaatatagtgttaatgagatgtacgcggaagcgcttaacacctaccaagtgatcgtcaagaacaaaatgttttcgaatgccggaattttaaaaatgaatatgggaaacatttatctcaaacaacgcaattactcgaaggctatcaaattttaccgcatggctctggaccaggtcccttctgtgaacaaacagatgcgcattaaaatcatgcaaaacattggggttacatttattcaggcggatagggaaaaaatgaaaaaggccttccagaaactgatcactgttccccttgaaatagacgaggacaagtacattagcccatctgacgacccccataccaacttggtcacagaagcgattaagaacgaccatctgagacagatggagcgcgaacggaaggccatggccgaaaaatacatcatgacctctgccaaactaattgccccagtcattgagacctcttttgccgcagggtatgactggtgtgtcgaggttgtgaaggcctctcagtatgtcgaactggccaacgatctggagatcaataaggccgtcacctacctgcgccagaaagattacaatcaagctgtagagattcttaaagtgctcgagaaaaaagactcacgtgtgaagagtgccgctgctacaaacttgagtgcactgtactacatgggaaaagacttcgcacaggccagtagttatgcagacattgctgtgaattccgaccggtacaatccagctgcattaacaaacaagggcaatactgtgttcgccaacggagactatgagaaggctgctgagttctacaaagaagccttgaggaatgattcgtcatgcaccgaagccctctacaacattggactgacatatgagaagctgaatagattagatgaggctctggactgcttccttaagttgcatgccatcctgaggaactccgccgaggtcctgtaccaaattgctaattag

SEQ ID NO: 280262 - protein, 824 aa, Artificial Sequence
  derived and/or modified sequence
MMQNVHLAPETDEDDLYSGYNDYNPIYDIEELENDAAFQQAVRTSHGRRPPITAKISSTAVTRPIATGYGSKTSLASSIGRPMTGAIQDGVTRPMTAVRAAGFTKAALRGSAFDPLSQSRGPASPLEAKKKDSPEEKIKQLEKEVNELVEESCIANSCGDLKLALEKAKDAGRKERVLVRQREQVTTPENINLDLTYSVLFNLASQYSVNEMYAEALNTYQVIVKNKMFSNAGILKMNMGNIYLKQRNYSKAIKFYRMALDQVPSVNKQMRIKIMQNIGVTFIQAGQYSDAINSYEHIMSMAPNLKAGYNLTICYFAIGDREKMKKAFQKLITVPLEIDEDKYISPSDDPHTNLVTEAIKNDHLRQMERERKAMAEKYIMTSAKLIAPVIETSFAAGYDWCVEVVKASQYVELANDLEINKAVTYLRQKDYNQAVEILKVLEKKDSRVKSAAATNLSALYYMGKDFAQASSYADIAVNSDRYNPAALTNKGNTVFANGDYEKAAEFYKEALRNDSSCTEALYNIGLTYEKLNRLDEALDCFLKLHAILRNSAEVLYQIANIYELMENPSQAIEWLMQVVSVIPTDPQVLSKLGELYDREGDKSQAFQYYYESYRYFPCNIEVIEWLGAYYIDTQFWEKAIQYFERASLIQPTQVKWQLMVASCFRRSGNYQKALDTYKDTHRKFPENVECLRFLVRLCTDLGLKDAQEYARKLKRLEKMKEIREQRIKSGRDGSGGSRGKREGSASGDSGQNYSASSKGERLSARLRALPGTNEPYESSSNKEIDASYVDPLGPQIERPKTAAKKRIDEDDFADEELGDDLLPE

SEQ ID NO: 280263 - DNA, 2856 bp, Artificial Sequence
  derived and/or modified sequence
cgcaccacccccttcccgccgcgctctctcccgcccccgcgcttccggccccgcccgcccccgcgcggaggactgtgggagcggcttccttggattccgcgcttggcaacggctcggcgtcgcgctttggccaaccgctgcgtcgtccctgggcccgaataactgtcgcccgcttccctcagcgtgaggtacaaatgatgcaaaatgtgcacctggctccagagacagatgaagatgatctttattccggctataatgactacaatccaatctatgatatcgaggaattggagaatgatgcagcttttcagcaagctgtgaggactagtcatggcagaagacctccaataactgctaaaatatcaagcacggcagttactagacctatagctactggatatgggtccaagacatctctggcatcatcaataggaagaccaatgacaggggctattcaggatggagttactagacccatgacagcagtgagagcagctggttttaccaaagcagctttgagaggctctgcatttgacccccttagtcagtcaaggggccctgcttcccctttggaagccaagaaaaaagatagcccagaggaaaaaataaagcaattagagaaggaagtaaatgagttggtagaagaaagctgtattgccaatagttgtggagacttaaaattggccttagaaaaggcaaaagatgcaggaagaaaagagagagtcctggtgagacagcgagaacaagttacaactccagaaaatatcaatttggatttaacttactcagttcttttcaatttggccagtcagtattcagttaatgaaatgtatgccgaagcacttaacacttatcaagttatagtcaaaaataagatgtttagcaatgcaggaatattgaaaatgaatatgggaaatatctatttaaagcaaagaaattattccaaagccattaaattctaccgaatggcattagaccaagttccaagtgtcaataagcaaatgaggattaaaataatgcagaatattggagttacatttattcaggctggtcagtattcagatgctattaattcatatgagcacataatgagcatggcaccaaatctgaaggcaggctacaacctaactatctgttattttgctattggagaccgagaaaaaatgaagaaggcattccaaaaattgattactgttccattagaaattgatgaagataaatatatttcaccaagtgatgatcctcatactaacttagtaactgaagctataaaaaatgatcacctcaggcaaatggaacgtgaaaggaaagccatggcagaaaaatatattatgacatctgcaaaactcattgctcctgtaattgaaacatcttttgctgcaggttatgattggtgcgtggaagtggtgaaagcttctcaatatgtagagctagccaatgatctggaaataaacaaagcagttacatacttgagacaaaaagactataaccaagctgtagagatcttaaaagtgttggaaaaaaaggacagtagagtgaaaagtgcagctgcaaccaatctctcagccctgtattatatgggaaaggattttgcacaagccagcagctatgcagatatagctgtgaactctgatagatataatccagcagctcttactaataaagggaatacagtttttgcaaatggtgattatgagaaggccgctgaattctataaagaggctctaagaaatgattcttcttgtactgaagcactttataatattggccttacctatgagaaactaaatcggctagatgaggctttggactgtttcctgaaacttcacgcaatcctacgaaacagtgccgaagttctttaccagatagcaaatatatatgaattaatggaaaatcccagtcaagctattgaatggctaatgcaggtggtcagtgttattccaaccgatcctcaagttttatctaagctaggagaattatatgatcgtgaaggagataaatctcaagcatttcaatattactatgagtcatataggtattttccttgtaatattgaagtcattgagtggcttggagcctattacattgacacccaattttgggaaaaagctattcagtactttgaaagagcttctcttatacagcctacacaagtgaaatggcagctgatggtagctagttgtttcagaagaagtggtaactaccaaaaagcattagatacttacaaagatactcacagaaaatttccagaaaatgtcgaatgtctgcgtttcttagttcgtctctgcacagatcttggattaaaagatgctcaagaatatgccagaaaactgaagaggttggaaaaaatgaaagaaataagggaacagcgcataaagtcaggcagagatggcagtgggggctcccgtggcaaaagagaaggaagtgctagcggtgatagtggccagaactatagtgccagtagtaaaggtgaacgactaagtgccagactcagagctttacctgggacaaatgaaccttatgaaagtagcagtaacaaagaaatagatgcctcctatgtggacccacttggccctcaaatagaacgaccaaaaactgcagccaagaaaaggatcgatgaggatgattttgctgatgaagaattaggagatgatttgcttccagaataatattcactttaatatttattaaaggaaagaaattgccttatgagatcatcctcatgttaaaccttggattaaatatctaacctgtaattattttttttcactgtcaaaacttaagtaagtgtattctattctgtatgtatgcatttaagttgtttttttcttttaaggaataaaaacaggtaaaact

SEQ ID NO: 280264 - DNA, 1042 bp, Artificial Sequence
  derived and/or modified sequence
attccgcgcttggcaacggctcggcgtcgcgctttggccaaccgctgcgtcgtccctgggcccgaataactgtcgcccgcttccctcagcgtgaggtacaaatgatgcaaaatgtgcacctggctccagagacagatgaagatgatctttattccggctataatgactacaatccaatctatgatatcgaggaattggagaatgatgcagcttttcagcaagctgtgaggactagtcatggcagaagacctccaataactgctaaaatatcaagcacggcagttactagacctatagctactggatatgggtccaagacatctctggcatcatcaataggaagaccaatgacaggggctattcaggatggagttactagacccatgacagcagtgagagcagctggttttaccaaagcagctttgagagcccagaggaaaaaataaagcaattagagaaggaagtaaatgagttggtagaagaaagctgtattgccaatagttgtggagacttaaaattggccttagaaaaggcaaaagatgcaggaagaaaagagagagtcctggtgagacagcgagaacaagttacaactccagaaaatatcaatttggatttaacttactcagttcttttcaatttggccagtcagtattcagttaatgaaatgtatgccgaagcacttaacacttatcaagttatagtcaaaaataagatgtttagcaatgcaggattaaaataatgcagaatattggagttacatttattcaggctggtcagtattcagatgctattaattcatatgagcacataatgagcatggcaccaaatctgaaggcaggctacaacctaactatctgttattttgctattggagaccgagaaaaaatgaagaaggcattccaaaaattgattactgttccattagaaattgatgaagataaatatatttcaccaagtgatgatcctcatactaacttagtaactgaagctataaaaaatgatcacctcaggcaaatggaacgtgaaaggaaagccatggcag

SEQ ID NO: 280265 - protein, 795 aa, Artificial Sequence
  derived and/or modified sequence
MKFTNTKVQMMQNVHLAPETDEDDLYSGYNDYNPIYDIEELENDAAFQQAVRTSHGRRPPITAKISSTAVTRPIATGYGSKTSLASSIGRPMTGAIQDGVTRPMTAVRAAGFTKAALRGSAFDPLSQSRGPASPLEAKKKDSPEEKIKQLEKEVNELVEESCIANSCGDLKLALEKAKDAGRKERVLVRQREQVTTPENINLDLTYSVLFNLASQYSVNEMYAEALNTYQVIVKNKMFSNAGILKMNMGNIYLKQRNYSKAIKFYRMALDQVPSVNKQMRIKIMQNIGVTFIQAGQYSDAINSYEHIMSMAPNLKAGYNLTICYFAIGDREKMKKAFQKLITVPLEIDEDKYISPSDDPHTNLVTEAIKNDHLRQMERERKAMAEKYIMTSAKLIAPVIETSFAAGYDWCVEVVKASQYVELANDLEINKAVTYLRQKDYNQAVEILKVLEKKDSRVKSAAATNLSALYYMGKDFAQASSYADIAVNSDRYNPAALTNKGNTVFANGDYEKAAEFYKEALRNDSSCTEALYNIGLTYEKLNRLDEALDCFLKLHAILRNSAEVLYQIANIYELMENPSQAIEWLMQVVSVIPTDPQVLSKLGELYDREGDKSQAFQYYYESYRYFPCNIEVIEWLGAYYIDTQFWEKAIQYFERASLIQPTQVKWQLMVASCFRRSGNYQKALDTYKDTHRKFPENVECSGSVRTGHMERDPLNLLPRKSVLPGPEIAKCNYFSGEKYYLSAFLSSSLHRSWIKRCSRICQKTEEVGKNERNKGTAHKVRQRWQWGLPWQKRRKC

SEQ ID NO: 280266 - DNA, 2388 bp, Artificial Sequence
  derived and/or modified sequence
atgaagttcaccaacaccaaggtgcagatgatgcagaacgtgcacctggcccccgagaccgacgaggacgacctgtacagcggctacaacgactacaaccccatctacgacatcgaggagctggagaacgacgccgccttccagcaggccgtgagaaccagccacggcagaagaccccccatcaccgccaagatcagcagcaccgccgtgaccagacccatcgccaccggctacggcagcaagaccagcctggccagcagcatcggcagacccatgaccggcgccatccaggacggcgtgaccagacccatgaccgccgtgagagccgccggcttcaccaaggccgccctgagaggcagcgccttcgaccccctgagccagagcagaggccccgccagccccctggaggccaagaagaaggacagccccgaggagaagatcaagcagctggagaaggaggtgaacgagctggtggaggagagctgcatcgccaacagctgcggcgacctgaagctggccctggagaaggccaaggacgccggcagaaaggagagagtgctggtgagacagagagagcaggtgaccacccccgagaacatcaacctggacctgacctacagcgtgctgttcaacctggccagccagtacagcgtgaacgagatgtacgccgaggccctgaacacctaccaggtgatcgtgaagaacaagatgttcagcaacgccggcatcctgaagatgaacatgggcaacatctacctgaagcagagaaactacagcaaggccatcaagttctacagaatggccctggaccaggtgcccagcgtgaacaagcagatgagaatcaagatcatgcagaacatcggcgtgaccttcatccaggccggccagtacagcgacgccatcaacagctacgagcacatcatgagcatggcccccaacctgaaggccggctacaacctgaccatctgctacttcgccatcggcgacagagagaagatgaagaaggccttccagaagctgatcaccgtgcccctggagatcgacgaggacaagtacatcagccccagcgacgacccccacaccaacctggtgaccgaggccatcaagaacgaccacctgagacagatggagagagagagaaaggccatggccgagaagtacatcatgaccagcgccaagctgatcgcccccgtgatcgagaccagcttcgccgccggctacgactggtgcgtggaggtggtgaaggccagccagtacgtggagctggccaacgacctggagatcaacaaggccgtgacctacctgagacagaaggactacaaccaggccgtggagatcctgaaggtgctggagaagaaggacagcagagtgaagagcgccgccgccaccaacctgagcgccctgtactacatgggcaaggacttcgcccaggccagcagctacgccgacatcgccgtgaacagcgacagatacaaccccgccgccctgaccaacaagggcaacaccgtgttcgccaacggcgactacgagaaggccgccgagttctacaaggaggccctgagaaacgacagcagctgcaccgaggccctgtacaacatcggcctgacctacgagaagctgaacagactggacgaggccctggactgcttcctgaagctgcacgccatcctgagaaacagcgccgaggtgctgtaccagatcgccaacatctacgagctgatggagaaccccagccaggccatcgagtggctgatgcaggtggtgagcgtgatccccaccgacccccaggtgctgagcaagctgggcgagctgtacgacagagagggcgacaagagccaggccttccagtactactacgagagctacagatacttcccctgcaacatcgaggtgatcgagtggctgggcgcctactacatcgacacccagttctgggagaaggccatccagtacttcgagagagccagcctgatccagcccacccaggtgaagtggcagctgatggtggccagctgcttcagaagaagcggcaactaccagaaggccctggacacctacaaggacacccacagaaagttccccgagaacgtggagtgcagcggcagcgtgagaaccggccacatggagagagaccccctgaacctgctgcccagaaagagcgtgctgcccggccccgagatcgccaagtgcaactacttcagcggcgagaagtactacctgagcgccttcctgagcagcagcctgcacagaagctggatcaagagatgcagcagaatctgccagaagaccgaggaggtgggcaagaacgagagaaacaagggcaccgcccacaaggtgagacagagatggcagtggggcctgccctggcagaagagaagaaagtgctag

SEQ ID NO: 280267 - DNA, 2388 bp, Artificial Sequence
  derived and/or modified sequence
atgaaattcaccaacactaaggtgcagatgatgcagaacgtgcatctggcccccgaaaccgacgaagatgatctgtattcgggttacaacgattataaccctatctacgacatagaagagctggagaacgacgccgcctttcagcaagccgtcagaacctcccatgggagaagaccccccattactgccaagatatccagcactgctgttactagacccattgcgacaggatacggcagcaagacctcactggcttcttccatcggtaggcctatgacgggagccattcaggacggcgtgacacgacctatgaccgccgttcgtgctgccggctttactaaagcagccctcaggggctcggctttcgatcccctgagccaatctagagggcctgcctcaccgctggaagccaagaaaaaggacagtccagaagagaagattaagcagttggaaaaagaagtcaatgagctcgtggaggaatcctgtattgccaacagctgcggtgatctcaagctggccctggaaaaggccaaggacgccgggcggaaagaacgagtcttagtacggcagcgtgagcaggttaccacgcccgagaatataaacctagacctcacttactcagtcctgtttaatctggcatctcagtatagcgtgaatgagatgtatgcagaggctttaaacacgtatcaggttatagtgaaaaacaagatgttctccaacgctggtatcctcaagatgaatatgggcaatatttatctgaagcagagaaactactcaaaggccattaagttctaccgaatggctctagaccaagtccccagcgtaaacaagcagatgcgtattaaaattatgcagaacattggagttacctttatacaggcgggccagtacagtgatgcaattaactcctatgagcacatcatgtcaatggctcccaacctgaaagccgggtacaacctcaccatttgttatttcgcgataggagaccgggagaagatgaagaaagccttccaaaaattgatcaccgtgcctctcgagatcgatgaagacaagtatattagtccttcagatgacccgcataccaatttagtgaccgaggccatcaaaaatgatcatcttcgccagatggagcgggagcggaaagctatggctgaaaagtatataatgacttccgccaagctgatcgctcctgttattgagacctccttcgccgccggctatgattggtgcgtggaggtggtaaaggcctctcaatatgttgaactggctaacgacttggaaattaacaaggctgtgacctatctgcgccaaaaggactacaatcaggcggtagaaatcctgaaggtgttggagaaaaaggactctcgggtcaagtcagcggcagcgaccaacctctccgcactctattacatggggaaagattttgcacaggcatcttcatacgccgacatagcagtgaatagcgaccgttacaatccagctgcattgactaataaggggaacaccgtgttcgcgaacggggactacgagaaagccgctgagttctacaaggaagcactgaggaatgattccagttgtacagaggccttgtacaatattgggctaacatatgagaaattgaataggttagatgaagccctggactgctttctcaagctgcacgcgatcttgagaaactcagccgaagtgttgtatcagattgccaacatttacgagctgatggaaaatccctcccaggctattgagtggcttatgcaagttgtgagtgttattccaacggacccacaggtgcttagcaagctaggggaattgtatgatagggagggtgacaaatctcaggcattccagtactattacgagagctacagatacttcccttgcaatatagaagtgatcgagtggctcggggcttactacatcgatacacaattctgggagaaggccattcagtatttcgaacgagctagtttaatacagcccacgcaggtgaagtggcagctgatggttgctagctgcttccgacggtccggtaactaccaaaaagcccttgatacttacaaagacacccatagaaagttcccggagaatgttgaatgtagcggaagcgtcaggacaggacacatggagagagatcccctcaatcttctgccccgcaagagcgtccttccagggcctgagatcgcaaagtgcaattacttctccggcgaaaaatactacttatctgcatttctgtcctcatctttgcaccggtcttggataaagcggtgttcgcgcatctgtcagaagaccgaggaggtaggcaaaaatgagagaaataaagggactgcacataaggtgcggcagcggtggcagtgggggcttccttggcagaagcgtcgaaaatgttag

SEQ ID NO: 280268 - DNA, 2388 bp, Artificial Sequence
  derived and/or modified sequence
atgaagttcaccaacaccaaggtgcagatgatgcagaatgtgcacctggcccctgagacagatgaagatgacctgtacagcggctacaatgactacaaccccatctatgacatcgaggagctggagaatgatgctgccttccagcaggccgtgaggaccagccatggaagaagaccacccatcacagccaagatcagcagcacagctgtgacccggcccatcgccaccggctacggcagcaagaccagcctggccagcagcatcggccggcccatgactggagccatccaggatggagtgacccggcccatgacagctgtgcgggccgccggcttcaccaaggccgccctgcggggcagcgcctttgaccccctgagccagagccggggccctgccagccccctggaggccaagaagaaggacagccctgaggagaagatcaagcagctggagaaggaggtgaatgagctggtggaggagagctgcatcgccaacagctgtggggacctgaagctggccctggagaaggccaaggatgctggcaggaaggagcgggtgctggtgcggcagcgggagcaggtgaccaccccagagaacatcaacctggacctgacctacagcgtgctcttcaacctggccagccagtacagcgtgaatgagatgtatgcagaggccctgaacacctaccaggtgattgtgaagaacaagatgttcagcaatgccggcatcctgaagatgaacatgggcaacatctacctgaagcagaggaactacagcaaggccatcaagttctacaggatggccctggaccaggtgcccagcgtgaacaagcagatgaggatcaagatcatgcagaacattggagtgaccttcatccaggccggccagtacagtgatgccatcaacagctatgagcacatcatgtccatggcccccaacctgaaggccggctacaacctgaccatctgctactttgccatcggggaccgggagaagatgaagaaggccttccagaagctgatcaccgtgcccctggagattgatgaggacaagtacatcagccccagtgatgacccccacaccaacctggtgacagaggccatcaagaatgaccacctgcggcagatggagcgggagaggaaggccatggccgagaagtacatcatgaccagcgccaagctgattgcccctgtgattgagaccagctttgctgctggctatgactggtgtgtggaggtggtgaaggccagccagtatgtggagctggccaatgacctggagatcaacaaggctgtgacctacctgcggcagaaggactacaaccaggccgtggagatcctgaaggtgctggagaagaaggacagccgggtgaagtctgctgctgccaccaacctgagcgccctgtactacatgggcaaggactttgcccaggccagcagctatgctgacattgctgtgaacagcgaccgctacaacccagctgccctgaccaacaagggcaacacagtgtttgccaacggggactatgagaaggctgctgagttctacaaggaggccctgagaaatgacagcagctgcacagaggccctgtacaacatcggcctgacctatgagaagctgaaccggctggatgaggccctggactgcttcctgaagctgcacgccatcctgaggaacagcgctgaggtgctgtaccagatcgccaacatctatgagctgatggagaaccccagccaggccatcgagtggctgatgcaggtggtgtctgtcatccccacagacccccaggtgctgagcaagctgggggagctgtatgaccgggagggggacaagagccaggccttccagtactactatgagagctaccgctacttcccctgcaacattgaagtcatcgagtggctgggcgcctactacatcgacacccagttctgggagaaggccatccagtactttgagcgggccagcctcatccagcccacccaggtgaagtggcagctgatggtggccagctgcttccgccgcagcggcaactaccagaaggccctggacacctacaaggacacccacaggaagttcccagaaaatgtggagtgcagcggctctgtgaggacaggccacatggagcgggaccccctgaacctgctgcccaggaagtctgtgctgcccggccctgagatcgccaagtgcaactacttcagcggggagaagtactacctgagcgccttcctgagcagcagcctgcaccgctcctggatcaagcgctgcagccgcatctgccagaagacagaggaggtgggcaagaatgaaagaaataaaggaacagcccacaaggtgcggcagcgctggcagtggggcctgccctggcagaagaggaggaagtgctag

SEQ ID NO: 280269 - DNA, 3931 bp, Artificial Sequence
  derived and/or modified sequence
aaataaaacggacaccttaagcgctacaatcaaggtgcgcacggggtgctacagaacaatacgcagacaggaggaggtggggggaaaggtgagacttcccaggcaggtgtcatcccagaataacttttacacagggtgactaagcgagttagtgactgcgcggaaaacgggcttccaaggttcacaaggctcgtgctgcggctccgggagttatgtcacagtaagcttactatcatcctttgggcatctgctttacggatgagttcatcaggatttaaaggatcttggttccatatccttccccttcctcacagaggccgccagcccggagcccctctaggccctcctccctcctgcatctactggccgcgagcctttccctccccgcccccttcacacaggccgcccccagcctcccaaccccccggttccgttccacgggaggccccggcctccctgccctctcctccaccgttctacccgcatcgcccggcttcccgcaagccgctggcaccgtcccctcaacaccctccgcccaccgccactcccttccactgagggggaccgggctgccttctctctgacccgccgttctccgcccccacccacttccccaggcctcccgcaccacccccttcccgccgcgctctctcccgcccccgcgcttccggccccgcccgcccccgcgcggaggactgtgggagcggcttccttggattccgcgcttggcaacggctcggcgtcgcgctttggccaaccgctgcgtcgtccctgggcccgaataactgtcgcccgcttccctcagcgtgaggtgaagcacttcaaattgcctgatgaaagttgaatcaggaatgaagataaaagtacacaacaatgcagaaagcggtacttagcctcacaaagatggaaacattccaaaaacgtgaagtactgttgtcccaagattctttctaagcctaaaattacacttttactagtccgattttctggttgtgagttttttttgtttgttttttttttttcgagaaactgcagtaggcttcttggaagtagaccaagggtgtccaatctttggcttccctgggccacatcggaagaagaattgtcttgggccacacatgaaattcacaaacactaaggtacaaatgatgcaaaatgtgcacctggctccagagacagatgaagatgatctttattccggctataatgactacaatccaatctatgatatcgaggaattggagaatgatgcagcttttcagcaagctgtgaggactagtcatggcagaagacctccaataactgctaaaatatcaagcacggcagttactagacctatagctactggatatgggtccaagacatctctggcatcatcaataggaagaccaatgacaggggctattcaggatggagttactagacccatgacagcagtgagagcagctggttttaccaaagcagctttgagaggctctgcatttgacccccttagtcagtcaaggggccctgcttcccctttggaagccaagaaaaaagatagcccagaggaaaaaataaagcaattagagaaggaagtaaatgagttggtagaagaaagctgtattgccaatagttgtggagacttaaaattggccttagaaaaggcaaaagatgcaggaagaaaagagagagtcctggtgagacagcgagaacaagttacaactccagaaaatatcaatttggatttaacttactcagttcttttcaatttggccagtcagtattcagttaatgaaatgtatgccgaagcacttaacacttatcaagttatagtcaaaaataagatgtttagcaatgcaggaatattgaaaatgaatatgggaaatatctatttaaagcaaagaaattattccaaagccattaaattctaccgaatggcattagaccaagttccaagtgtcaataagcaaatgaggattaaaataatgcagaatattggagttacatttattcaggctggtcagtattcagatgctattaattcatatgagcacataatgagcatggcaccaaatctgaaggcaggctacaacctaactatctgttattttgctattggagaccgagaaaaaatgaagaaggcattccaaaaattgattactgttccattagaaattgatgaagataaatatatttcaccaagtgatgatcctcatactaacttagtaactgaagctataaaaaatgatcacctcaggcaaatggaacgtgaaaggaaagccatggcagaaaaatatattatgacatctgcaaaactcattgctcctgtaattgaaacatcttttgctgcaggttatgattggtgcgtggaagtggtgaaagcttctcaatatgtagagctagccaatgatctggaaataaacaaagcagttacatacttgagacaaaaagactataaccaagctgtagagatcttaaaagtgttggaaaaaaaggacagtagagtgaaaagtgcagctgcaaccaatctctcagccctgtattatatgggaaaggattttgcacaagccagcagctatgcagatatagctgtgaactctgatagatataatccagcagctcttactaataaagggaatacagtttttgcaaatggtgattatgagaaggccgctgaattctataaagaggctctaagaaatgattcttcttgtactgaagcactttataatattggccttacctatgagaaactaaatcggctagatgaggctttggactgtttcctgaaacttcacgcaatcctacgaaacagtgccgaagttctttaccagatagcaaatatatatgaattaatggaaaatcccagtcaagctattgaatggctaatgcaggtggtcagtgttattccaaccgatcctcaagttttatctaagctaggagaattatatgatcgtgaaggagataaatctcaagcatttcaatattactatgagtcatataggtattttccttgtaatattgaagtcattgagtggcttggagcctattacattgacacccaattttgggaaaaagctattcagtactttgaaagagcttctcttatacagcctacacaagtgaaatggcagctgatggtagctagttgtttcagaagaagtggtaactaccaaaaagcattagatacttacaaagatactcacagaaaatttccagaaaatgtcgaatgttctggcagcgtgaggacaggacacatggagagagaccctttaaacctccttccaaggaagtcagttctccctggtccagagattgcaaagtgtaattatttttcaggagaaaaatactatttgtctgcgtttcttagttcgtctctgcacagatcttggattaaaagatgctcaagaatatgccagaaaactgaagaggttggaaaaaatgaaagaaataagggaacagcgcataaagtcaggcagagatggcagtgggggctcccgtggcaaaagagaaggaagtgctagcggtgatagtggccagaactatagtgccagtagtaaaggtgaacgactaagtgccagactcagagctttacctgggacaaatgaaccttatgaaagtagcagtaacaaagaaatagatgcctcctatgtggacccacttggccctcaaatagaacgaccaaaaactgcagccaagaaaaggatcgatgaggatgattttgctgatgaagaattaggagatgatttgcttccagaataatattcactttaatatttattaaaggaaagaaattgccttatgagatcatcctcatgttaaaccttggattaaatatctaacctgtaattattttttttcactgtcaaaacttaagtaagtgtattctattctgtatgtatgcatttaagttgtttttttcttttaaggaataaaaacaggtaaaact

SEQ ID NO: 280270 - DNA, 2388 bp, Artificial Sequence
  derived and/or modified sequence
atgaagttcaccaacaccaaggtgcagatgatgcagaacgtgcacctggcgcctgagactgatgaggatgacctgtactcaggctacaacgattacaaccctatatatgatatagaggagcttgagaatgacgctgcctttcagcaggcggtaaggacatcccatggtagaagaccccccatcacagctaagatcagctccaccgctgtgacccggcctatcgctaccggctacgggagcaaaacttccttggcatccagcatcggtaggccaatgactggcgcgatccaggacggcgttacacgtcctatgaccgccgtgagggcagctggttttacaaaagccgccctcagaggatcagccttcgatcccttatcgcagagccggggcccagcttcccctttagaagccaaaaaaaaagactctcccgaggagaagatcaagcagttggaaaaggaggtcaacgaactggttgaggagtcttgcatcgcaaactcctgtggtgatctgaagctggcgctggaaaaagccaaagacgctggtagaaaagagagggtcctggtgaggcagagagaacaggtcaccacaccagaaaatatcaacctagacctgacatactccgtgctcttcaacctggcctctcaatacagcgtgaacgagatgtacgctgaggccttgaacacctaccaggtgatcgttaagaacaagatgtttagtaacgcgggcatattgaaaatgaacatgggtaacatttacctgaagcagagaaactacagtaaagccattaaattttatagaatggcgcttgatcaagtcccttctgttaacaagcaaatgcggatcaaaatcatgcaaaatatcggtgtaactttcatccaagccggtcagtattcggacgcaataaattcatacgaacacattatgtccatggcaccaaacttaaaagctggttataacctaaccatctgctacttcgcgataggcgatcgcgagaagatgaagaaggcgttccagaaacttatcaccgtccctttagagatagatgaggacaaatatatatcccccagcgatgatccgcacacgaatctggttacagaggccatcaagaacgatcatcttcggcagatggagcgagaacgtaaggccatggcagagaaatatatcatgacttctgctaaactgattgcacctgtgattgagacatccttcgcggctggctacgactggtgtgtggaggtcgtcaaggctagccaatacgtagagctggctaacgaccttgagatcaataaggcagttacatacctgcggcaaaaagactacaatcaggctgtcgaaattctcaaggtgctagagaagaaagattcccgtgttaaatctgccgccgcaaccaatctgtctgcgttatactatatgggcaaagatttcgcgcaggcatcctcctatgctgacatcgccgtgaactctgaccgctataatccagctgccctgaccaacaaggggaataccgtgtttgccaatggcgactacgaaaaagccgccgagttttacaaagaggctctgaggaacgacagtagctgcaccgaagccctgtataacattggcctgacgtatgaaaaactgaatagactcgacgaagcacttgactgttttttgaaactgcatgccatcctgcgtaattctgccgaagttctctaccaaatcgcaaatatctacgaacttatggaaaatccatcccaagccattgagtggctgatgcaggtagtgtctgtaatcccaactgatcctcaggttttatctaagctcggggagttatacgaccgcgagggcgacaagagtcaagccttccaatattactatgagtcctacagatacttcccatgcaacatcgaggtcattgagtggctgggcgcgtactacattgacacccagttttgggagaaggctattcagtactttgagagggcctccttgatacagcctacacaggtcaagtggcagctgatggtagcctcgtgcttcaggaggtctggcaattatcagaaggcactggacacctataaggatactcaccgaaagttccccgaaaatgttgagtgcagcgggagcgtccgcactgggcatatggagcgcgacccactgaacctcttgccaaggaaatcggttcttccagggcccgagatcgccaagtgtaactacttctctggtgagaaatactacctcagcgcatttctcagtagttctctgcaccgttcgtggattaaacggtgttcccgaatctgccaaaagaccgaagaagtgggcaagaatgagcgcaataagggcaccgcccacaaggtgcggcagaggtggcagtggggcctgccctggcagaagagaaggaagtgttag

SEQ ID NO: 280271 - DNA, 2388 bp, Artificial Sequence
  derived and/or modified sequence
atgaagtttacaaataccaaggtgcaaatgatgcaaaacgtccatctcgccccagaaacagacgaagacgacttgtatagcggctacaatgattataatcccatctacgacattgaagaattggaaaatgatgccgcatttcagcaagctgtgcggactagtcacgggcgaagaccgcctattacagcgaagattagtagcaccgccgttacccggcctattgccacgggctacgggtctaagacatccctggcgtcctctattgggagacctatgaccggtgcgatccaggatggggtcaccaggcccatgactgccgtgcgggcagctggcttcaccaaggctgctctcagaggctcagccttcgaccccttgagtcagagcagaggtcctgcctccccactggaggcaaaaaagaaggattcacctgaagagaaaattaaacagctcgaaaaagaggtaaatgagctagttgaagaaagttgtatagctaattcatgtggtgatctcaagctggccttggaaaaagctaaagacgccggtcgcaaggagagagtgctagtgaggcaacgtgaacaagttactacacctgagaacattaaccttgatctcacctacagtgtgttgtttaatctggcttcgcagtatagtgtgaatgagatgtacgctgaggcattgaacacctatcaggttattgtcaagaacaagatgttctcaaacgcagggatcttgaagatgaatatgggaaatatttatctgaagcagcggaactactcgaaagctataaagttttatagaatggctctggatcaggtcccatcagtcaataaacagatgcgtatcaaaattatgcagaatatcggggtaactttcatccaggctgggcagtattcagacgcaattaactcctatgagcacatcatgagcatggccccaaacctgaaggctggatacaacctgaccatctgttattttgccattggagatcgggaaaagatgaagaaggccttccagaaactgattacagtgccattggaaattgatgaggacaaatacatcagcccttcagatgatcctcataccaaccttgtgactgaagccataaagaatgatcacctgcgacagatggaaagagaaagaaaggctatggccgaaaaatacatcatgacaagcgcgaagctgatcgcgcctgtcattgagacctcatttgcagctggatacgactggtgtgtggaggttgtcaaggcctcacagtacgtggaattggccaatgacctggagatcaataaagccgttacctatctcaggcagaaagattacaaccaggccgttgagattctcaaggtcctggagaaaaaagactcaagggtgaaatccgccgctgccaccaatcttagcgcactatactacatgggcaaggatttcgctcaggcctctagctatgcggacattgccgtcaattctgataggtacaatccggcagctttgaccaacaaagggaacacggtgttcgcaaacggagactatgagaaagcagcggaattttataaggaggctttgcgcaacgacagctcctgcaccgaggccctgtacaacatagggctgacctacgaaaagctaaaccgcttggacgaagccctggattgctttctgaagctgcacgccatccttcgcaattccgccgaagtcctgtatcagatcgcaaacatctatgagctgatggaaaatcctagtcaagcaattgagtggctcatgcaggtagtctcggtgatccctactgatcctcaggtcctcagtaaactgggcgagctatacgacagagagggcgacaaatcacaagcattccagtattactatgaatcatatcggtactttccatgtaacattgaagtcatagaatggctgggggcatactacatagatacgcaattttgggaaaaagctatccaatactttgaacgcgcttctctcatccaacccactcaggtcaagtggcagctgatggtggccagctgtttcagaaggtctggtaactatcaaaaggctctggatacatacaaggacacacacagaaagttcccggagaacgtcgagtgctcgggcagcgtaaggacgggtcacatggaaagggatcctctgaacctcctccctcgtaagtcagtcctccctggccctgaaatcgccaaatgcaactatttctccggcgagaagtattaccttagcgcctttttgagcagctccctccacaggagctggattaagaggtgtagccggatctgccagaagacggaggaagtggggaagaacgaaaggaacaaaggaaccgctcacaaagtgcgtcagcgatggcagtggggcctgccatggcagaagcgtaggaagtgttag

SEQ ID NO: 280272 - DNA, 3114 bp, Artificial Sequence
  derived and/or modified sequence
ggaatcccatcttgagactcgctaagcgtcccagccgcatccctcccgcagcgacggcggcccgggacccgcgggctgtgaaccatgaacacccgcaatagagtggtgaactccgggctcggcgcctcccctgcctcccgcccgacccgggatccccaggacccttctgggcggcaaggggagctgagccccgtggaagaccagagagagggtttggaggcagcccctaagggcccttcgcgggagagcgtcgtgcacgcgggccagaggcgcacaagtgcatacaccttgatagcaccaaatataaaccggagaaatgagatacaaagaattgcggagcaggagctggccaacctggagaagtggaaggagcagaacagagctaaaccggttcacctggtgcccagacggctaggtggaagccagtcagaaactgaagtcagacagaaacaacaactccagctgatgcaatctaaatacaagcaaaagctaaaaagagaagaatctgtaagaatcaagaaggaagctgaagaagctgaactccaaaaaatgaaggcaattcagagagagaagagcaataaactggaggagaaaaaaagacttcaagaaaaccttagaagagaagcatttagagagcatcagcaatacaaaaccgctgagttcttgagcaaactgaacacagaatcgccagacagaagtgcctgtcaaagtgctgtttgtggcccacaatcctcaacatgggccagaagctgggcttacagagattctctaaaggcagaagaaaacagaaaattgcaaaagatgaaggatgaacaacatcaaaagagtgaattactggaactgaaacggcagcagcaagagcaagaaagagccaaaatccaccagactgaacacaggagggtaaataatgcttttctggaccgactccaaggcaaaagtcaaccaggtggcctcgagcaatctggaggctgttggaatatgaatagcggtaacagctggggtatatgagaaaatattgactcctatctggccttcatcaactgacctcgaaaagcctcatgagatgctttttcttaatgtgattttgttcagcctcactgtttttaccttaatttcaactgcccacacacttgaccgtgcagtcaggagtgactggcttctccttgtcctcatttatgcatgtttggaggagctgattcctgaactcatatttaatctctactgccagggaaatgctacattatttttctaattggaagtataattagagtgatgttggtagggtagaaaaagagggagtcacttgatgctttcaggttaatcagagctatgggtgctacaggcttgtctttctaagtgacatattcttatctaattctcagatcaggttttgaaagctttgggggtctttttagattttaatccctactttctttatggtacaaatatgtacaaaagaaaaaggtcttatattcttttacacaaatttataaataaattttgaactccttctgtataaatgggtcatttttatttttaatgaaaagttattggggttttctctcttgaagggtctcattttaattcccttttccaggccgtatagatcaaatatagtactgtcattactgttggctcttgttttggtcttgacttactaatagtgttaccctgattttcagagggggacagtttatctccagaaaggccaatgtttgtatacacatcagctagacacaaatatagacatcatatgtagtttgtacatgtttcagaaacttgttttttctttgctctgtgtaacctatttcctattgctagttcagttggctttcttattcacttctgtgaccctgaaccagttctcagaccctagagtgtaagagcattgattttctacgctgtgtaatctagctcaatccctctgtcccctccgcctcaccgtcccccagccaccacattgtatagcaaaagcattacattcaatcctagaataaaggtaaatacaacaaatcatctttgcagctggacaactaataatactttgcagcattaagagatcttctgtgttaccagtcactctgttgaaatgaactttccgaatctctttattcaggaaaacatggggttttgaaattcttgggccaagagacataactgaggggttcgcagagctaggcaagggtgcactaggaaagggccacattggtgggtggggggtaacagagaacagatggtgtcaggaagtttctctggagtaaataatgtggatattcttggtttccctctcctccgccagctgaagctgtgttagtgctgttgacactaatataaaatgtttggtccatttgaaatccttgtcattgccttatatgggggaaactcaatcccccagcctgtgttggaaatatcaccaaactgattgtaaatgtgcggctgtagcagacattttagtgtggtggtgtgcagccatttcggccctacacctgccagcctggctaccttacagttgtgttccgatttttgcgtctatgcttggtgtgcctcacttgctgcattttccagcatgcaaccaggagttgacgtaggaaaaagggatgctttcttactttggaagctctcagggaagttggtgtcaatttctcctccactgcctggcctaccctgcactcccaaagattttgtgcagatgggtagttccattttttaaaaattgtgcagatatggaaaattgtgacttacttcatgaccagaactatctagaatatgtgtgggggtataaacatcttgcttaaccaaatatctatgtaggcagaggtaaccaggagagaagcaagacttgctgcctaaaggagcccaccattttacttttcacatttaatctgccacgttgaatcaattggaataaaacctgactcgcaggtgactggacaggaaatcccaaagttccaccatttctatgcttaattttaatgtccccccgcttttttttttgtagaaaataaaaacaagaaaatcgttccaatgtaagatgtttgttatagaaactttaggcaatacaggtgtgtaataaaatgtttaataaacttctaaacacttttgtatttggattta

SEQ ID NO: 280273 - DNA, 255 bp, Artificial Sequence
  derived and/or modified sequence
atgaagagagagcccaagaacctgagcagcgagcaggtgctgaagcccacctacagccagagcaagcccaacagaatcagactgtactactggggcctgggcctgaacctgagagccgccgccagcgaggccaacagaatggagagcaagaaggtgggcaagagactgggcgccggcaagcagcagatgggcgccgagctgaccgagcagcacatggccagaatcagcctgcccgccaagatcctgggctactag

SEQ ID NO: 280274 - DNA, 690 bp, Artificial Sequence
  derived and/or modified sequence
atggctgctgcccccgacgtgggaaacggcggaagcaagaacgtgcgcaagccgcgacctggcaaatgccagcctaagagcagacactcgctgcctcagacgcagaaacccgaagaagtcagaaagtgtggcggcatatgtcttcctgtgtgtttacaggatccgggggcgtgccctagttggctccccctggaagagggcctgcggcgtcccgcctttggacaccgcactgaagctggtccccggggaaagggctttgggagacaccgcggaaactcaggcctccgggcggcagaggtcactcacggcccttgctgggaggccgccgacgttccctgcctccgtcttactaagccacatggtcttagagtgacagccggatgttccgaatggcgacggaatgtggtcgcacgacaggtgccggaagccagtgctgaactgtgcagtcgcaatcaaccatgggcagcagccactcccggatccctccacccttccccccagccaggagtgttagaggggacccctactaacctgaaccggacactccccagtggcatccgaggaagccaacctttgcctcagggccagcctccactgcccggcagatccagctgggagacaaagactcgggaacctatacctccccccgtcaggctcgaagccagagaagtgggcggtgtgagcctgtag

SEQ ID NO: 280275 - DNA, 1389 bp, Artificial Sequence
  derived and/or modified sequence
atgaacaagagccccagcgccatgcagcagcaggacggcctggacagaaacgagctgctgcccctgagccccctgagccccaccatggaggaggagcccctggtggtgttcctgagcggcgaggacgaccccgagaagatcgaggagagaaagaagagcaaggagctgagaagcctgtggagaaaggccatccaccagcagatcctgctgctgagaatggagaaggagaaccagaagctggagggcgtgcccaagagcagaagaggcgagatctggcagttcctggccctgcagtacagactgagacacagactgcccaacaagcagcagccccccgacatcagctacaaggagctgctgaagcagctgaccgcccagcagcacgccatcctggtggacctgggcagaaccttccccacccacccctacttcagcgtgcagctgggccccggccagctgagcctgttcaacctgctgaaggcctacagcctgctggacaaggaggtgggctactgccagggcatcagcttcgtggccggcgtgctgctgctgcacatgagcgaggagcaggccttcgagatgctgaagttcctgatgtacgacctgggcttcagaaagcagtacagacccgacatgatgagcctgcagatccagatgtaccagctgagcagactgctgcacgactaccacagagacctgtacaaccacctggaggagaacgagatcagccccagcctgtacgccgccccctggttcctgaccctgttcgccagccagttcagcctgggcttcgtggccagagtgttcgacatcatcttcctgcagggcaccgaggtgatcttcaaggtggccctgagcctgctgagcagccaggagaccctgatcatggagtgcgagagcttcgagaacatcgtggagttcctgaagaacaccctgcccgacatgaacaccagcgagatggagaagatcatcacccaggtgttcgagatggacatcagcaagcagctgcacgcctacgaggtggagtaccacgtgctgcaggacgagctgcaggagagcagctacagctgcgaggacagcgagaccctggagaagctggagagagccaacagccagctgaagagacagaacatggacctgctggagaagctgcaggtggcccacaccaagatccaggccctggagagcaacctggagaacctgctgaccagagagaccaagatgaagagcctgatcagaaccctggagcaggagaagatggcctaccagaagaccgtggagcagctgagaaagctgctgcccgccgacgccctggtgaactgcgacctgctgctgagagacctgaactgcaaccccaacaacaaggccaagatcggcaacaagccctag

SEQ ID NO: 280276 - DNA, 1389 bp, Artificial Sequence
  derived and/or modified sequence
atgaataagagtccctctgccatgcagcagcaggatggcttggatcgtaatgaactcctgcctctctcacctctcagccctaccatggaggaagaaccactggtggtgttcttgagcggtgaggatgatcctgagaaaattgaagagcgaaaaaagtcaaaagaactccggtcactttggcgcaaagctattcaccagcagatcctccttcttcgcatggaaaaagagaaccaaaaactggagggcgtacccaaatcccgccgaggggaaatatggcaatttctagcattgcagtacaggttgcgccaccgattgcctaataagcagcagccaccggatataagctacaaggagctcctcaagcaactcacagcgcagcagcatgccatcctggtggatctcggacgcacatttcctactcacccctacttttcggtgcaactcggtcccgggcagttgtccctgtttaacctcttgaaggcttacagcctgttggacaaggaagtcggttattgccagggcatatcattcgtcgccggcgtactcctgttgcacatgtccgaggagcaagctttcgagatgttgaaattcctgatgtacgatcttggcttcagaaaacaataccgccctgatatgatgagcctgcagatccaaatgtaccagctcagtagactcctacacgattaccacagagacctgtacaaccatcttgaggaaaacgagattagtccctctctttatgccgcgccttggttccttacactgttcgcctcccagttcagtctcggctttgtcgcccgggtgtttgacattatctttctgcagggcacggaggtgatattcaaagttgccttaagtctgctctcctcacaggaaaccctcattatggaatgcgagagcttcgagaacatcgtggaattcctgaaaaatactctccccgacatgaatacttccgaaatggagaagattatcacccaggtgttcgagatggacatttccaagcaattgcacgcctacgaagtggagtatcatgtgttgcaggacgagctgcaggagagcagctattcttgcgaagatagcgaaaccttggagaagcttgagagagccaactcccagctcaaaagacagaacatggatctcctggaaaaactccaggtggcccacacaaagattcaggctctggagagcaacttagaaaatctgcttacgcgggagactaaaatgaagagcctcatacggacgctggagcaggaaaagatggcgtaccagaagactgttgaacagttaagaaagttgctccccgcagacgcgctcgtaaattgtgacttgctcctcagagatttgaactgtaatccgaataacaaggccaaaattggaaataagccatag

SEQ ID NO: 280277 - DNA, 1389 bp, Artificial Sequence
  derived and/or modified sequence
atgaacaagagccccagcgccatgcagcagcaggacggcctggacagaaatgagctgctgcccctgagccccctgagccccaccatggaggaggagcccctggtggtgttcctgtctggagaagatgatcctgagaagattgaggagaggaagaagagcaaggagctgcggagcctgtggaggaaggccatccaccagcagatcctgctgctgaggatggagaaggagaaccagaagctggagggcgtgcccaagagcagaagaggagagatctggcagttcctggccctgcagtaccgcctgcggcaccggctgcccaacaagcagcagcccccagacatctcctacaaggagctgctgaagcagctgacagcccagcagcacgccatcctggtggacctgggccgcaccttccccacccacccctacttctctgtgcagctgggccctggccagctgagcctcttcaacctgctgaaggcctacagcctgctggacaaggaggtgggctactgccagggcatcagctttgtggccggcgtgctgctgctgcacatgtctgaggagcaggcctttgagatgctgaagttcctgatgtatgacctgggcttcaggaagcagtacagaccagacatgatgagcctgcagatccagatgtaccagctgagccggctgctgcatgactaccaccgggacctgtacaaccacctggaggagaatgagatcagccccagcctgtatgctgccccctggttcctgaccctgtttgccagccagttcagcctgggctttgtggcccgggtgtttgacatcatcttcctgcagggcacagaggtgatcttcaaggtggccctgagcctgctgagcagccaggagaccctcatcatggagtgtgagagctttgagaacatcgtggagttcctgaagaacaccctgcctgacatgaacaccagcgagatggagaagatcatcacccaggtgtttgagatggacatcagcaagcagctgcacgcctatgaggtggagtaccacgtgctgcaggatgagctgcaggagagcagctacagctgtgaggacagcgagaccctggagaagctggagcgggccaacagccagctgaagaggcagaacatggacctgctggagaagctgcaggtggcccacaccaagatccaggccctggagagcaacctggagaacctgctgacccgggagaccaagatgaagagcctcatccgcaccctggagcaggagaagatggcctaccagaagacagtggagcagctgaggaagctgctgcctgcagatgccctggtgaactgtgacctgctgctgcgggacctgaactgcaaccccaacaacaaggccaagattggcaacaagccctag

SEQ ID NO: 280278 - DNA, 1389 bp, Artificial Sequence
  derived and/or modified sequence
atgaacaagagccccagcgccatgcagcagcaggacggcctggacagaaatgagctgcttcccttgtcacctctcagccctaccatggaagaggaaccccttgtggtgttcctttcaggggaagacgaccccgagaaaattgaggaacgcaagaaatctaaggagttgcggagtctgtggcggaaggctattcaccagcagatcctgttactccggatggagaaagagaatcagaagctggaaggagtgccaaagtcccgaagaggtgaaatctggcagttcctcgcgctccaatatcgcttaaggcaccggttacccaataagcagcaacctccggatatctcctataaggagttgctgaagcagctgacagcacagcagcacgccatcctcgtcgacttgggacgcacatttcccactcacccgtatttttccgtgcagctcggacccgggcaactgagtcttttcaacctgctgaaggcgtactcactcctggacaaagaagtcggctactgtcagggaattagtttcgtcgccggagtgctgctccttcacatgtctgaggagcaggcatttgaaatgcttaaatttctgatgtacgatctagggttccggaagcagtatcgccccgacatgatgagcctccagatccaaatgtatcagttaagtagactgctgcacgattaccaccgagacctatacaatcacttggaggagaatgagatatcgccctcactatatgctgccccttggtttctgacactatttgcctcgcagttctcactgggattcgtcgccagggttttcgatatcatcttccttcagggaacagaagtgatttttaaagttgcgctgtcactgctgagcagccaggagactctaatcatggagtgtgaatcattcgaaaacatcgtggagttcctgaagaacacgctccctgacatgaatacatccgagatggaaaaaatcatcacccaggtgttcgagatggatatctctaagcagctgcacgcctacgaggtggaataccacgtgctgcaggacgaacttcaggagtccagctacagctgcgaggattctgagactctcgaaaaactggaacgagctaacagccagctgaaacggcagaatatggatctgctagagaaacttcaggtagcccacaccaaaattcaggccttggaatcaaatctggagaacctattaacaagggaaacgaagatgaagtctctgattcgcactctcgagcaggagaaaatggcctaccaaaaaactgttgaacagctgagaaagctactgcccgccgacgcacttgttaactgcgacctcctgctcagagatttgaattgcaaccccaataacaaggcaaaaattggcaacaagccttag

SEQ ID NO: 280279 - DNA, 1389 bp, Artificial Sequence
  derived and/or modified sequence
atgaacaaaagtccttcggctatgcagcagcaggacggccttgatcgcaacgaattattacctctcagtcctctgagcccaactatggaagaggaaccactcgtggtgttcctgagtggagaggatgatcctgagaagatagaggagcggaagaagtccaaggagctgaggtcactgtggcgcaaggccattcaccagcagatattgctcctgagaatggaaaaggagaaccagaaactggaaggcgtacccaaatctaggcgcggtgagatctggcagttccttgctctgcagtacaggcttagacacaggctcccaaacaagcagcagccaccagatattagctacaaggaactgctgaagcaacttacggcccaacagcatgctatcctggtggacctgggcagaacatttcccacacacccctacttctcagtacaactcggacctggccagctctcactgtttaatttgcttaaagcctacagtctgctggacaaagaagtcggctactgtcaggggatctctttcgtggctggagtgctcctcctgcacatgagcgaagagcaggcctttgagatgctcaaattcctgatgtacgatctggggttcaggaagcagtataggccagacatgatgtccctccaaatccaaatgtaccagctctctcgcctgctccacgactaccaccgggacctgtataatcatcttgaagagaacgagatctccccctcactatacgctgctccttggttcctgacgttattcgcatcccagttcagccttggcttcgtggcgagagttttcgatattatttttctacaggggactgaggtgatttttaaggtcgctctctcgctgctttccagccaggagacactgattatggagtgtgagtccttcgaaaacatcgtcgagtttcttaagaacacgctccccgacatgaataccagcgaaatggagaagattatcacgcaggtttttgagatggacatcagcaaacagttgcatgcatatgaagtggaataccacgtgttacaggacgagttgcaagagtcttcatattcatgtgaagatagtgaaacgctggaaaagttagaacgtgctaactctcagctaaaacggcaaaacatggacctgctcgaaaagcttcaagtcgcacacactaagatccaggctcttgaatccaatcttgaaaacctgctcaccagggaaacaaaaatgaagtcgctgatcaggaccctcgaacaagagaaaatggcttatcagaaaactgttgagcagcttaggaagttattgccagctgatgcgctggtgaattgcgatctcttgcttagagacctgaattgcaatcccaataataaggcgaagattggcaataaaccttag

SEQ ID NO: 280280 - DNA, 2565 bp, Artificial Sequence
  derived and/or modified sequence
atggagcgaccctacaccttcaaggactttctgctgcggcctcgatcacataagtcacgcgtgaaaggctttctccgcctcaaaatggcttatatgcccaagaatgggggccaagacgaggagaatagcgaccaacgagacgacatggaacacggctgggaggtcgtggattctaacgattcagctagccagcaccaggaggaacttccacctcctcctctgcctcctggatgggaagagaaagtagacaacctgggacgaacctattacgtaaaccacaacaacaggaccacacagtggcacagaccgagcttgatggatgtgtcatccgaaagtgacaacaatatccgccagatcaaccaggaggcagctcacaggcgcttccggtccaggcgtcatatttctgaggaccttgagcctgaaccttctgaggggggcgacgtccctgaaccttgggagaccataagtgaggaagttaatatagctggagattctctcggactggcactgcctccgccaccagcatctcccgggtcgcggacgtctccacaggagctgagcgaggagctgtcgcggcggcttcagattacacctgattctaacggcgaacaattttcaagcctgattcaaagagagccatcctcacggctgcggtcatgcagcgttactgacgccgtcgccgaacaggggcacctgcctccccctagtgcccctgctggccgggcgcggtcctctactgtaaccggcggcgaagagccaactccgtcagtggcctacgtccacacaaccccgggacttccctcaggctgggaagaaagaaaggatgcgaagggccgaacatactacgttaaccataataatcgaaccacaacatggaccagacccatcatgcaactggctgaggatggggcatccggttccgccacgaactccaacaaccatctgatcgagccacagatcagacggccccggagtctaagctccccaaccgtgactttgagcgctccactggagggggctaaagacagcccagtccgcagagcagtaaaagacacattgtcaaatccccagtctcctcagccatccccatacaatagccctaagcctcagcataaagtgacccagagcttcctgcctcccgggtgggagatgcgcatcgcgcccaacgggcgcccattttttatagaccataatactaagactaccacttgggaagacccccgtctcaagtttccagttcacatgcgatccaagacctctctgaaccctaatgatcttggcccactgccccctgggtgggaagagcggatccacctggacggcagaaccttctacattgaccataactccaaaattacccagtgggaagaccctaggctccagaatccagccatcaccggtccagctgttccatattcccgcgagtttaaacagaaatacgactacttcagaaagaagttgaaaaaaccagcggacattccaaatagatttgaaatgaaactccacagaaacaatatctttgaagagtcatacagacggataatgagcgtcaagcgccctgatgtgctgaaggctaggctgtggatagaatttgagagtgagaaaggactggattacggcggtgtggcccgagagtggttttttctactctccaaggagatgtttaatccttactacggcctgtttgagtactcagccaccgacaactataccctgcagatcaaccctaattcaggactgtgtaatgaagaccacctgagctatttcacctttataggaagagtcgccggcctggcggtcttccacggcaaattattagatggattctttatccggcccttctataaaatgatgcttgggaaacagataactttgaacgacatggaatccgtggattcagaatactacaattccctgaagtggattcttgagaatgaccctacagaactggatcttatgttttgtatcgacgaagaaaatttcggccagacctatcaggtggacttaaaacctaatggtagcgagattatggtgacaaatgagaataaacgtgagtatatagacttagtcatccagtggcggttcgtaaaccgggtccagaagcagatgaatgccttcttggagggcttcactgagctgctgcctattgatctgatcaaaatcttcgacgagaacgaactcgagctcctgatgtgcggcttaggcgacgtggacgtcaatgactggcgccagcattctatatataaaaacggatattgccctaatcaccctgtgattcaatggttctggaaggctgtactgctgatggacgcagaaaaacggatccgactgctgcagtttgtaacaggaacctcccgcgtgcctatgaacggctttgctgagttgtacggatccaatgggcctcagttatttaccatcgagcaatggggctcacctgagaagttgccgcgggcacatacgtgttttaataggttagaccttccgccgtatgagacattcgaggaccttcgggagaagctgctcatggctgtagaaaatgcccaaggatttgagggtgtggactag

SEQ ID NO: 280281 - DNA, 2565 bp, Artificial Sequence
  derived and/or modified sequence
atggaaaggccttatacttttaaagactttctgctgaggccccgaagccacaaaagcagagtgaaaggtttcctgcgacttaagatggcctatatgcccaaaaacggtgggcaggacgaggaaaactctgaccaaagagatgatatggaacatggctgggaagttgtagattccaacgattccgcttctcaacaccaagaagaacttccgcctcctccgctgccaccagggtgggaagagaaggtagataacctcggtcggacctactacgttaaccacaataaccgaaccacacagtggcaccggcccagcctgatggatgtgtcatccgaaagtgataataatatcagacaaattaaccaagaggccgcccaccggagatttaggagtcgcagacacatcagcgaagaccttgagcccgaaccttcagagggaggtgacgtgcccgagccttgggagaccatctccgaggaggtgaatatagctggagacagtctcgggctcgcactaccccctccgccagcatcacctggcagtagaacctctccccaggagctgagtgaagagttgagccggcggttgcagattacgcccgattcaaacggtgaacaattctctagcctgatccagcgggagcctagtagtcggttgagatcttgcagcgtcactgatgcagtggcagagcaagggcacctgccaccaccatctgcgccggccggaagggcgagaagttccaccgtgacaggaggcgaagaaccaacccccagcgtcgcatatgtgcataccaccccaggcctccctagcggctgggaggagaggaaggacgccaaggggcgcacctactacgtgaatcataataaccggactacaacatggacccgacccataatgcaactggccgaagatggagcgagtggaagcgcaactaactcaaacaaccaccttatcgagccccaaatacgacgacctcgttcactttcatctcctaccgtgacgttatccgcccctttggagggggccaaggacagcccagtgcgcagggctgtgaaggacactttatccaacccacagtcccctcagccctccccctataatagcccaaagccacagcacaaagtgacacagtcatttttgcccccagggtgggaaatgcgcattgccccaaacggccggccctttttcatcgatcacaacaccaaaactactacctgggaagatccgcgcctgaaatttccggtgcatatgaggtcaaaaacttcactgaacccaaatgatcttggaccactccccccggggtgggaggaaaggatccacctggacggtcgtacattttacatagatcataattctaaaattacgcagtgggaggatcccaggctgcagaatcccgctatcacaggacccgctgtaccatattcaagggagttcaagcagaaatacgactacttccggaagaaacttaaaaaacctgccgatatccccaacaggttcgagatgaagctacatcggaacaacatattcgaggaatcttatcgcaggattatgtccgttaagcgaccagacgtgctgaaagcacggctgtggatcgaattcgagtccgagaagggcctggattatgggggggttgcccgcgaatggttttttttgctatcaaaggaaatgttcaatccctattatggcctcttcgagtacagcgctacagacaactacacactgcagatcaatcccaattccgggctctgtaatgaggatcacttgtcttacttcacttttattggtagggtggccggccttgccgtcttccatggcaaacttctcgacggcttcttcatccggccattttacaagatgatgcttggcaagcaaatcaccctgaacgacatggagtctgttgactccgaatactataacagcctgaagtggatactggaaaatgatccaaccgaattggacctgatgttctgcatcgacgaagagaacttcggccaaacatatcaggtggatttgaaacctaatggctcagagattatggttactaacgagaacaagcgtgagtatatagacctcgtgatccagtggcgttttgtaaatcgcgtacaaaagcagatgaatgcctttttagagggcttcaccgaactcctgcccatcgatctaatcaagattttcgacgaaaacgaattggaattgctgatgtgtggcctgggtgatgtagacgtcaatgactggaggcagcactccatttacaagaacggctactgtcccaatcatcccgttattcagtggttctggaaagctgtgttgttgatggacgccgagaagcgaatcaggcttctccagtttgtcacgggcacctccagagtgcctatgaacgggttcgccgagctgtatggttcaaatgggcctcagctgtttaccattgaacaatgggggtcgcccgagaagctgccgagggctcacacctgctttaatcgacttgaccttccaccatatgaaacatttgaagacctgcgagagaagttgttgatggccgtcgagaatgcacaaggattcgaaggagtggattag

SEQ ID NO: 280282 - DNA, 2565 bp, Artificial Sequence
  derived and/or modified sequence
atggagcggccctacaccttcaaggacttcctgctgcggcccaggagccacaagagccgggtgaagggcttcctgcggctgaagatggcctacatgcccaagaatggaggccaggatgaagaaaattctgaccagagagatgacatggagcacggctgggaggtggtggacagcaatgattctgccagccagcaccaggaggagctgcccccaccacccctgcccccaggctgggaggagaaggtggacaacctgggccgcacctactacgtgaaccacaacaacagaaccacccagtggcaccggcccagcctgatggatgtgagcagcgagagtgacaacaacatccggcagatcaaccaggaggccgcccaccggcgcttccgcagcagaagacacatcagcgaggacctggagcctgagcccagcgagggcggagatgtgcctgagccctgggagaccatcagcgaggaggtgaacattgctggggacagcctgggcctggccctgcccccacctccagccagccctggcagcaggaccagcccccaggagctgtctgaggagctgagccggcggctgcagatcaccccagacagcaatggagagcagttcagcagcctcatccagcgggagcccagcagccggctgcggagctgcagcgtgacagatgctgtggccgagcagggccacctgcccccacccagcgccccagctggccgggcccggagcagcacagtgactggaggagaggagcccacccccagcgtggcctacgtgcacaccaccccaggcctgcccagcggctgggaggagaggaaggatgccaagggccgcacctactacgtgaaccacaacaacagaaccaccacctggacccggcccatcatgcagctggctgaagatggagccagcggcagcgccaccaacagcaacaaccacctgattgagccccagatcagaagacccaggagcctgagcagccccaccgtgaccctgagcgcccccctggagggcgccaaggacagccctgtgcggcgggctgtgaaggacaccctgagcaacccccagagcccccagcccagcccctacaacagccccaagccccagcacaaggtgacccagagcttcctgcccccaggctgggagatgagaattgccccaaatggccggcccttcttcatcgaccacaacaccaagaccaccacctgggaggacccccggctgaagtttcctgtgcacatgaggagcaagaccagcctgaaccccaatgacctgggccccctgcccccaggctgggaggagcgcatccacctggatggccgcaccttctacatcgaccacaacagcaagatcacccagtgggaggacccccggctgcagaacccagccatcaccggccctgctgtgccctacagccgggagttcaagcagaagtatgactacttcaggaagaagctgaagaagccagctgacatccccaacagatttgagatgaagctgcacaggaacaacatctttgaggagagctaccgccgcatcatgtctgtgaagaggccagatgtgctgaaggcccggctgtggattgaatttgaaagtgagaagggcctggactatggaggagtggcccgggagtggttcttcctgctgagcaaggagatgttcaacccctactacggcctgtttgagtacagcgccacagacaactacaccctgcagatcaaccccaacagcggcctgtgcaatgaagaccacctgagctacttcaccttcatcggccgggtggccggcctggccgtgttccacggcaagctgctggatggcttcttcatccggcccttctacaagatgatgctgggcaagcagatcaccctgaatgacatggagagcgtggacagcgagtactacaacagcctgaagtggatcctggagaatgaccccacagagctggacctgatgttctgcattgatgaagaaaattttggccagacctaccaggtggacctgaagcccaacggcagcgagatcatggtgaccaatgaaaacaagcgggagtacatcgacctggtgatccagtggaggtttgtgaacagagtgcagaagcagatgaatgccttcctggagggcttcacagagctgctgcccatcgacctgatcaagatctttgatgaaaatgagctggagctgctgatgtgtggcctgggagatgtggatgtgaatgactggaggcagcacagcatctacaagaatggctactgccccaaccaccctgtgatccagtggttctggaaggctgtgctgctgatggatgctgagaagaggatccggctgctgcagtttgtgacaggcaccagccgggtgcccatgaatggatttgctgagctgtatggcagcaatggcccccagctgttcaccatcgagcagtggggcagccctgagaagctgccccgggcccacacctgcttcaaccggctggacctgcccccctatgagacctttgaggacctgcgggagaagctgctgatggctgtggagaatgcccagggctttgagggcgtggactag

SEQ ID NO: 280283 - DNA, 2565 bp, Artificial Sequence
  derived and/or modified sequence
atggagcggccctacaccttcaaggacttcctgctgcggccccggagccacaagtctcgtgtaaaggggtttcttaggttgaagatggcttatatgccaaaaaatggtggacaagacgaggaaaatagtgatcagcgtgatgatatggaacatggatgggaggttgtcgattccaacgacagtgcatcccagcaccaggaagaattaccacctcctcccctgccaccaggctgggaagagaaggttgataacctgggccgaacttactatgttaaccataataatagaaccacacagtggcaccgcccaagcctgatggatgtctcctcagagtctgacaacaacatccgacaaataaatcaggaggcagcacacaggaggtttcggagccggcgacacatctctgaggacctggaaccagagccttcagagggaggtgatgtgccggaaccttgggaaaccatcagtgaggaggttaatattgccggagactctttaggcctggcgctgccccctccacccgcttcccctggttcccgaacttccccccaggagctgagcgaggagttatctcggcggctgcaaatcacaccagacagtaatggagaacagtttagcagcttgatccagcgcgagccgtctagcagacttagatcctgctctgtgacggacgcagtggctgagcagggacacttgccacctcccagcgcccccgctgggagggcgcgatcttctaccgtgaccggcggggaagaaccaactcccagcgtggcctatgtccacacgactcctggtctgccatccggatgggaggaaagaaaagacgcaaaggggaggacttactacgtgaaccacaacaaccgaaccactacatggacgaggccgataatgcagctcgctgaagacggcgccagcgggagtgccacaaactctaataaccacctgatagagcctcagatcaggcggcctagaagcttatcctccccaaccgtgacccttagcgcaccgttggagggggcgaaggactcccctgtgcgaagagctgttaaagacactctctctaatcctcaatccccacagccctcaccttataactcacctaagcctcagcacaaggtgacccagagttttctcccacccggatgggagatgaggatcgcacccaatgggaggcctttctttattgaccacaacacaaagacgacgacctgggaagatccacgccttaagtttccagtgcacatgcggagcaagacttcgttgaaccccaacgatctggggcccctgccccctggatgggaagaacgaatccaccttgatggacggacattctacattgaccataactccaaaataacccagtgggaagatcccagattacaaaatccagccataacaggcccagccgtcccctattccagagagttcaaacaaaaatatgactattttagaaagaagcttaagaagccggccgacattcctaaccggttcgaaatgaagctccaccgaaacaacatctttgaagagtcctatagacgaatcatgagcgtgaagaggcccgatgttctgaaggcacgcctctggatcgagttcgagagcgagaagggtctggattacggcggagttgcccgagagtggttcttcctcctgtctaaggagatgttcaatccgtactacggtctgttcgaatattctgctaccgacaattacactctgcagattaaccccaattctggtttatgtaatgaagatcatctctcttattttacgttcatagggcgggttgcagggttggcagtgttccacgggaagcttctggacggcttctttatcaggccattttacaagatgatgctcggcaagcagattactctgaacgatatggaatccgtggactccgagtactacaactccttgaaatggatactcgagaatgatccaaccgagctcgatctgatgttttgtattgacgaggagaattttggccagacctatcaggttgatctaaagccaaacggaagtgagatcatggtgacaaacgagaataaacgcgagtatatcgatctggttatacagtggaggttcgtcaacagagtgcagaaacaaatgaacgcgttcctagaaggcttcaccgagctgctgccaattgacctgataaaaatttttgatgagaatgaactggagctcctcatgtgcggactgggcgacgtcgatgtaaacgactggcggcagcacagcatctacaagaacggatactgtcctaatcaccctgtcattcagtggttttggaaagccgtattgctgatggacgccgagaaacggataaggttgttgcagtttgtaacggggacctcgcgggtgccgatgaacggttttgcggagctttacggatctaacggtcctcagctgttcactatagaacaatggggtagtccagagaagctgcctcgggcgcacacgtgcttcaaccggctcgacttgcccccgtacgagacatttgaggacctccgggagaagttgttaatggcagtggagaatgcccagggattcgagggtgtggattag

SEQ ID NO: 280284 - DNA, 2565 bp, Artificial Sequence
  derived and/or modified sequence
atggagcggccctacaccttcaaggacttcctgctgcggccccggtcccacaaaagcagagttaaagggtttcttcgtctaaagatggcttatatgcctaagaatggcggtcaggacgaagagaattctgaccagagggacgacatggagcacggatgggaggtcgtggattcgaatgatagcgcaagccagcatcaagaggagttgcccccgcccccactcccgccagggtgggaggagaaggtggataacttaggacgaacctattacgtaaatcacaacaacaggactacacagtggcatcggccgtctctgatggacgtgtcaagtgaatcggacaacaacatccggcaaatcaatcaagaagccgcccacaggcggtttagaagccggagacatatttccgaggatctggaaccagaaccttccgaaggtggggatgtgcccgagccatgggaaaccatctcagaagaagtaaatatagctggtgattccttggggctcgctctccctccaccccccgcatctcctggtagcaggacgagccctcaggagttaagcgaagaattatcccgacgcttgcagattactcccgattcgaacggcgaacagttctcttcgctcattcaaagggagccatcatcacggcttcggtcatgttctgtaaccgatgctgtggccgaacaagggcatctgcctccaccatcagccccagcagggcgcgctaggagcagcactgttacaggcggcgaagagccaactccgtcagtggcctacgtgcatacgaccccaggtctgccttcggggtgggaggaaagaaaggacgcaaaggggagaacctactacgtcaaccacaataatcggaccaccacgtggacgcgccctatcatgcagttggcagaggacggagcctcaggatcagcaacaaattctaacaaccacttgatcgaaccacagataagacgccctcgatctctgtcttccccgacagtgaccctatcagcgcctctggagggcgcgaaggactctcctgtcaggagggccgttaaggacaccctgtcaaatcctcaaagtcctcaaccctcaccttacaattccccaaaaccacagcataaagtcacccagagtttcctacccccggggtgggaaatgaggatagcgccgaacggccggccattcttcattgaccataacacaaaaactacgacgtgggaggaccctcggctcaaatttcccgtgcatatgagaagtaagacctctttgaacccgaatgatcttggacctctccccccaggatgggaggagcggattcacctggatggtcgaaccttttacatcgaccacaactctaaaatcacccagtgggaggatcccaggcttcaaaatcccgctataacaggccctgccgtcccatattctcgtgaatttaagcagaagtacgactatttcagaaagaaactgaagaaaccagccgatattcccaaccgctttgaaatgaagttgcaccgcaataatatcttcgaagagagctatagacggatcatgtcggtgaagagaccagatgttcttaaagccaggctgtggatcgaatttgagtcagaaaagggtctggattacggaggcgtggcacgtgagtggttcttcttactctcaaaggaaatgttcaacccatattacggcctattcgaatatagcgcaacagataactacacactccaaatcaatcctaatagcgggttatgtaatgaggaccacctatcttactttaccttcatcggtagggtggcagggctagccgtattccatgggaagctgctggacggtttctttattcgacccttttacaagatgatgctcgggaagcagattacacttaacgacatggaaagcgtggattccgagtactacaacagtctgaagtggatcctcgaaaacgatcctaccgagctggacttgatgttctgcatcgatgaggagaattttggtcagacttaccaagtggatctaaagccaaacggttccgaaattatggtgacaaacgaaaacaagcgcgaatatattgaccttgttattcagtggcgattcgttaatcgggtccaaaagcaaatgaatgctttcctagaagggttcacagagctgcttcccattgacctcattaagatattcgacgaaaacgaactggaactcttgatgtgcggtctcggcgatgtggacgtgaatgattggcggcagcactctatttataaaaacgggtattgcccgaaccaccccgtgatacaatggttttggaaggctgtgttgttaatggatgccgagaagcgaataagactgctgcaattcgtcacaggaacatcacgcgtgcccatgaatgggtttgcagaactctacggctctaacggcccccagctgtttactatcgagcaatggggaagccctgagaaacttccccgcgcccatacatgctttaaccggttggacttaccgccctatgagacttttgaggatcttagagagaagctgctcatggcggtggagaatgcacaagggttcgaaggtgtcgattag

SEQ ID NO: 280285 - DNA, 2565 bp, Artificial Sequence
  derived and/or modified sequence
atggaacgaccttacacatttaaggatttcctgctgcggcctcgcagtcacaagtctcgagttaagggattcctccggttgaagatggcgtacatgccaaagaatggcggacaggacgaggaaaacagtgatcagcgagatgacatggagcatggctgggaagtcgtcgatagcaacgactcagcttcacagcatcaggaggaactgccacctcctcctctgccccctgggtgggaagagaaagttgataacctggggaggacctattacgtaaaccataataatcgcaccactcaatggcacagaccttccctgatggatgtgagcagcgaatcagataacaacattcgccagatcaaccaggaggccgctcaccggcgttttcgaagccggcgacacatttctgaagacctcgaacctgaaccctccgaagggggagatgtacccgagccctgggagactatctctgaggaggtgaacattgccggagattcattggggctggctctgcccccacccccagcctccccagggagtcgaaccagtcctcaggagctctctgaagagctgtctcgcaggcttcaaatcacgcctgacagcaatggagaacagttctccagtcttatccagagagagcccagcagccgactccggagttgtagtgtaactgacgctgtcgctgagcaaggacatctgccacctcccagcgctcccgctggccgagctaggagtagcacagttaccgggggagaggaaccaacgccatcggtcgcatatgttcacacgacgcccggtctgcctagcggttgggaggagaggaaagacgctaagggaaggacatattacgtaaaccacaataataggactacaacctggaccagacctatcatgcaacttgccgaagatggggcttctggctccgctaccaactctaataaccacctcattgagccccaaatcagaaggcctagaagtttatcttccccaaccgtgacgctgagtgcacccctcgagggggcaaaagattctccagtccgacgggctgtgaaggatacgctgagtaacccacagtccccccagccctctccttataactcacccaagccacaacacaaggttacccaatcgtttctgccacccggatgggaaatgcgtattgcccctaatggaagaccatttttcatcgatcataatactaagaccaccacatgggaagaccctagactgaagttccccgtgcatatgcgcagtaagacttcactgaaccccaacgacctgggacctcttccaccgggttgggaagagcggatccaccttgatggccgaaccttctatatagaccacaacagcaagataacccaatgggaggatcccagactccaaaaccctgctatcaccggcccagctgttccttacagtagggagttcaaacaaaaatacgactatttccggaaaaagctcaagaaaccagccgacatcccgaataggttcgaaatgaaattacacagaaacaatatctttgaggaatcatatagacggattatgtcggtgaagaggcccgacgtgctgaaggcccgtctctggatcgagtttgagtctgaaaagggccttgattacgggggagtggcacgggagtggtttttcctcttgtctaaggaaatgtttaatccttattacggtctatttgagtatagcgctacagataattacactctgcaaataaatccaaactcagggctttgcaatgaagatcatctgtcttacttcacattcatcgggagagttgctggcctagcagtcttccacggtaaactgcttgacggattcttcataagaccattctacaaaatgatgttgggtaaacaaataactctaaatgacatggaatccgtagactccgaatactacaattccctcaagtggatactcgagaacgatccaactgaactcgacctcatgttttgcatagacgaagagaactttggacagacgtatcaggtagacctcaagcctaacggttccgaaattatggtgacaaatgagaacaagagagagtatatcgacctggtgattcagtggcgcttcgtaaaccgcgttcagaagcagatgaacgccttccttgagggcttcaccgagttgctacccatagatttaattaaaatcttcgatgaaaacgaactggaactcctaatgtgtggtctgggcgacgtggatgtcaacgattggcgccagcactccatatacaagaatgggtactgtcccaatcaccctgtgatccagtggttctggaaagccgtcttgcttatggacgctgagaagcgcattcgtttgctgcaattcgtaactggtacctctagagtgcccatgaacgggtttgcagaactctatgggtccaatggccctcagctgtttacgatcgaacagtggggaagccccgaaaagctgccacgagcgcatacctgcttcaaccggctcgatttaccaccttacgagacatttgaggatctgcgagaaaaactcctgatggccgtggagaatgcacaaggattcgagggggttgattag

SEQ ID NO: 280286 - DNA, 2565 bp, Artificial Sequence
  derived and/or modified sequence
atggaacggccatacacctttaaggactttctgttacggcctcggtcccacaaaagcagggtgaaagggttcctgcgtctcaaaatggcctacatgcccaagaacggtggacaagacgaagaaaactcagatcaacgggacgatatggagcatggctgggaggtggtcgactctaacgactcggctagtcagcaccaggaagagctgcccccaccacccttaccacccggttgggaggagaaggttgacaacctggggaggacctactatgtgaatcacaacaacaggacaacacagtggcacagaccgagcctgatggacgtgagctccgagagtgataataacattcgacaaatcaaccaagaggcggcacataggcggttcaggagcagaagacacattagcgaagatctggagccagaaccaagcgagggcggagatgtgcctgagccctgggagacgataagcgaggaagtaaatattgccggagacagccttggcctggctctcccacctccccctgcaagccccggaagccgcacatccccccaggaactttccgaagaactgtctagacggcttcagattactcctgacagcaatggtgagcagttcagttctcttattcagagagagcctagttccaggctgcgctcctgttcggtgaccgatgcagtggcggaacaggggcacctgccgcctccctcagcgccagcaggtcgtgcaaggtcctccaccgttactggtggggaggaaccgacaccatcagtggcgtacgttcacacgacaccaggcctgccctcaggctgggaggaaaggaaggatgctaagggtcgtacgtactacgtgaaccataacaaccggacgaccacctggactcgaccaatcatgcagttagccgaagatggagcatccggttccgctaccaacagcaataaccatctgatcgagcctcagataagacgcccaagatctctgtctagtccaactgtcacgctcagcgccccactggagggagccaaggattctccggtgcgccgagcggtgaaagacactctttctaacccacaatctccccagcctagtccctacaactcccctaagccccagcataaagttacacagagctttctgccgccagggtgggaaatgcgcattgccccaaatggcagaccattttttatcgaccataatacgaaaacaacaacttgggaagatcctaggttaaagtttcctgtacatatgagatcaaaaaccagcctcaatcccaatgacttaggcccacttccgcctgggtgggaagagcgtatacacctggacggtcgaactttttatatcgaccataacagcaaaataacccagtgggaggaccccagactccaaaaccctgccataacggggccagccgttccttattctagagagttcaaacaaaagtacgactacttcagaaaaaagctcaagaaaccagcagacattcccaatcgttttgagatgaagctgcaccgcaacaacattttcgaagagagttatcgtcgtatcatgagcgtaaagcggcctgatgtcctgaaggcacgactgtggatcgagttcgaatcggaaaagggattggactatggcggtgtcgcaagagaatggttcttcctgctcagcaaagagatgttcaatccatattatggcctgtttgagtactcagcaacggacaattacactctgcagatcaatccgaactcggggctttgcaacgaggaccacctttcctattttacgtttatcggtagggttgctggactcgcagtgttccacggtaaactcctggatggcttttttatcagacccttttataagatgatgctgggtaagcaaataacacttaatgatatggaaagcgtcgactctgaatattataattctctgaaatggatcctggaaaatgaccccaccgaattggacctgatgttttgtattgatgaggagaatttcggtcagacatatcaggtggatctcaaaccgaatgggtcggaaatcatggtgactaacgaaaacaaaagagaatatatcgacctggtgattcagtggcggttcgtcaaccgagtgcagaaacagatgaacgcctttttggaaggttttacagaactgctgccaattgacctgatcaaaatttttgatgagaatgagttggagctgctaatgtgcggactgggggacgtggacgtgaacgactggcgacaacatagtatctacaagaacggttattgccctaaccaccccgtcatacagtggttctggaaggccgtgctgctgatggacgccgaaaagcgcatccgcttgctccagttcgtcaccggtacctctagagtgcccatgaacggctttgcagaattgtatggaagcaatggaccacaactgttcaccattgagcaatggggcagcccagaaaaactgccgagggctcacacatgctttaacaggctcgatctcccgccttacgagacattcgaagacctgagggagaagctcctgatggccgtggaaaatgcccagggctttgagggggtggattag

SEQ ID NO: 280287 - DNA, 2565 bp, Artificial Sequence
  derived and/or modified sequence
atggagagaccctacaccttcaaggacttcctgctgagacccagaagccacaagagcagagtgaagggcttcctgagactgaagatggcctacatgcccaagaacggcggccaggacgaggagaacagcgaccagagagacgacatggagcacggctgggaggtggtggacagcaacgacagcgccagccagcaccaggaggagctgccccccccccccctgccccccggctgggaggagaaggtggacaacctgggcagaacctactacgtgaaccacaacaacagaaccacccagtggcacagacccagcctgatggacgtgagcagcgagagcgacaacaacatcagacagatcaaccaggaggccgcccacagaagattcagaagcagaagacacatcagcgaggacctggagcccgagcccagcgagggcggcgacgtgcccgagccctgggagaccatcagcgaggaggtgaacatcgccggcgacagcctgggcctggccctgccccccccccccgccagccccggcagcagaaccagcccccaggagctgagcgaggagctgagcagaagactgcagatcacccccgacagcaacggcgagcagttcagcagcctgatccagagagagcccagcagcagactgagaagctgcagcgtgaccgacgccgtggccgagcagggccacctgcccccccccagcgcccccgccggcagagccagaagcagcaccgtgaccggcggcgaggagcccacccccagcgtggcctacgtgcacaccacccccggcctgcccagcggctgggaggagagaaaggacgccaagggcagaacctactacgtgaaccacaacaacagaaccaccacctggaccagacccatcatgcagctggccgaggacggcgccagcggcagcgccaccaacagcaacaaccacctgatcgagccccagatcagaagacccagaagcctgagcagccccaccgtgaccctgagcgcccccctggagggcgccaaggacagccccgtgagaagagccgtgaaggacaccctgagcaacccccagagcccccagcccagcccctacaacagccccaagccccagcacaaggtgacccagagcttcctgccccccggctgggagatgagaatcgcccccaacggcagacccttcttcatcgaccacaacaccaagaccaccacctgggaggaccccagactgaagttccccgtgcacatgagaagcaagaccagcctgaaccccaacgacctgggccccctgccccccggctgggaggagagaatccacctggacggcagaaccttctacatcgaccacaacagcaagatcacccagtgggaggaccccagactgcagaaccccgccatcaccggccccgccgtgccctacagcagagagttcaagcagaagtacgactacttcagaaagaagctgaagaagcccgccgacatccccaacagattcgagatgaagctgcacagaaacaacatcttcgaggagagctacagaagaatcatgagcgtgaagagacccgacgtgctgaaggccagactgtggatcgagttcgagagcgagaagggcctggactacggcggcgtggccagagagtggttcttcctgctgagcaaggagatgttcaacccctactacggcctgttcgagtacagcgccaccgacaactacaccctgcagatcaaccccaacagcggcctgtgcaacgaggaccacctgagctacttcaccttcatcggcagagtggccggcctggccgtgttccacggcaagctgctggacggcttcttcatcagacccttctacaagatgatgctgggcaagcagatcaccctgaacgacatggagagcgtggacagcgagtactacaacagcctgaagtggatcctggagaacgaccccaccgagctggacctgatgttctgcatcgacgaggagaacttcggccagacctaccaggtggacctgaagcccaacggcagcgagatcatggtgaccaacgagaacaagagagagtacatcgacctggtgatccagtggagattcgtgaacagagtgcagaagcagatgaacgccttcctggagggcttcaccgagctgctgcccatcgacctgatcaagatcttcgacgagaacgagctggagctgctgatgtgcggcctgggcgacgtggacgtgaacgactggagacagcacagcatctacaagaacggctactgccccaaccaccccgtgatccagtggttctggaaggccgtgctgctgatggacgccgagaagagaatcagactgctgcagttcgtgaccggcaccagcagagtgcccatgaacggcttcgccgagctgtacggcagcaacggcccccagctgttcaccatcgagcagtggggcagccccgagaagctgcccagagcccacacctgcttcaacagactggacctgcccccctacgagaccttcgaggacctgagagagaagctgctgatggccgtggagaacgcccagggcttcgagggcgtggactag

SEQ ID NO: 280288 - protein, 834 aa, Artificial Sequence
  derived and/or modified sequence
MERPYTFKDFLLRPRSHKSRVKGFLRLKMAYMPKNGGQDEENSDQRDDMEHGWEVVDSNDSASQHQEELPPPPLPPGWEEKVDNLGRTYYVNHNNRTTQWHRPSLMDVSSESDNNIRQINQEAAHRRFRSRRHISEDLEPEPSEGGDVPEPWETISEEVNIAGDSLGLALPPPPASPGSRTSPQELSEELSRRLQITPDSNGEQFSSLIQREPSSRLRSCSVTDAVAEQGHLPPPSVAYVHTTPGLPSGWEERKDAKGRTYYVNHNNRTTTWTRPIMQLAEDGASGSATNSNNHLIEPQIRRPRSLSSPTVTLSAPLEGAKDSPVRRAVKDTLSNPQSPQPSPYNSPKPQHKVTQSFLPPGWEMRIAPNGRPFFIDHNTKTTTWEDPRLKFPVHMRSKTSLNPNDLGPLPPGWEERIHLDGRTFYIDHNSKITQWEDPRLQNPAITGPAVPYSREFKQKYDYFRKKLKKPADIPNRFEMKLHRNNIFEESYRRIMSVKRPDVLKARLWIEFESEKGLDYGGVAREWFFLLSKEMFNPYYGLFEYSATDNYTLQINPNSGLCNEDHLSYFTFIGRVAGLAVFHGKLLDGFFIRPFYKMMLGKQITLNDMESVDSEYYNSLKWILENDPTELDLMFCIDEENFGQTYQVDLKPNGSEIMVTNENKREYIDLVIQWRFVNRVQKQMNAFLEGFTELLPIDLIKIFDENELELLMCGLGDVDVNDWRQHSIYKNGYCPNHPVIQWFWKAVLLMDAEKRIRLLQFVTGTSRVPMNGFAELYGSNGPQLFTIEQWGSPEKLPRAHTCFNRLDLPPYETFEDLREKLLMAVENAQGFEGVD

SEQ ID NO: 280289 - protein, 815 aa, Artificial Sequence
  derived and/or modified sequence
MAGNSLVLPIVLWGRKAPTHCISAVLLTDDGATIVTGCHDGQICLWDLSVELQINPRALLFGHTAVLFQQVKETIKENIKEHLLDDEEEDEEIMRQRREESDPEYRSSKSKPLTLLEYNLTMDTAKLFMSCLHAWGLNEVLDEVCLDRLGMLKPHCTVSFGLLSRGGHMSLMLPGYNQPACKLSHGKTEVGRKLPASEGVGKGTYGVSRAVTTQHLLSIISLANTLMSMTNATFIGDHMKKGPTRPPRPSTPDLSKARGSPPTSSNIVQGQIKQVAAPVVSARSDADHSGSDPPSAPALHTCFLVNEGWSQLAAMHCVMLPDLLGLDKFRPPLLEMLARRWQDRCLEVREAAQALLLAELRRIEQAGRKEAIDAWAPYLPQYIDHVISPGVTSEAAQTITTAPDASGPEAKVQEEEHDLVDDDITTGCLSSVPQMKKISTSYEERRKQATAIVLLGVIGAEFGAEIEPPKLLTRPRSSSQIPEGFGLTSGGSNYSLARHTCKALTFLLLQPPSPKLPPHSTIRRTAIDLIGRGFTVWEPYMDVSAVLMGLLELCADAEKQLANITMGLPLSPAADSARSARHALSLIATARPPAFITTIAKEVHRHTALAANTQSQQNMHTTTLARAKGEILRVIEILIEKMPTDVVDLLVEVMDIIMYCLEGSLVKKKGLQECFPAICRFYMVSYYERNHRIAVGARHGSVALYDIRTGKCQTIHGHKGPITAVAFAPDGRYLATYSNTDSHISFWQMNTSLLGSIGMLNSAPQLRCIKTYQVPPVQPASPGSHNALKLARLIWTSNRNVILMAHDGKEHRFMV

SEQ ID NO: 280290 - protein, 801 aa, Artificial Sequence
  derived and/or modified sequence
MWTSGRMSNAKNWLGLGMSLYFWGLMDLTTTVLSDTPTPQGELEALLSDKPQSHQRTKRSWVWNQFFVLEEYTGTDPLYVGKLHSDMDRGDGSIKYILSGEGAGIVFTIDDTTGDIHAIQRLDREERAQYTLRAQALDRRTGRPMEPESEFIIKIQDINDNEPKFLDGPYVATVPEMSPVGTSVIQVTATDADDPTYGNSARVVYSILQGQPYFSVDSKTGVIRTALMNMDREAKEYYEVIIQAKDMGGQLGGLAGTTTVNITLSDVNDNPPRFPQKHYQMSVLESAPISSTVGRVFAKDLDEGINAEMKYTIVDGDGADAFDISTDPNFQVGIITVKKPLSFESKKSYTLKVEGANPHLEMRFLNLGPFQDTTTVHISVEDVDEPPVFEPGFYFVEVPEDVAIGTTIQIISAKDPDVTNNSIRYSIDRSSDPGRFFYVDITTGALMTARPLDREEFSWHNITVLAMEMNNPSQVGSVPVTIKVLDVNDNAPEFPRFYEAFVCENAKAGQLIQTVSAVDQDDPRNGQHFYYSLAPEAANNPNFTIRDNQDNTARILTRRSGFRQQEQSVFHLPILIADSGQPVLSSTGTLTIQVCSCDDDGHVMSCSPEAYMLPVSLSRGALIAILACIFVLLVLVLLILSMRRHRKQPYIIDDEENIHENIVRYDDEGGGEEDTEAFDIAAMWNPREAQAGAAPKTRQDMLPEIESLSRYVPQTCAVNSTVHSYVLAKLYEADMDLWAPPFDSLQTYMFEGDGSVAGSLSSLQSATSDSEQSFDFLTDWGPRFRKLAELYGASEGPAPLW

SEQ ID NO: 280291 - DNA, 2406 bp, Artificial Sequence
  derived and/or modified sequence
atgtggacctcagggcgtatgtcaaacgctaagaactggctcggattaggcatgagcctgtacttctggggcttaatggatctgaccaccacagtgctgtccgatacaccgacgccccagggagaacttgaggccctgttgtccgataagccccagagccaccagcgcacaaagaggtcatgggtgtggaatcagttcttcgtcctggaggagtataccggcactgacccactctatgtaggtaagttgcattcagacatggaccggggcgatggttcaatcaaatacatcctttccggcgaaggggccggcatcgtctttacaatcgatgacactaccggagatatccatgctatccagagactggatcgtgaagagcgcgcccagtacacattgagagcccaggcccttgatcgcagaacaggccggccaatggagcccgagtccgaattcatcattaaaattcaggacattaacgacaacgaacccaagtttttggacggcccctatgtggccacagttcccgaaatgagtcccgtgggcacttccgtaatccaagtgactgctaccgacgccgatgaccccacatatggcaacagcgcccgtgtcgtatactctattctccaggggcagccatatttttcagtggactccaaaacaggtgtcatccgaacggctcttatgaatatggatcgtgaagcgaaagagtattacgaagtaatcatacaagccaaggatatgggcgggcagcttgggggacttgccggtaccaccaccgtaaacataaccctgtccgatgtcaatgataaccctcctcggttcccgcaaaaacactaccagatgagcgtcctcgagtccgcccctatatctagcactgttggcagggtttttgccaaggatctggacgaaggcattaatgccgaaatgaagtacaccatcgttgatggggatggagccgacgcctttgatataagcactgatccgaactttcaggttggaatcataacagtaaagaagcccctgagcttcgaaagcaagaaatcttacacactcaaggtagaaggggccaacccacatctcgagatgagattccttaacctgggcccttttcaggataccactaccgtgcatatcagtgtagaggatgtagacgagccccctgtgtttgagcctgggttttatttcgttgaagttcccgaagacgtcgccatcgggaccactattcagattatcagtgcgaaagatcccgacgtgactaataactcgattagatacagtattgaccgctcatcagatccaggcaggtttttctacgtagacattacgaccggggcactgatgacagcacgcccactggatagggaggaattctcatggcacaatataacggtactggctatggagatgaacaaccccagtcaggtcggctcagttccagtcacaatcaaggttctggacgtgaacgataacgcgccagaatttccgaggttctacgaagccttcgtatgtgagaatgcaaaagccgggcaattgatccagaccgttagcgccgtggaccaggacgacccacggaacgggcagcatttttattactcgctcgctcctgaagctgccaataacccaaatttcactatacgcgataaccaagataacactgctaggattctcacaaggagatccggattccgacagcaagagcagtccgtgtttcatttacccatactgattgctgattcggggcagcctgtgctttccagcacgggaaccctcacaattcaggtgtgctcctgcgacgatgacggacacgtaatgtcctgtagcccagaggcctacatgctgcccgtttctctctcgaggggcgccctcattgctatcctggcttgcatattcgtgctgttagtcttggttctgctcattcttagcatgcgcagacaccggaagcagccatatatcatcgacgatgaagagaatatccatgagaatattgtgcgctacgacgacgaagggggcggggaggaagataccgaggcatttgatattgccgctatgtggaaccccagagaagctcaagcaggggcagcgccaaaaacccgccaggatatgttacccgagatagaatccttgtcccggtacgtgccgcaaacctgtgcagtgaattccacagtgcatagttacgtgcttgctaagctgtacgaggccgacatggatttgtgggcaccccccttcgacagcctgcagacctacatgttcgaaggggacggatcagtggctggatctctcagctccttgcaatccgccactagtgacagtgagcaatcattcgacttcttgactgactggggcccgagattcagaaagctagccgaactgtatggggcgtctgaaggacccgctcctctttggtag

SEQ ID NO: 280292 - DNA, 2406 bp, Artificial Sequence
  derived and/or modified sequence
atgtggaccagtggccgcatgtccaatgcaaagaattggctgggactaggcatgtcactctatttctggggtctgatggaccttaccactacagtgctgtccgataccccgaccccccagggcgaactcgaggccctgctgagcgacaaaccgcagagtcaccagagaactaagcgctcatgggtttggaaccagtttttcgtgctggaggaatataccggaaccgaccctctgtacgtggggaaactgcattccgacatggaccgaggcgatgggtcaataaagtacatcctaagcggagagggcgccgggattgtgtttaccattgatgataccaccggtgacattcacgccatacagcgtctcgaccgcgaagagagagcccagtacacactgcgcgcccaggccttggatagacgcaccgggagacccatggagcctgagagtgagttcatcattaagatacaggatattaatgataatgagccgaaatttctagacgggccttatgtggccactgtgcccgagatgtcacctgtggggacctccgtaattcaggtaacagcaactgacgcagatgaccccacatacggcaatagcgctagagtggtgtatagcatcttgcaaggccagccatacttctctgttgactccaaaacgggagttattcgcactgctttgatgaatatggacagggaggccaaggagtattacgaggtgatcatacaagccaaggatatgggtggccagctcgggggcctggctggaacaacaacagtgaatatcacactgagtgacgttaatgataaccctcccagattccctcagaagcattaccagatgtcagttctagagtccgccccgatatccagtactgtcggaagggtgtttgctaaagacctggacgagggaatcaatgcagagatgaagtatacaatagtcgacggcgacggagccgacgcatttgatatttctacagacccgaattttcaggtaggcatcatcacggtcaaaaagcccctgagcttcgagtccaagaaaagctacaccctaaaggtcgagggtgccaatcctcacctggaaatgaggtttctgaaccttgggccattccaggatacaacaacagtgcatatttccgtcgaagatgtcgacgagcctcccgtgttcgagcctggcttttattttgtggaagtgccagaggacgtggctataggaaccaccatccagatcatctctgccaaagaccctgacgtcaccaataactcaatccgctattcgatcgacagaagcagtgatccagggcgcttcttttatgtggacatcaccacaggcgcactcatgacagccaggccgttagatcgcgaggaatttagctggcacaacatcaccgtcttagctatggagatgaataacccatcccaggtcggctccgttcctgtgaccataaaggtgctggacgtcaatgataatgcccctgaattccccagattctacgaggcctttgtgtgcgagaatgctaaagcaggacagcttattcagacggtcagcgctgtagaccaggacgatcccaggaacggacagcatttctactacagcctcgcacctgaggcggcaaacaatccaaacttcactatcagggacaaccaggacaacacggcaagaattctgacaagaaggtccggtttcagacaacaggagcagagcgtattccacttgccaattctcatcgcagatagtggccagcctgtactgtcatccacaggaaccttgaccattcaggtctgttcttgtgacgatgacggccatgttatgtcttgctcccccgaggcttacatgctccctgtgagcttatcccgtggcgcactcatagcaatcttagcttgcatctttgtgcttttagtgctcgtgctgcttatcctgagcatgcgtagacatcggaagcagccgtatataattgatgatgaagagaacattcatgagaatattgtgcgctacgatgatgaaggaggcggcgaagaggacactgaagcttttgacattgccgctatgtggaaccccagagaagctcaagctggagcagcccccaaaacccgccaggatatgctgccggagatagagtcattgtccagatatgtccctcagacatgtgctgttaacagcaccgtgcatagctacgtgctggcaaagttgtacgaggccgatatggatctctgggctccaccctttgacagcctgcagacttatatgttcgagggggacggctccgttgctggcagtcttagcagtttacagtccgcaaccagtgactcagagcagtcttttgactttctgaccgactgggggccacggtttcgtaagcttgcagaactgtacggagcgtcggaggggccggccccactgtggtag

SEQ ID NO: 280293 - DNA, 2406 bp, Artificial Sequence
  derived and/or modified sequence
atgtggacgagtggtcgcatgagcaacgccaaaaactggttgggcctcggcatgtctctgtacttctggggcttgatggatctgaccacaaccgttctgtccgacactccaacaccgcagggcgagctggaggctctcttgagcgacaagccccagtctcatcagcgtaccaagcgctcctgggtctggaaccagtttttcgtcctcgaggagtacacaggaactgacccattatatgtcggcaaattgcactcagacatggatcgaggcgacggttctatcaaatatatactctcaggcgaaggggcaggcattgtatttaccattgacgacacgacaggggatattcacgcgattcaacgcctcgaccgtgaggaaagagcacagtacacactgcgcgcacaagcactggaccgcagaaccggcaggcctatggaaccagagtcagagtttattatcaagatccaagacattaatgacaatgaaccaaagttcttagacggaccgtatgttgccacagtaccagagatgagccctgtgggaactagtgtgatacaagttacagccactgacgccgatgaccctacatatgggaactcagctcgtgtggtctatagcatcctccagggacagccatacttctctgtggattctaagacaggcgtaatcaggaccgccctcatgaacatggatcgggaggctaaggagtactacgaggtgatcattcaggccaaagacatgggggggcagctcggtggactggcggggacaacaacagtgaacataacactcagcgatgtgaacgataaccctccacgtttcccacagaagcactatcagatgagtgtcctggagtccgcgcctatatcttctacagtcggccgcgtatttgctaaagaccttgacgaaggtataaacgctgaaatgaaatatacaatcgttgacggggatggcgcagatgcttttgacatttccaccgatcctaatttccaggtgggaattatcacggtcaagaagccattgtcctttgaatcaaagaaaagctacaccttaaaagtcgaaggtgccaacccgcaccttgaaatgcgctttctgaatctaggtccttttcaggatacaacaaccgtccacatatctgtggaggacgtggatgaaccccctgtttttgagcctggtttttacttcgtggaagttcccgaagacgtggctataggcaccaccatacaaatcatctccgccaaggatccggacgtcacaaataacagcatccggtatagcatcgaccggtcatccgatccagggcgtttcttttatgtagacatcacaactggggcacttatgactgcacggcctctggaccgggaggaattcagctggcataatatcaccgtcctggctatggaaatgaataacccttcacaggtcgggtcggtaccagtgacaatcaaggtgctggacgttaatgataacgcgccggaattcccgcgcttctacgaggcctttgtatgcgaaaacgccaaagccggccagctaatccagactgtatccgccgtggatcaggatgacccgcgcaacggtcagcacttctattatagtttggcacctgaggctgctaataatcctaattttactattagagataaccaggacaatacagctcgtatcctaacaaggaggtccgggttcagacagcaggaacagtctgtgttccaccttcctatcctgatcgcggattcaggtcagcctgtcctatcctctaccggcacactcaccattcaggtctgcagctgcgatgacgatggacacgtgatgtcctgcagtccagaggcctatatgctgcccgtaagcctttcgagaggagctctcatagccatcttggcatgcatttttgtgttgctggtgctggtgctcctcattctctctatgagacgccatcggaagcaaccctatataattgacgacgaagagaatatccatgaaaatatcgttaggtatgatgacgagggcggaggagaagaagacacagaagctttcgatatagccgctatgtggaaccctcgtgaggcccaggctggtgccgccccaaagactagacaagacatgcttcccgaaatcgaaagcctgtcacgatatgtgccgcagacatgcgccgtgaacagcaccgtccactcctacgtgctggcgaaattatatgaggctgacatggacctctgggcgcctccattcgacagcctgcagacatacatgttcgagggcgacggctcagtcgctggtagtcttagttccctgcaatcggcaacatctgactccgagcagtccttcgacttcttaactgattggggccctcgatttcgcaaactggccgagctttacggggcatccgaagggcccgcgccactgtggtag

SEQ ID NO: 280294 - DNA, 2406 bp, Artificial Sequence
  derived and/or modified sequence
atgtggaccagcggccgcatgagcaatgccaagaactggctgggcctgggcatgagcctgtacttctggggcctgatggacctgaccaccaccgtgctgagtgacacccccaccccccagggcgagctggaggccctgctgagtgacaagccccagagccaccagaggaccaagaggtcctgggtgtggaaccagttctttgtgctggaggagtacacaggaacagaccccctgtatgtgggcaagctgcacagcgacatggacagaggagatggcagcatcaagtacatcctgtctggagagggcgccggcatcgtgttcaccattgatgacaccactggagacatccacgccatccagaggctggaccgggaggagcgggcccagtacaccctgcgggcccaggccctggacagaagaacaggccggcccatggagcctgagagcgagttcatcatcaagatccaggacatcaatgacaatgagcccaagttcctggatggcccctacgtggccaccgtgcctgagatgagccctgtgggcaccagcgtcatccaggtgacagccacagatgctgatgaccccacctacggcaacagcgcccgggtggtgtacagcatcctgcagggccagccctacttctctgtggacagcaagacaggagtcatcagaacagccctgatgaacatggaccgggaggccaaggagtactatgaggtgatcatccaggccaaggacatgggcggccagctgggcggcctggccggcaccaccaccgtgaacatcaccctgagtgatgtgaatgacaaccccccacgcttcccccagaagcactaccagatgtctgtgctggagagcgcccccatcagcagcacagtgggccgggtgtttgccaaggacctggatgagggcatcaatgctgagatgaagtacaccatcgtggatggagatggagcagatgcctttgacatcagcacagaccccaacttccaggtgggcatcatcaccgtgaagaagcccctgagctttgagagcaagaagagctacaccctgaaggtggagggcgccaacccccacctggagatgaggttcctgaacctgggccccttccaggacaccaccaccgtgcacatctctgtggaggatgtggatgagccccctgtgtttgagcccggcttctactttgtggaggtgcctgaagatgtggccatcggcaccaccatccagatcatcagcgccaaggaccctgatgtgaccaacaacagcatccgctacagcattgacaggagcagtgaccccggccgcttcttctacgtggacatcaccactggagccctgatgacagcccggcccctggaccgggaggagttctcctggcacaacatcaccgtgctggccatggagatgaacaaccccagccaggtgggctctgtgcctgtgaccatcaaggtgctggatgtgaatgacaatgcccctgagttcccccgcttctatgaggcctttgtgtgtgaaaatgccaaggccggccagctgatccagacagtgtctgctgtggaccaggatgaccccagaaatggccagcacttctactacagcctggcccctgaggccgccaacaaccccaacttcaccatccgggacaaccaggacaacacagcccgcatcctgacccggcgcagcggcttccggcagcaggagcagagcgtcttccacctgcccatcctgattgctgacagcggccagcctgtgctgagcagcacaggcaccctgaccatccaggtgtgcagctgtgatgatgatggccacgtgatgagctgcagccctgaggcctacatgctgcctgtgtccctgagcagaggagccctgattgccatcctggcctgcatctttgtgctgctggtgctggtgctgctgatcctgtccatgagaagacacaggaagcagccctacatcattgatgatgaggagaacatccacgagaacatcgtgcgctatgatgatgaaggaggaggagaggaggacacagaggcctttgatattgctgccatgtggaacccccgggaggcccaggccggggccgcccccaagacccggcaggacatgctgcctgagattgagagcctgagccgctacgtgccccagacctgtgctgtgaacagcacagtgcacagctatgtgctggccaagctgtatgaagctgacatggacctgtgggcccccccatttgacagcctgcagacctacatgtttgaaggagatggctctgtggccggcagcctgagcagcctgcagagcgccaccagtgacagcgagcagagctttgacttcctgacagactggggcccccgcttcaggaagctggccgagctgtatggagccagcgagggccctgcccccctgtggtag

SEQ ID NO: 280295 - DNA, 2406 bp, Artificial Sequence
  derived and/or modified sequence
atgtggaccagcggccggatgagcaacgccaagaactggctgggcttggggatgagcctctatttttggggcctgatggacctgactacaacagtcctaagcgacacccccacgcctcagggcgagttagaggccttgctctctgacaaaccacaatcacaccagcgcaccaagcgtagctgggtgtggaaccaatttttcgtgctggaagaatatacaggaaccgaccctctttatgtaggcaagctgcacagcgatatggatcgaggagacggctcaattaaatacattctgtcaggcgagggcgccggaatcgtctttaccatcgatgacacgactggagacatccacgctattcagcgccttgatcgggaagaaagagcgcaatacactctcagagctcaagctttggacaggcggactggtagaccaatggaacctgaatccgagttcatcataaagattcaggatatcaatgacaatgaacccaaatttcttgatgggccatacgtcgcaaccgtgccagagatgtctcctgtgggtacatcggtcattcaagtgacagctacagacgcagacgatccgacctacgggaattccgcccgagtggtgtattccatattgcagggtcagccttacttttcggtggactccaagactggcgtgatcaggacagccctcatgaatatggatcgagaggccaaagaatactatgaagtcatcattcaagccaaagacatgggcggacagctgggaggcctcgcaggcactacaacagtcaacatcaccctcagcgacgtaaatgacaacccccctcgttttccacagaaacactatcagatgagcgtcctcgaatccgcccctatttcatccactgtaggtagagtcttcgctaaagacttagacgagggcattaacgccgagatgaagtacactatcgtcgacggtgacggagccgacgcatttgacatctccacggatccaaattttcaggtagggattattaccgtgaaaaaacccctcagctttgaatccaagaaaagctacactttgaaggtggagggtgctaaccctcacttggaaatgaggtttctcaacctcgggccatttcaggacactaccacagtgcacatttcagttgaggacgttgacgaaccaccagttttcgagcccggcttttactttgtggaagtcccagaggacgttgcaattggaaccaccatccaaattatctccgccaaggatccagatgtgacaaacaatagcattagatactctatcgatagatccagcgatcccggccgcttcttctatgtcgatatcacaaccggagcacttatgacagccagaccacttgatcgcgaggagttctcctggcataatatcactgtgctggccatggagatgaataaccctagtcaagttgggagcgtgccagtgactataaaagtgcttgatgtcaacgacaacgcccctgaatttcctcgattctacgaggctttcgtctgcgagaatgcaaaggcgggtcagcttatccagaccgtatcggctgttgatcaggatgacccccgaaatggtcaacacttttactacagcctcgccccggaggccgccaacaatccaaactttacaattcgcgacaatcaggacaataccgctagaattctcactagacgaagcgggttccgtcagcaggagcaaagtgtgtttcatcttcccattctgatcgcagattccggccagccagtcctcagctccactgggactctcacaatccaggtctgttcctgtgacgacgatggtcatgtgatgtcatgttcccctgaggcatatatgttgcctgtctctctctcccggggggcactgatcgcgattctggcgtgcatcttcgtgctgctcgtcttagtactgctcattttgtcaatgcgccggcataggaaacagccctacatcattgatgacgaggagaacatacacgaaaacattgtccggtacgatgatgaagggggcggagaagaggataccgaggccttcgacatcgccgccatgtggaaccccagagaggcccaagccggtgcggctccaaagacacgtcaggatatgctgccagagattgagtcactctccaggtatgtgccccagacatgtgccgtgaacagtacagtccatagctacgtgctcgcaaagctgtatgaagctgatatggacctatgggcgccaccctttgactcattgcaaacttatatgttcgagggcgacggtagtgtggcaggttctctgagctctctgcagtcagccacttccgacagcgaacaaagctttgatttcttgactgattggggacctcggttccggaagctggcagaactgtatggagctagcgaggggcctgccccattgtggtag

SEQ ID NO: 280296 - DNA, 2406 bp, Artificial Sequence
  derived and/or modified sequence
atgtggaccagcggccggatgagcaacgccaagaactggctgggcctaggtatgtctctgtacttttggggtttgatggatctgaccacgaccgtgctgagtgataccccgactccccagggcgaactcgaggcccttctatctgacaagccccagagtcaccagcgtacaaaacggtcatgggtgtggaatcagttttttgtgcttgaagaatacacgggaaccgatccactgtatgtcgggaaactccacagcgacatggacaggggagacgggagcatcaaatatatactctctggggagggggccgggatcgtgttcacaatagacgacaccactggagatatccacgctattcagcgactggaccgggaagagcgcgcccagtatacgctgcgggctcaggcacttgacagaaggacaggcaggccaatggagccggaatcagaattcattattaaaatccaggacattaatgacaacgagcccaagttcctggacggcccctacgtggcaacagttcccgagatgtctcctgtgggaacaagcgttatacaggtaacggccactgacgcggacgaccccacatacgggaattccgcgagagtggtctactcaatcttgcagggtcagccctacttttctgtcgatagcaaaactggtgtaattcgcacagccttaatgaatatggatagggaagctaaagaatattatgaggttataattcaggcaaaggacatgggcggacagctgggcgggctcgctggcactaccaccgttaatatcaccttgtctgatgtgaatgacaaccctcctcgttttccacagaaacattatcaaatgtcagttctggaaagcgccccaatctcttccacggtggggagagtgttcgctaaggacctggatgagggaattaacgccgagatgaagtatacaatcgtcgacggcgatggcgccgacgcatttgacatttcaaccgaccccaactttcaggtgggcatcatcacagtgaagaaacctctgagctttgaatcaaagaagtcctacacactgaaagtggaaggagcaaacccacacctcgagatgcgcttcctgaacttgggccctttccaggacactaccacagtgcacatctccgtggaggatgtggatgagccgccagttttcgaacctggcttttatttcgtcgaggtccccgaagacgtggcgattggtactactatccagattataagtgcgaaagaccctgatgtcaccaataattccatcagatatagcatcgaccgctcctccgacccaggcaggttcttttacgtggacattacaactggcgcattaatgacggctaggcccctggaccgcgaggagttctcttggcataacatcacggttttggcaatggaaatgaataatccgagtcaggtgggttctgtccccgtcacaattaaagtgctcgatgttaacgacaacgcacccgaatttccccggttttacgaagcctttgtctgtgagaatgctaaagccgggcagcttattcagaccgtatccgctgtggaccaggatgatccaagaaatggccaacacttctattactcactggcaccagaagccgctaataaccccaactttaccatccgggacaatcaggataatacagcgaggatcctgactcgccggtcgggatttcgccaacaagagcaatcagtcttccacctgcccattttaatcgctgactcaggccagccggtgctctccagtacaggcactctaaccattcaggtgtgtagctgcgacgacgacggccatgtcatgtcctgttctcctgaagcctatatgcttccagtaagcctcagtcggggggccctcatcgcaattctcgcttgcatttttgttctgctggtactcgtcttgctgattctgtctatgaggcgacataggaaacagccctacatcatcgatgacgaggagaacatccatgagaacatcgtgcgctacgatgatgaggggggcggcgaggaagatacagaagccttcgatatcgcagctatgtggaatccaagggaagctcaggctggagccgctccaaagaccagacaagacatgctgcccgagattgagtcgctgtccaggtacgtgccccaaacatgcgcagttaactcgaccgtccactcctacgttctggcgaaactgtacgaagcggatatggatctctgggctccgccgtttgatagcctgcaaacttacatgttcgagggtgatgggagtgtcgcggggagtctgtccagtctgcaaagcgcaacatccgattcagaacaaagtttcgacttcctcacggattggggccctcgcttccgcaagctcgccgagctttacggggcctctgagggccccgctcctctgtggtag

SEQ ID NO: 280297 - DNA, 2406 bp, Artificial Sequence
  derived and/or modified sequence
atgtggaccagcggccggatgagcaacgccaagaactggctgggcctcgggatgtcattatacttttggggcctaatggatctgaccacaacggtcctcagcgatacaccaacacctcagggcgaactggaggccctcctgtctgataagccgcagtcgcaccagcgaaccaaacggtcttgggtttggaatcagttctttgtcctggaggagtataccggaacagacccgctgtatgttggcaagctgcacagcgatatggacaggggtgacggtagcatcaaatacattttaagcggcgagggagcaggaatcgtgttcactatcgatgacaccacgggcgatatccatgctatccagagattagacagagaggagagggcacaatatacacttcgtgcccaggcgctggaccgcagaacggggcggcctatggaacctgagagcgaatttattataaagatccaggacattaatgacaacgagcccaagttcctcgacggcccctacgtcgctaccgtgccagagatgagtcccgtgggtaccagcgttatccaggtgaccgcaactgatgctgacgaccccacttatgggaattcggcacgggtggtgtactcaattttgcagggccaaccatacttctcagttgatagcaaaacaggcgttattcgcactgctttgatgaacatggatcgggaggcaaaggaatactacgaggtaatcatccaggcaaaggacatgggcggccagttgggaggcctcgccgggacaactacagtgaatatcaccctgtccgacgttaatgacaatcctccccgtttccctcagaagcactatcagatgtctgttcttgagtctgcgccgatcagctcaaccgtgggcagggtttttgcgaaggatctcgacgaaggcatcaacgcagaaatgaagtacacaattgttgacggcgatggcgccgatgcttttgatattagtaccgaccccaacttccaggttggtattatcaccgtaaagaagccactgagcttcgagagcaagaaaagctacaccttgaaagtcgagggtgcgaacccccacctcgaaatgaggtttctgaacctcggcccattccaggacaccactaccgtgcatatctccgtggaagatgtcgatgagcccccggtgttcgagccagggttctactttgtggaagtgcctgaggacgtcgcaatcgggaccactattcagatcatcagtgcgaaagatccagacgtgaccaacaattccatacgctatagtatcgatagatcgtccgatccaggtcgtttcttttacgtagatatcacaactggtgcactgatgactgcccggccattggacagggaggaatttagctggcataatatcactgtactggcaatggagatgaataatccaagccaggtggggagcgtgcccgttacaatcaaagtgctcgacgtcaatgataacgcacccgaattcccgcggttttatgaggcttttgtctgtgagaacgccaaagcaggccaactgatccagactgtctctgctgttgatcaagacgacccccgcaacggccagcacttctattatagtctagctcccgaggctgcaaataatcctaacttcaccatcagggacaatcaggacaacacagctagaatcctgacccgtagaagcggctttaggcagcaagagcagagtgtattccacctgccaatattgatcgcagactcaggccaaccggtgctttcttccacggggaccctgacaatccaagtatgcagttgtgatgacgatggtcatgtcatgtcgtgtagtccagaggcctacatgcttcccgtgagtctgtctaggggagctttgatcgcaatactggcatgcatatttgtgctattagtcctcgtcctgttgattctcagcatgcggcgacaccgcaagcagccatatattatcgacgacgaagagaacatccatgagaatattgtcaggtatgatgacgaggggggaggcgaagaagatactgaagcgtttgacatcgctgctatgtggaacccacgggaagcccaggccggagccgcccccaagacccgccaagacatgttgcccgaaattgaatctctcagcagatatgtgcctcagacatgtgcggtgaacagtacggtccactcctatgtgctggccaaactttacgaggctgacatggatctctgggcccctccctttgatagtttacaaacatacatgttcgagggtgatggaagtgtggcgggcagtttgtcttccctgcagtcagctaccagcgattcagagcagtcttttgattttctgaccgattggggacccaggttccgaaaactggcagagctctacggagctagtgaaggccccgcgccgctctggtag

SEQ ID NO: 280298 - DNA, 2406 bp, Artificial Sequence
  derived and/or modified sequence
atgtggacatcgggccgaatgagcaatgctaaaaattggctcggcctggggatgtccctttatttctgggggctcatggatttgacaactactgtgctgagcgatacacccacaccacagggagaacttgaagctctgctctcggataaaccacagtcccaccagcggactaaacgatcatgggtgtggaaccagttctttgttcttgaggagtacacaggcacagatcccctctacgtaggaaaacttcatagcgacatggaccggggagacggaagtatcaagtacatcctgtcaggggagggggcaggcatcgtgtttacaatagatgacacaacaggcgatatccatgctatacagagactcgacagagaggaacgtgcgcagtatacgttgagggcgcaggctcttgatagaaggacaggcagaccgatggagcccgagtccgaattcatcattaagatacaagacattaatgacaatgagcctaaattcctggatggtccctacgtggcaacagtccccgagatgtcacctgttggcacgtcagtgattcaggtcaccgccacggacgccgatgatcctacgtatggtaacagcgcacgtgttgtgtactccatactgcagggacagccttatttctctgtggacagcaagactggagttattcggacagcgctcatgaacatggatcgggaggccaaggagtattacgaagttatcatacaagccaaagatatgggaggccagttgggagggctggccggaacaaccacagtgaatattacgctcagcgacgtcaacgacaatccgcctcgatttccacagaaacattatcagatgagcgtcctggaaagtgcgcctatttcttcaacagtggggagggtatttgcaaaagacctggacgaaggcatcaacgctgaaatgaaatataccattgtcgacggagatggagctgacgcttttgacatttccactgaccccaactttcaagttgggattatcactgtcaaaaaacctctgtcgtttgagtctaaaaaaagttacacactcaaggttgagggtgccaatccccacctggaaatgcgtttcttaaacctgggacccttccaagatactacaaccgtccacatctctgtggaggacgtggatgaacctcctgtatttgaacccggattctactttgtggaggtccccgaagatgtggctattgggacaaccattcagataattagtgctaaggatccggatgtcaccaataacagtatccggtactcaatcgatcgaagttcagaccccggtcgatttttttatgtcgatattacaacgggggctctcatgaccgcacgcccactggacagggaggaattctcttggcacaatatcacagtgcttgccatggagatgaataaccccagtcaggtgggttccgtccccgtgactattaaagtcttagacgttaacgataatgccccagagtttccccgattttacgaggctttcgtgtgcgagaatgctaaggcaggacagcttatccagacagtctctgccgtagatcaggatgaccctaggaacgggcaacacttctattattctctggccccagaggcagcaaataaccccaactttaccattcgcgacaatcaggataacactgcaagaatcttgaccaggaggtcgggctttaggcaacaggaacaaagcgtattccatctcccaatcttaattgcagacagcggccagcccgtcttgtcctctaccgggacgctgaccatccaggtttgtagttgtgacgacgacggccatgtgatgtcttgctccccagaagcgtatatgttgccagtgagcctcagcaggggagccctcatagccatactagcatgcatttttgtcctgcttgtgttagtgctgctgatactgtccatgagaagacatcgaaaacagccgtacataattgatgatgaggagaacattcatgaaaatatcgtcaggtatgatgacgagggcggaggcgaggaggacacagaagccttcgacatagccgcaatgtggaatcctcgtgaagcacaggccggagctgccccaaaaacacgtcaggacatgctgcctgagattgagtctctgtcacgctacgtaccccaaacctgtgctgttaatagcactgtgcactcttatgtcctcgccaagctatatgaggccgacatggatctgtgggctccaccttttgacagcttgcagacttacatgttcgaaggcgacggcagtgtggctggcagcctgtctagcttgcagtccgcaacttcggattccgaacaaagcttcgatttcctgaccgattgggggcctcgctttcgcaagctggcagagctctatggtgcctcagaaggcccagctcctctgtggtag

SEQ ID NO: 280299 - DNA, 2406 bp, Artificial Sequence
  derived and/or modified sequence
atgtggaccagcgggaggatgtctaatgccaaaaattggctaggcttgggtatgtccctttacttctgggggttgatggatctgaccactaccgtacttagcgatactccaacccctcaaggagagctggaagctttgctttctgacaagccccagtcccaccagagaaccaagcgatcttgggtgtggaaccaattcttcgtgctcgaagagtataccggtaccgacccactgtatgtcggtaagctgcattctgacatggaccgcggagatggcagcattaagtacatattgtctggcgaaggtgcaggaatcgtcttcaccattgatgacactactggcgacatccatgctattcaaagattagatcgtgaggagcgtgctcagtacaccttacgcgcacaggcactcgatcggcgtactgggcgaccgatggagccagaatccgaatttatcattaaaatacaggacatcaacgataacgaacccaagtttctcgacggaccttatgttgcaaccgtgccggaaatgtcccccgtgggcaccagtgttattcaggttaccgctacagatgccgatgatccgacttacggaaacagcgcccgtgtggtgtatagcatcctgcaggggcagccctacttctccgtcgatagtaagaccggggtgatacgtaccgccctgatgaatatggaccgcgaggcgaaggaatactacgaggtcatcatacaggccaaagatatgggcggacagctcggtggcttggccggaaccactactgttaatattaccttgtcagacgttaatgataatcctcccaggtttccgcagaaacactatcagatgtctgtgctggagtccgctccaattagctcaaccgtggggagggtgtttgccaaggacttagacgaaggcatcaacgcagaaatgaaatacactattgttgatggagatggcgctgacgctttcgacatatccaccgatccaaactttcaggtcggcatcataaccgtaaagaagcccctgagctttgaatccaagaaaagttatacattaaaagtggagggggcaaacccgcatctggagatgcggttcctgaacctgggcccatttcaagacaccaccaccgttcatatttccgtggaagatgtagacgagccacccgtgtttgagcccggtttctacttcgtggaagtgcctgaggacgtcgctattggaactactatccaaatcataagtgccaaagaccccgacgttaccaacaacagtatcaggtattctatcgatcgctcctctgatccaggcagattcttctacgtagatataaccaccggcgcattaatgacggccagacccttggatagagaggagttttcttggcacaacattacagtactggcaatggaaatgaacaatccctctcaggtgggttctgtccctgtgactattaaggtcctagatgttaacgacaacgccccagagtttcctagattttacgaggcctttgtgtgcgagaatgcaaaagccggtcaactcatccagactgtgtcggccgtggatcaggacgacccacgcaatggccagcatttctactacagccttgcccctgaagccgcaaataaccctaattttaccattagagacaaccaggacaatacagctcgcattcttacgcgacgtagcggcttccgacagcaagaacagagcgtgtttcatctgcccattctgatcgccgactccggccagcctgtgctgagctctactggtaccttaacaatccaggtgtgcagctgtgatgacgatggccacgttatgtcttgctctcctgaagcttacatgctgccagtgagcttatctagaggggctctgattgccatcttggcctgcatcttcgttctgcttgtgttggtgcttctgattctttcaatgcgccgacatcggaagcaaccatacattatcgatgacgaagagaacatccacgagaatatcgtgagatacgatgacgaagggggaggcgaggaggacactgaggcctttgatatcgctgctatgtggaaccctcgggaagcacaagcaggggctgctccaaagacccggcaggatatgctgccagaaatcgagtccctttccaggtacgtgcctcagacttgcgccgttaactcaacagtgcacagctatgtgctagccaaactgtacgaagccgatatggacctgtgggccccaccatttgactccctgcagacatacatgttcgagggagacggttccgttgccggaagcctctcctcactgcagtccgccacaagcgatagcgagcagagctttgatttcctcaccgattggggcccaaggtttaggaaactggccgaactgtacggagcatccgagggtcccgctccgctgtggtag

SEQ ID NO: 280300 - DNA, 2406 bp, Artificial Sequence
  derived and/or modified sequence
atgtggaccagtggtcgcatgtcaaatgctaaaaattggctgggtctgggtatgagtctgtacttttggggattgatggatcttactactaccgtgctgagtgacacccccacccctcagggagagttagaggcactgttaagcgacaagcctcaatctcatcagcgaacaaaacgatcctgggtctggaaccagtttttcgtgctcgaggagtatacagggacagatccactatacgtcggaaaactgcactcagacatggataggggagatgggtcaatcaagtacatactttcgggcgagggagccggaattgtgtttacgatcgatgataccacgggtgatattcacgccatccagagactggatcgcgaagaaagggcccaatacactcttcgggcacaggcgcttgatcgcaggacaggaagacctatggagcctgagagcgagttcattattaagattcaagacatcaacgacaatgaaccgaagtttctggacggaccatacgtcgcaaccgtgccagagatgtctcctgtgggtaccagtgtgattcaggttacagccacggacgcagacgatcccacatatgggaacagcgctcgcgtggtctactcaatcttgcaggggcagccttatttttccgtggacagcaagacaggcgttatccggaccgcactgatgaacatggacagggaggccaaagagtattatgaagttattattcaggccaaagacatgggcggtcagctgggaggcctggcagggacgacgactgtcaatatcacactgagtgatgtgaacgacaaccctcccaggttccctcagaagcactaccagatgagcgtgttggaaagcgcgcctatttcttcgactgtggggagagtctttgctaaggacttggacgaaggtataaatgcagagatgaagtatactattgtggatggcgatggtgccgacgcttttgacatcagtactgatcccaatttccaggtgggcataattacagtgaagaaacctctgagtttcgagtcgaagaaaagctatacactcaaggtggaaggcgctaacccacatctggaaatgaggtttttgaatctgggcccttttcaagacaccacaaccgtacacatctccgttgaagatgtggacgaaccacctgtgttcgagccaggattctacttcgtggaagtgccagaagatgtggccatcggaacaaccatccagataatttccgccaaagacccagatgtgactaataattctatacggtacagcattgatcggtcgtcagatcccggaaggttcttctatgtggacattaccaccggggctctgatgaccgccagaccattagatcgtgaggagtttagctggcataacatcaccgttttggccatggagatgaacaacccaagtcaggtcggctccgttccggtaacgatcaaggtccttgacgtgaacgataatgctcccgaatttccaagattctacgaggcattcgtctgtgagaacgcaaaagcaggccagcttattcagacagtaagcgcagtcgatcaggacgacccaaggaacggccagcatttttactactcactcgctcccgaggctgccaacaatcctaatttcaccattagagataatcaagataatactgcaagaatcctcactcgccgaagcggattccgtcaacaagagcaatctgtgttccacttacccatattaattgctgatagtggccagcctgtactgagctcgacaggtactttgaccatccaggtgtgctcatgcgacgatgacgggcacgtgatgagttgcagcccggaagcgtacatgctgccagtctccctgtcgcggggagctctgatcgctattctggcctgtatcttcgtgctcttggttctcgtgctgctgatcctgtccatgagaagacataggaagcagccatatatcatagatgacgaggagaatatccatgagaatatcgttcgctatgacgacgagggcggaggggaagaggatactgaagcctttgatatcgcggcaatgtggaacccacgagaggcccaagctggtgccgctccaaagacacggcaggacatgcttcccgagatagaatcattgagcaggtatgtcccgcagacttgcgcggtgaatagtaccgtgcatagctacgtgctggccaagctatacgaagctgacatggacttgtgggcccctccgtttgattcactgcagacgtacatgtttgagggtgatgggtctgtggctggatctcttagcagccttcagtccgctacatctgattcagaacagagctttgacttcttgaccgactggggacctcgcttccggaaactggccgagctgtacggggctagcgagggtcctgccccactctggtag

SEQ ID NO: 280301 - DNA, 3496 bp, Artificial Sequence
  derived and/or modified sequence
cctggcaatcccatgtggacttctggtagaatgagcaatgcaaagaactggcttggacttggcatgtccttgtacttctgggggctgatggaccttacgaccaccgttctctcggacaccccaacaccacaaggtgaattagaagcactcctgtcagacaagccacagtcacatcagcggaccaagaggagctgggtttggaaccagtttttcgttctggaagagtacactgggaccgaccctttgtatgtcggcaagcttcattcagatatggacaggggagacggatccatcaaatacatcctctcgggagaaggtgctggcatcgtgtttaccatcgacgacaccactggagacatccacgccattcagaggctcgaccgagaggaaagagcccagtatactctaagggctcaagccctagacaggcggacgggcaggccaatggagcccgagtcagagttcatcatcaaaattcaagacatcaatgacaatgagcccaagttcctggacggaccttatgtggccactgtgccagaaatgtcccctgtgggtacctccgtcatccaagtgacagccacagatgcagatgacccgacctacggcaacagtgccagggtggtgtacagcattcttcagggccagccatatttttctgtggactctaaaacaggtgtaattaggacagcgctcatgaacatggacagagaagccaaagaatactacgaagtgattatccaagccaaggacatgggagggcagcttggaggattagctgggaccacaacagtcaacatcaccctctcagatgtcaatgataacccaccccgctttccccagaaacattaccagatgagtgtgttggaatcagctccaattagctccactgtcgggagagtgtttgccaaggacttggatgaaggcatcaatgcagagatgaaatatactattgtggatggagatggtgcagatgcctttgacattagcacagatcccaatttccaagttggtatcataactgtgaagaagcccctgagttttgaaagcaagaaaagctacaccttaaaggtggagggagccaatcctcacctagagatgcgttttctgaacttgggcccatttcaggacacaacaacagtgcacatcagtgtggaagacgtggacgagccccctgtgtttgaacctggcttttactttgtggaggtgcctgaggatgtggcgattggaacaaccatacagatcatttctgccaaggacccagatgtgaccaacaactcaatcagatactccattgatagaagcagtgaccctggaagatttttctatgttgacattacaacaggtgccctaatgacagcaagacccctagaccgggaagaattttcttggcataatatcactgtccttgctatggaaatgaacaatccctcccaggttggaagtgttcctgtcacaatcaaagtcttagatgtgaatgacaatgctccagagttccccagattctatgaagcttttgtctgtgagaacgccaaggcaggacagctgatccagacagtgagtgcggtggaccaagatgacccacgcaatggtcagcatttctactacagcttggctcctgaggctgctaacaaccccaactttaccataagggacaaccaagataacacagcacggattctaaccaggaggtctggtttccggcagcaggagcagagtgtctttcacctgcctatcctgatagcagatagcgggcagcccgtgctgagcagcacaggcacactgaccatccaagtgtgcagctgtgatgacgacggccacgtcatgtcctgcagcccagaggcctacatgctcccagtcagtttgagccggggcgccctcattgccatcctcgcctgcatctttgtcctcttagtgctggtgttgctcattttgtccatgaggcggcaccggaaacaaccatacatcatcgacgacgaggaaaacatccacgagaacatcgtccgctacgacgacgagggcggcggcgaggaggacaccgaggccttcgacatcgcggccatgtggaacccccgggaggcgcaggcgggggccgcccccaagacgcggcaggacatgctgcccgagatcgagagcctctcccgctacgtgcctcagacgtgcgcagtgaacagcactgtccacagctacgtgctggccaagctctacgaggccgacatggacctgtgggcaccgcccttcgactccctccagacgtatatgttcgagggggacggctctgtggcggggtcgctgagctccctgcagtcggccacgtcggactcggaacagagcttcgacttcctgacggactgggggccccgcttccggaagctggccgagctctacggggcgtcggagggacccgcgccgctgtggtgacggaagccaggaggcaggcgcgcgtccaaatccagacgttctccgcgggtgcttcgcggacaaggtgcagccaaccacacgagcaatactgtgctggagagtgagaatgggggtgagcaggcgaacagagctctctctggatcagctttacttgggtagattaagttaaataagcaaaaggaaacccagaaggaagagggcagaatctttaattacctttttttcttttctttttgatttttctgacactgtgtgcgaaggcttggagtccaaggtgttctgacaagggtggcttttctctgccattcgctaaggcctttgtcacttttccaccacagaaaggctctggccttggatacagagatgccaattgaaagcagaaagttctactctcgtatctgttttttatcttatcttattctccatttaagagttttgctggctcaaaccacagaaaccaacccacaagaaagaacaaaaaacttgttactcagtgaaattaacctacttgttctgggatggatggaatttcccgtaacccttttgagacaaggttaagactgaatcagccttgcatgggggtggatgggtgggagggtgggtgaaggaagagacattgactttatgctcaagtttagtggctgaaccaagagatgttggcattacagctcatccaacgccatcaagttagagtgctcgtgtctcctctcagctatttaactgtgcccctgcaaaattgttcagaatgaaaccagaaaaatctgcctcttttgcactgtagatgtctcttccatgtgccaaatgtggagattagatgctacaaatgaaagccaaataaaaaagaagtatctgacaaaagcatgggttagagggctttcctaatctgtgtgaggtcaatccaagggatgtttacatactgtagataacctacttgaacaaaaatcagtattatagagaataaatggatgtaagaaaattacatgtacaagttttgtatatttgttaataattttggtaataaatatgatgtactgcatctcagtaccttagcacttcttttaataaaagttaaatagaa

SEQ ID NO: 280302 - DNA, 2904 bp, Artificial Sequence
  derived and/or modified sequence
agctacgtgagcagaacgcccgccctggagcagttaggaccgaaggtctccggagagtcgccggcggtgccaggaagtcaacttcaagcagattgacttgaaacgggatctcatttaggaagcataagtgtccaatcaaaaactgtgtatttttttaaatttggaaaatactcaagttccagttgcttatcattctccttcattttctgaaaacctggcaatcccatgtggacttctggtagaatgagcaatgcaaagaactggcttggacttggcatgtccttgtacttctgggggctgatggaccttacgaccaccgttctctcggacaccccaacaccacaaggtgaattagaagcactcctgtcagacaagccacagtcacatcagcggaccaagaggagctgggtttggaaccagtttttcgttctggaagagtacactgggaccgaccctttgtatgtcggcaagcttcattcagatatggacaggggagacggatccatcaaatacatcctctcgggagaaggtgctggcatcgtgtttaccatcgacgacaccactggagacatccacgccattcagaggctcgaccgagaggaaagagcccagtatactctaagggctcaagccctagacaggcggacgggcaggccaatggagcccgagtcagagttcatcatcaaaattcaagacatcaatgacaatgagcccaagttcctggacggaccttatgtggccactgtgccagaaatgtcccctgtgggtacctccgtcatccaagtgacagccacagatgcagatgacccgacctacggcaacagtgccagggtggtgtacagcattcttcagggccagccatatttttctgtggactctaaaacaggtgtaattaggacagcgctcatgaacatggacagagaagccaaagaatactacgaagtgattatccaagccaaggacatgggagggcagcttggaggattagctgggaccacaacagtcaacatcaccctctcagatgtcaatgataacccaccccgctttccccagaaacattaccagatgagtgtgttggaatcagctccaattagctccactgtcgggagagtgtttgccaaggacttggatgaaggcatcaatgcagagatgaaatatactattgtggatggagatggtgcagatgcctttgacattagcacagatcccaatttccaagttggtatcataactgtgaagaagcccctgagttttgaaagcaagaaaagctacaccttaaaggtggagggagccaatcctcacctagagatgcgttttctgaacttgggcccatttcaggacacaacaacagtgcacatcagtgtggaagacgtggacgagccccctgtgtttgaacctggcttttactttgtggaggtgcctgaggatgtggcgattggaacaaccatacagatcatttctgccaaggacccagatgtgaccaacaactcaatcagatactccattgatagaagcagtgaccctggaagatttttctatgttgacattacaacaggtgccctaatgacagcaagacccctagaccgggaagaattttcttggcataatatcactgtccttgctatggaaatgaacaatccctcccaggttggaagtgttcctgtcacaatcaaagtcttagatgtgaatgacaatgctccagagttccccagattctatgaagcttttgtctgtgagaacgccaaggcaggacagctgatccagacagtgagtgcggtggaccaagatgacccacgcaatggtcagcatttctactacagcttggctcctgaggctgctaacaaccccaactttaccataagggacaaccaagataacacagcacggattctaaccaggaggtctggtttccggcagcaggagcagagtgtctttcacctgcctatcctgatagcagatagcgggcagcccgtgctgagcagcacaggcacactgaccatccaagtgtgcagctgtgatgacgacggccacgtcatgtcctgcagcccagaggcctacatgctcccagtcagtttgagccggggcgccctcattgccatcctcgcctgcatctttgtcctcttagtgctggtgttgctcattttgtccatgaggcggcaccggaaacaaccatacatcatcgacgacgaggaaaacatccacgagaacatcgtccgctacgacgacgagggcggcggcgaggaggacaccgaggccttcgacatcgcggccatgtggaacccccgggaggcgcaggcgggggccgcccccaagacgcggcaggacatgctgcccgagatcgagagcctctcccgctacgtgcctcagacgtgcgcagtgaacagcactgtccacagctacgtgctggccaagctctacgaggccgacatggacctgtgggcaccgcccttcgactccctccagacgtatatgttcgagggggacggctctgtggcggggtcgctgagctccctgcagtcggccacgtcggactcggaacagagcttcgacttcctgacggactgggggccccgcttccggaagctggccgagctctacggggcgtcggagggacccgcgccgctgtggtgacggaagccaggaggcaggcgcgcgtccaaatccagacgttctccgcgggtgcttcgcggacaaggtgcagccaaccacacgagcaatactgtgctggagagtgagaatgggggtgagcaggcgaacagagctctctctggatcagctttacttgggtagattaagttaaataagcaaaaggaaacccagaaggaagagggcagaatctttaattacctttttttcttttctttttgatttttctgacactgtgtgcgaaggcttggagtccaa

SEQ ID NO: 280303 - DNA, 2683 bp, Artificial Sequence
  derived and/or modified sequence
gatgtgcgccgggaaggggaccagagagccaggctccggggaggcgcaggcacctacggggccgatccctggtccgtgcctcgcgccgcgcccccgccggagctcggctgtgggaggagaatgtggaagtcaacttcaagcagattgacttgaaacgggatctcatttaggaagcataagtgtccaatcaaaaactgtgtatttttttaaatttggaaaatactcaagttccagttgcttatcattctccttcattttctgaaaacctggcaatcccatgtggacttctggtagaatgagcaatgcaaagaactggcttggacttggcatgtccttgtacttctgggggctgatggaccttacgaccaccgttctctcggacaccccaacaccacaaggtgaattagaagcactcctgtcagacaagccacagtcacatcagcggaccaagaggagctgggtttggaaccagtttttcgttctggaagagtacactgggaccgaccctttgtatgtcggcaagcttcattcagatatggacaggggagacggatccatcaaatacatcctctcgggagaaggtgctggcatcgtgtttaccatcgacgacaccactggagacatccacgccattcagaggctcgaccgagaggaaagagcccagtatactctaagggctcaagccctagacaggcggacgggcaggccaatggagcccgagtcagagttcatcatcaaaattcaagacatcaatgacaatgagcccaagttcctggacggaccttatgtggccactgtgccagaaatgtcccctgtgggtacctccgtcatccaagtgacagccacagatgcagatgacccgacctacggcaacagtgccagggtggtgtacagcattcttcagggccagccatatttttctgtggactctaaaacaggtgtaattaggacagcgctcatgaacatggacagagaagccaaagaatactacgaagtgattatccaagccaaggacatgggagggcagcttggaggattagctgggaccacaacagtcaacatcaccctctcagatgtcaatgataacccaccccgctttccccagaaacattaccagatgagtgtgttggaatcagctccaattagctccactgtcgggagagtgtttgccaaggacttggatgaaggcatcaatgcagagatgaaatatactattgtggatggagatggtgcagatgcctttgacattagcacagatcccaatttccaagttggtatcataactgtgaagaagcccctgagttttgaaagcaagaaaagctacaccttaaaggtggagggagccaatcctcacctagagatgcgttttctgaacttgggcccatttcaggacacaacaacagtgcacatcagtgtggaagacgtggacgagccccctgtgtttgaacctggcttttactttgtggaggtgcctgaggatgtggcgattggaacaaccatacagatcatttctgccaaggacccagatgtgaccaacaactcaatcagatactccattgatagaagcagtgaccctggaagatttttctatgttgacattacaacaggtgccctaatgacagcaagacccctagaccgggaagaattttcttggcataatatcactgtccttgctatggaaatgaacaatccctcccaggttggaagtgttcctgtcacaatcaaagtcttagatgtgaatgacaatgctccagagttccccagattctatgaagcttttgtctgtgagaacgccaaggcaggacagctgatccagacagtgagtgcggtggaccaagatgacccacgcaatggtcagcatttctactacagcttggctcctgaggctgctaacaaccccaactttaccataagggacaaccaagataacacagcacggattctaaccaggaggtctggtttccggcagcaggagcagagtgtctttcacctgcctatcctgatagcagatagcgggcagcccgtgctgagcagcacaggcacactgaccatccaagtgtgcagctgtgatgacgacggccacgtcatgtcctgcagcccagaggcctacatgctcccagtcagtttgagccggggcgccctcattgccatcctcgcctgcatctttgtcctcttagtgctggtgttgctcattttgtccatgaggcggcaccggaaacaaccatacatcatcgacgacgaggaaaacatccacgagaacatcgtccgctacgacgacgagggcggcggcgaggaggacaccgaggccttcgacatcgcggccatgtggaacccccgggaggcgcaggcgggggccgcccccaagacgcggcaggacatgctgcccgagatcgagagcctctcccgctacgtgcctcagacgtgcgcagtgaacagcactgtccacagctacgtgctggccaagctctacgaggccgacatggacctgtgggcaccgcccttcgactccctccagacgtatatgttcgagggggacggctctgtggcggggtcgctgagctccctgcagtcggccacgtcggactcggaacagagcttcgacttcctgacggactgggggccccgcttccggaagctggccgagctctacggggcgtcggagggacccgcgccgctgtggtga

SEQ ID NO: 280304 - DNA, 2406 bp, Artificial Sequence
  derived and/or modified sequence
atgtggaccagcggcagaatgagcaacgccaagaactggctgggcctgggcatgagcctgtacttctggggcctgatggacctgaccaccaccgtgctgagcgacacccccaccccccagggcgagctggaggccctgctgagcgacaagccccagagccaccagagaaccaagagaagctgggtgtggaaccagttcttcgtgctggaggagtacaccggcaccgaccccctgtacgtgggcaagctgcacagcgacatggacagaggcgacggcagcatcaagtacatcctgagcggcgagggcgccggcatcgtgttcaccatcgacgacaccaccggcgacatccacgccatccagagactggacagagaggagagagcccagtacaccctgagagcccaggccctggacagaagaaccggcagacccatggagcccgagagcgagttcatcatcaagatccaggacatcaacgacaacgagcccaagttcctggacggcccctacgtggccaccgtgcccgagatgagccccgtgggcaccagcgtgatccaggtgaccgccaccgacgccgacgaccccacctacggcaacagcgccagagtggtgtacagcatcctgcagggccagccctacttcagcgtggacagcaagaccggcgtgatcagaaccgccctgatgaacatggacagagaggccaaggagtactacgaggtgatcatccaggccaaggacatgggcggccagctgggcggcctggccggcaccaccaccgtgaacatcaccctgagcgacgtgaacgacaacccccccagattcccccagaagcactaccagatgagcgtgctggagagcgcccccatcagcagcaccgtgggcagagtgttcgccaaggacctggacgagggcatcaacgccgagatgaagtacaccatcgtggacggcgacggcgccgacgccttcgacatcagcaccgaccccaacttccaggtgggcatcatcaccgtgaagaagcccctgagcttcgagagcaagaagagctacaccctgaaggtggagggcgccaacccccacctggagatgagattcctgaacctgggccccttccaggacaccaccaccgtgcacatcagcgtggaggacgtggacgagccccccgtgttcgagcccggcttctacttcgtggaggtgcccgaggacgtggccatcggcaccaccatccagatcatcagcgccaaggaccccgacgtgaccaacaacagcatcagatacagcatcgacagaagcagcgaccccggcagattcttctacgtggacatcaccaccggcgccctgatgaccgccagacccctggacagagaggagttcagctggcacaacatcaccgtgctggccatggagatgaacaaccccagccaggtgggcagcgtgcccgtgaccatcaaggtgctggacgtgaacgacaacgcccccgagttccccagattctacgaggccttcgtgtgcgagaacgccaaggccggccagctgatccagaccgtgagcgccgtggaccaggacgaccccagaaacggccagcacttctactacagcctggcccccgaggccgccaacaaccccaacttcaccatcagagacaaccaggacaacaccgccagaatcctgaccagaagaagcggcttcagacagcaggagcagagcgtgttccacctgcccatcctgatcgccgacagcggccagcccgtgctgagcagcaccggcaccctgaccatccaggtgtgcagctgcgacgacgacggccacgtgatgagctgcagccccgaggcctacatgctgcccgtgagcctgagcagaggcgccctgatcgccatcctggcctgcatcttcgtgctgctggtgctggtgctgctgatcctgagcatgagaagacacagaaagcagccctacatcatcgacgacgaggagaacatccacgagaacatcgtgagatacgacgacgagggcggcggcgaggaggacaccgaggccttcgacatcgccgccatgtggaaccccagagaggcccaggccggcgccgcccccaagaccagacaggacatgctgcccgagatcgagagcctgagcagatacgtgccccagacctgcgccgtgaacagcaccgtgcacagctacgtgctggccaagctgtacgaggccgacatggacctgtgggccccccccttcgacagcctgcagacctacatgttcgagggcgacggcagcgtggccggcagcctgagcagcctgcagagcgccaccagcgacagcgagcagagcttcgacttcctgaccgactggggccccagattcagaaagctggccgagctgtacggcgccagcgagggccccgcccccctgtggtag

SEQ ID NO: 280305 - DNA, 765 bp, Artificial Sequence
  derived and/or modified sequence
atgactgtcggcaaagaacccttcccaaccatttacgtggacagccaaaaagagaacgaacgatggaacgtgatcagtaagtctcagttaaaaaatataaaaaagatgtggcaccgagaacagatgaaatccgagtcacgcgaaaaaaaagaagccgaggattctttgcgtcgagagaagaacttggaggaggccaaaaagataactataaagaacgaccccagccttcctgaacccaaatgtgtcaagatcggcgcactcgagggctacagaggccagagagttaaggtgtttggatgggtccacaggttgaggagacagggcaagaacctgatgttccttgtcttaagggacggaactgggtatctccaatgcgtcctggctgacgaactgtgccaatgctataacggtgtactgctgagcacagagtcttctgtggctgtgtatgggatgcttaatctgacccccaaagggaaacaagcacccggtggacacgagctttcctgcgacttctgggagcttattggactggctccagcgggcggcgccgataatcttattaatgaagaaagcgatgtggatgtccagttgaataatcggcacatgatgatccggggcgaaaacatgagcaagatactcaaagccaggtccatggttacacggtgctttcgagaccatttcttcgatagaggatattacgaggtgtccatgcattcctccgcctttgctaagaacatgtttttcgcggtgttgaaacttgaatag

SEQ ID NO: 280306 - DNA, 900 bp, Artificial Sequence
  derived and/or modified sequence
atgtgtgaagactggtgttttagagaccattttttcgatcgcggttactatgaggtcacaccccccaccctggtgcagacccaggtcgagggtggcgctacgctgtttaagctggactactttggcgaggaagcattcctgacacaatccagccagctgtacctggagacctgcctgcctgctctcggcgatgtcttctgcatcgcccagagttaccgggcagagcagtctcggactcgacggcacctggcagaatacactcatgtggaagctgagtgtcctttcctgacattcgatgacctgctgaaccggctcgaagatctcgtgtgcgacgtcgtggatcggatcctgaagtcacccgccggtagcatcgttcacgagttgaaccctaacttccagccaccaaaacggccttttaagcggatgaactactctgacgcgatcgtgtggctcaaggagcacgacgtcaagaaggaggacggcacgttttatgagttcggagaggatattcctgaagcccctgagcggctgatgacggacacaattaacgagcctattctgctgtgtagatttccagtagaaatcaaatcattttatatgcagaggtgccccgaggactctagactgaccgaaagcgtcgacgttttaatgcccaacgtcggagagatcgtgggtggatctatgcgtatattcgacagcgaggagatcctcgccggctacaaaagagaaggaatcgacccaacaccttactactggtacacagaccaacggaaatacggaacctgtcctcacggggggtacgggctagggctggaacggttccttacatggattttgaaccggtaccatatcagagatgtgtgcctgtatcccagatttgtccagcgctgtaccccttag

SEQ ID NO: 280307 - DNA, 765 bp, Artificial Sequence
  derived and/or modified sequence
atgacagtgggcaaggagcccttccccaccatctacgtggacagccagaaggaaaatgaacgctggaatgtcatcagcaagagccagctgaagaacatcaagaagatgtggcaccgggagcagatgaagtctgagagccgggagaagaaggaggccgaggacagcctgcggcgggagaagaacctggaggaggccaagaagatcaccatcaagaatgaccccagcctgcctgagcccaagtgtgtgaagatcggggccctggagggctaccggggccagagggtgaaggtgtttggctgggtgcaccggctgcggcggcagggcaagaacctgatgttcctggtgctgagagatggcaccggctacctgcagtgtgtgctggctgatgagctgtgccagtgctacaacggggtgctgctgagcacagagagctctgtggccgtgtatggcatgctgaacctgacccccaagggcaagcaggcccctgggggccacgagctgagctgtgacttctgggagctgattggcctggccccagctgggggcgctgacaacctgatcaatgaggagagtgatgtggatgtgcagctgaacaacagacacatgatgatcagaggagagaacatgagcaagatcctgaaggcccgctccatggtgacccgctgcttccgggaccacttctttgaccggggctactatgaggtgtccatgcacagcagcgcctttgccaagaacatgttctttgctgtgctgaagctggagtag

SEQ ID NO: 280308 - DNA, 900 bp, Artificial Sequence
  derived and/or modified sequence
atgtgtgaggactggtgcttccgggaccacttctttgaccggggctactatgaggtgaccccacccaccctggtgcagacccaggtggagggcggggccaccctcttcaagctggactactttggagaggaggccttcctgacccagagcagccagctgtacctggagacctgcctgcctgccctgggagatgtgttctgcatcgcccagagctacagagctgagcagagcaggacccggcggcacctggccgagtacacccacgtggaggccgagtgccccttcctgacctttgatgacctgctgaaccggctggaggacctggtgtgtgatgtggtggaccgcatcctgaagagccctgctggcagcatcgtgcatgagctgaaccccaacttccagccccccaagaggcccttcaagaggatgaactacagtgatgccatcgtgtggctgaaggagcatgatgtgaagaaggaggatggcaccttctatgaatttggagaggacatccctgaggcccctgagcggctgatgacagacaccatcaatgagcccatcctgctgtgccgcttccctgtggagatcaagagcttctacatgcagcgctgcccagaggacagccggctgacagagagcgtggatgtgctgatgcccaacgtgggggagatcgtgggcggctccatgaggatctttgattctgaggagatcctggccggctacaagcgggagggcatcgaccccaccccctactactggtacacagaccagaggaaatatggcacctgcccccacggcggctacggcctgggcctggagcgcttcctgacctggatcctgaaccgctaccacatcagagatgtgtgcctgtaccccaggtttgtgcagcgctgcaccccctag

SEQ ID NO: 280309 - DNA, 765 bp, Artificial Sequence
  derived and/or modified sequence
atgaccgtgggcaaggagcccttccccaccatctacgtggacagccagaaggaaaatgaacggtggaatgtgatatccaaaagccagctcaaaaacatcaagaagatgtggcatagggagcaaatgaagagtgaatctagagaaaagaaggaggccgaagattccctaaggcgggagaagaacttggaggaagctaaaaaaattactatcaaaaacgaccccagccttccagagccaaaatgcgtgaagataggggctttggagggatatcgcggccagcgcgtgaaggtgtttggctgggtgcatagactccgtcgacagggcaaaaacttaatgtttttagtgttacgcgatgggacaggatacctgcagtgtgtgctcgcagacgaattatgccaatgctacaacggagtcctgctctccactgaatccagcgtggctgtgtatggaatgctaaatctcacccctaagggcaagcaagctccaggtgggcacgagctgtcatgcgacttttgggagctgataggccttgctcctgctggcggagccgataatctgatcaatgaggaatctgatgtcgatgtgcagctgaacaatcggcacatgatgataaggggagagaacatgtcaaaaatactaaaggcaagatccatggtgacacgctgcttccgagatcacttctttgaccggggctattatgaagtttcaatgcactcgtccgctttcgcgaagaacatgttctttgccgtgctcaaactcgagtag

SEQ ID NO: 280310 - DNA, 900 bp, Artificial Sequence
  derived and/or modified sequence
atgtgcgaggactggtgcttccgggaccacttcttcgaccggggctactacgaggtcaccccacccacccttgtgcagacccaagtggaaggcggagctaccctttttaaactggactattttggagaagaagcttttctgacacagtcgtctcagctttatctggaaacatgcctgcccgcactaggcgacgtgttctgcatcgcacagtcatatcgcgccgaacaatcccgcacacgtcggcatctggccgaatacacccatgttgaagctgaatgtcctttcctgacctttgatgatcttctcaacagacttgaagacctggtgtgcgacgtggtcgaccggattctgaagagcccggcaggctccattgtccacgaactgaaccccaatttccagccaccaaagcgacctttcaagaggatgaattactccgatgcaatcgtgtggctgaaggagcatgatgtgaaaaaggaggacggcacgttctacgagtttggagaagacatacccgaagcccctgaaagactgatgacagacaccatcaacgagccaatactactctgccgctttcccgtcgagatcaagtcattttacatgcagcggtgtccggaagactcaagacttaccgaaagcgtcgacgtcctgatgcctaacgttggggagattgttggcgggtctatgcgcatatttgactcagaggagatcctggctggctacaagagagagggtatcgaccctactccctattactggtataccgaccagcggaagtacgggacctgtccacatggaggatacggactgggcctagaaaggtttctaacctggatcctcaataggtaccatatcagagatgtttgcttatatccccggtttgtgcaacgatgcaccccctag

SEQ ID NO: 280311 - DNA, 765 bp, Artificial Sequence
  derived and/or modified sequence
atgacggtgggcaaagaaccgttccccacaatatacgtggacagtcaaaaggaaaatgaacgttggaatgtgatcagtaagtctcaacttaaaaacatcaagaagatgtggcatcgcgagcagatgaaaagcgagagcagagaaaagaaggaggcagaggactccctccggagggaaaagaatttagaggaggcaaaaaagatcacaatcaagaacgatccaagcctccccgagcccaagtgtgttaagattggagctttggaggggtacagaggccaaagagtcaaggtattcggctgggtccaccggctcaggcgacagggcaaaaatctgatgtttctggttctgcgcgatggaactggatacctgcagtgtgtgttggccgacgagctctgccaatgctataacggtgtgttattgtccacagaatcaagtgtcgcggtctacgggatgctgaatctgacacctaaagggaagcaggctcccggtggacacgaactttcatgcgatttttgggaattgatcggtctggctcccgctggaggggctgacaacttgatcaacgaggaatcagacgtcgacgtgcagctgaacaataggcatatgatgattcgaggcgagaacatgagcaagattcttaaggctcggagcatggtgactcgctgttttcgcgatcacttttttgatcggggatactatgaggtgtcaatgcacagttctgcattcgcaaagaacatgttcttcgctgtgctgaagctggaatag

SEQ ID NO: 280312 - DNA, 900 bp, Artificial Sequence
  derived and/or modified sequence
atgtgtgaagattggtgttttcgagatcacttctttgaccggggatattatgaggtcaccccacccaccctcgtccagacccaggtcgagggtggcgcaaccttatttaagcttgattactttggagaagaggctttcctgacccagagctcgcaactgtacctggagacttgcctgcctgccctcggtgatgtgttctgtattgctcagagttaccgggctgagcagtctagaactaggcgccatttagctgaatatactcatgtcgaagccgagtgtccgtttctgaccttcgatgacctactaaaccggttagaggacctggtttgtgatgtcgtcgaccggatcttgaaatcccctgccggttctattgtgcacgagctgaatcctaattttcagccacctaaacggccattcaaaagaatgaattactcggatgccatcgtgtggctcaaggaacatgacgtcaagaaggaggacgggactttctatgagttcggcgaggatataccagaagccccagagagactgatgacagataccatcaacgagcccatcttactatgtcgcttccccgtggaaatcaaaagcttctatatgcagcgttgcccagaagatagcaggctcactgaatctgttgacgtgctcatgcctaatgtcggtgagattgttggcggatctatgcgcatctttgacagcgaagagatactggccggatacaaaagggaggggattgatccaactccctattactggtacactgatcaacggaaatatggaacttgtcctcacggcggatatgggctgggtctagaacggttcctgacctggattctcaacaggtaccacattagagacgtgtgtttgtaccctcggtttgttcaacgctgcactccctag

SEQ ID NO: 280313 - DNA, 1097 bp, Artificial Sequence
  derived and/or modified sequence
aatcgcggaaaccgccggtgcacgttggagtcataagacggcgtcggtgttgcagtctgtgtccttggaggtgaccagggccactgcaggcatggtgctaggctttgatgacagtagggaaagaaccatttcctaccatttacgtagattcacaaaaagaaaatgagaggtggaatgttatttctaaatcacagttgaagaacattaaaaagatgtggcatagggaacaaatgaagagtgaatcccgggaaaagaaagaggcagaagatagtttacgaagagaaaagaacctggaagaagcaaagaagattaccattaaaaatgatccaagtctcccagagccaaaatgtgtgaagattggtgcgttagaaggatatagaggccaaagagtaaaggtgtttggctgggtccacaggctgcgcaggcaaggaaagaatttaatgtttctggtgttgcgagatggtacaggttatcttcagtgtgtcttggcggatgagttgtgtcagtgctacaatggagttctcttgtccacggagagcagtgttgcagtgtatggaatgctaaatcttaccccaaagggcaagcaggctccaggtggccatgagctgagttgtgacttctgggaactaattgggttggcccctgctggaggagctgacaacctgatcaatgaggagtctgacgttgatgtccagctcaacaacagacacatgatgatccgaggagaaaacatgtccaaaatcctaaaagcacgatccatggtcaccaggtgctttagagatcacttctttgatagggggtactatgaagtaagtatgcattcgtcagcttttgcaaagaatatgttttttgccgttttgaaacttgaatagtggtgctcacgatagcattgatttattccttctttgcatttgaacaggttactcctccaacattagtgcaaacacaagtagaaggtggtgccacactcttcaagcttgactattttggggaagaggcatttttgactcaatcctctcagttgtacttggagacctgcctcccagccctgggagatgttttttgtattgctcagtcataccgggcagagcagtcca

SEQ ID NO: 280314 - DNA, 1608 bp, Artificial Sequence
  derived and/or modified sequence
gttggagtcataagacggcgtcggtgttgcagtctgtgtccttggaggtgaccagggccactgcaggcatggtgctagcagagctgtacgtctctgaccgagagggaagcgatgccacgggagatggaaccaaggagaaaccatttaaaacaggtctaaaggctttgatgacagtagggaaagaaccatttcctaccatttacgtagattcacaaaaagaaaatgagaggtggaatgttatttctaaatcacagttgaagaacattaaaaagatgtggcatagggaacaaatgaagagtgaatcccgggaaaagaaagaggcagaagatagtttacgaagagaaaagaacctggaagaagcaaagaagattaccattaaaaatgatccaagtctcccagagccaaaatgtgtgaagattggtgctttagagatcacttctttgatagggggtactatgaagttactcctccaacattagtgcaaacacaagtagaaggtggtgccacactcttcaagcttgactattttggggaagaggcatttttgactcaatcctctcagttgtacttggagacctgcctcccagccctgggagatgttttttgtattgctcagtcataccgggcagagcagtccagaacacgaaggcacctggctgagtacactcacgtggaagctgagtgtcctttcctgacttttgacgacctcctgaaccggttggaggacttggtttgtgatgtggtagatcgaatattgaagtcacctgcagggagcatagtgcatgagctcaacccgaactttcagccccccaaacggcctttcaaacggatgaactattcagatgctatcgtttggctaaaagaacatgatgtaaagaaagaagatggaactttctatgaatttggagaagatatcccagaagctcctgagagactgatgacagacaccattaatgaaccaatcttgctgtgtcgatttcctgtggagatcaagtccttctacatgcagcgatgtcctgaggattcccgtcttactgaatctgtcgacgtgttgatgcccaatgttggtgagattgtgggaggctcaatgcgtatctttgatagtgaagaaatactggcaggttataaaagggaagggattgaccccactccctattactggtatacggatcagagaaaatacggtacatgtccccatggaggatatggcttgggcttggaacgattcttaacgtggattctgaataggtatcacatccgagacgtgtgcttataccctcgatttgtccagcgttgcacgccataaccattttctccagaagcgtggaggaaagattatgaaaggaacaggctctttaaaaaagaaaacaaaaagccagaatcttcctttttttgtttcattggggtttctctttctgtttttctttctactaccataaaaactatctcaaatcacctgaacatcaagtgatattaaggttgtcatcttaagaaaaaatatccatttttttcttaagttcgggaaacaaagttcggggaaaatacctggcatgaaactgtagttagggatacatttcagcattttactcactttatccaagttattca

SEQ ID NO: 280315 - DNA, 937 bp, Artificial Sequence
  derived and/or modified sequence
ggtgcacgttggagtcataagacggcgtcggtgttgcagtctgtgtccttggaggtgaccagggccactgcaggcatggtgctagcagagctgtacgtctctgaccgagagggaagcgatgccacgggagatggaaccaaggagaaaccatttaaaacaggtctaaaggctttgatgacagtagggaaagaaccatttcctaccatttacgtagattcacaaaaagaaaatgagaggtggaatgttatttctaaatcacagttgaagaacattaaaaagatgtggcatagggaacaaatgaagagtgaatcccgggaaaagaaagaggcagaagatagtttacgaagagaaaagaacctggaagaagcaaagaagattaccattaaaaatgatccaagtctcccagagccaaaatgtgtgaagattggtgcgttagaaggatatagaggccaaagagtaaaggtgtttggctgggtccacaggctgcgcaggcaagtgtcagtgctacaatggagttctcttgtccacggagagcagtgttgcagtgtatggaatgctaaatcttaccccaaagggcaagcaggctccaggtggccatgagctgagttgtgacttctgggaactaattgggttggcccctgctggaggagctgacaacctgatcaatgaggagtctgacgttgatgtccagctcaacaacagacacatgatgatccgaggagaaaacatgtccaaaatcctaaaagcacgatccatggtcaccaggtgctttagagatcacttctttgatagggggtactatgaagttactcctccaacattagtgcaaacacaagtagaaggtggtgccacactcttcaagcttgactattttggggaagaggcatttttgactcaatcctctcagttgtacttggagacctgcctcccagccctg

SEQ ID NO: 280316 - DNA, 765 bp, Artificial Sequence
  derived and/or modified sequence
atgaccgtgggcaaggagcccttccccaccatctacgtggacagccagaaggagaacgagagatggaacgtgatcagcaagagccagctgaagaacatcaagaagatgtggcacagagagcagatgaagagcgagagcagagagaagaaggaggccgaggacagcctgagaagagagaagaacctggaggaggccaagaagatcaccatcaagaacgaccccagcctgcccgagcccaagtgcgtgaagatcggcgccctggagggctacagaggccagagagtgaaggtgttcggctgggtgcacagactgagaagacagggcaagaacctgatgttcctggtgctgagagacggcaccggctacctgcagtgcgtgctggccgacgagctgtgccagtgctacaacggcgtgctgctgagcaccgagagcagcgtggccgtgtacggcatgctgaacctgacccccaagggcaagcaggcccccggcggccacgagctgagctgcgacttctgggagctgatcggcctggcccccgccggcggcgccgacaacctgatcaacgaggagagcgacgtggacgtgcagctgaacaacagacacatgatgatcagaggcgagaacatgagcaagatcctgaaggccagaagcatggtgaccagatgcttcagagaccacttcttcgacagaggctactacgaggtgagcatgcacagcagcgccttcgccaagaacatgttcttcgccgtgctgaagctggagtag

SEQ ID NO: 280317 - DNA, 900 bp, Artificial Sequence
  derived and/or modified sequence
atgtgcgaggactggtgcttcagagaccacttcttcgacagaggctactacgaggtgaccccccccaccctggtgcagacccaggtggagggcggcgccaccctgttcaagctggactacttcggcgaggaggccttcctgacccagagcagccagctgtacctggagacctgcctgcccgccctgggcgacgtgttctgcatcgcccagagctacagagccgagcagagcagaaccagaagacacctggccgagtacacccacgtggaggccgagtgccccttcctgaccttcgacgacctgctgaacagactggaggacctggtgtgcgacgtggtggacagaatcctgaagagccccgccggcagcatcgtgcacgagctgaaccccaacttccagccccccaagagacccttcaagagaatgaactacagcgacgccatcgtgtggctgaaggagcacgacgtgaagaaggaggacggcaccttctacgagttcggcgaggacatccccgaggcccccgagagactgatgaccgacaccatcaacgagcccatcctgctgtgcagattccccgtggagatcaagagcttctacatgcagagatgccccgaggacagcagactgaccgagagcgtggacgtgctgatgcccaacgtgggcgagatcgtgggcggcagcatgagaatcttcgacagcgaggagatcctggccggctacaagagagagggcatcgaccccaccccctactactggtacaccgaccagagaaagtacggcacctgcccccacggcggctacggcctgggcctggagagattcctgacctggatcctgaacagataccacatcagagacgtgtgcctgtaccccagattcgtgcagagatgcaccccctag

SEQ ID NO: 280318 - DNA, 930 bp, Artificial Sequence
  derived and/or modified sequence
atggattctctgggggctgtatctacccgtttgggctttgatctgtttaaggagttaaagaaaacaaatgatggcaacatctttttcagcccagtgggaattctgacagcgatcggcatggtgctgctgggaactaggggtgcaacggcaagccagctggaggaggtgttccacagcgagaaggaaaccaaatcttctcggattaaagctgaggaaaaggaagtggagaaaatcaaagatctcttcccagacggctcaatcagtagcagtactaaactcgtcttggtgaacatggtgtactttaaggggcaatgggatcgcgagttcaaaaaggaaaacaccaaagaagagaagttctggatgaataagagcacatctaagtccgtccagatgatgacacagagccattccttctcattcacctttcttgaggacttacaggcaaagatcctgggcattccgtacaagaacaacgatctgagtatgtttgtcctgctgcctaatgatattgatggtctggagaagattattgataaaatcagtcctgaaaaactggtggaatggacctcccctggccatatggaggagcgtaaggttaatctgcacctgcctcgctttgaagtcgaggacggatacgatctggaggccgtgttagctgccatgggcatgggcgacgcttttagcgagcacaaagcggattacagcggaatgtctagtgggagcggcctctatgcgcagaaatttctgcactcatcttttgtagccgttactgaggaagggactgaggctgctgcagccaccggtatcgggttcaccgtgacctctgcacccggacatgagaatgtccattgcaaccaccctttcctgttctttatccggcacaatgagtctaattcaatactcttcttcggccgcttctccagcccttag

SEQ ID NO: 280319 - DNA, 930 bp, Artificial Sequence
  derived and/or modified sequence
atggacagcctgggcgctgtgtccacccggctgggctttgacctcttcaaggagctgaagaagaccaatgatggcaacatcttcttcagccctgtgggcatcctgacagccatcggcatggtgctgctgggcaccaggggggccacagccagccagctggaggaggtgttccacagcgagaaggagaccaagagcagccgcatcaaggccgaggagaaggaggtggagaagatcaaggacctcttcccagatggcagcatcagcagcagcaccaagctggtgctggtgaacatggtgtacttcaagggccagtgggaccgggagttcaagaaggagaacaccaaggaggagaagttctggatgaacaagagcaccagcaagtctgtgcagatgatgacccagagccacagcttctccttcaccttcctggaggacctgcaggccaagatcctgggcatcccctacaagaacaatgacctgtccatgtttgtgctgctgcccaatgacattgatggcctggagaagatcatcgacaagatcagccctgagaagctggtggagtggaccagccctggccacatggaggagaggaaggtgaacctgcacctgcccaggtttgaggtggaggatggctatgacctggaggccgtgctggccgccatgggcatgggagatgccttcagcgagcacaaggctgactacagcggcatgagcagcggcagcggcctgtatgcccagaagttcctgcacagcagctttgtggccgtgacagaggagggcacagaagctgctgctgccactggaattggcttcaccgtgaccagcgcccctggccatgaaaatgtgcactgcaaccaccccttcctgttcttcatccgccacaatgaaagcaacagcatcctcttcttcggccgcttcagcagcccctag

SEQ ID NO: 280320 - DNA, 930 bp, Artificial Sequence
  derived and/or modified sequence
atggacagcctgggcgccgtgagcacccggctgggcttcgacctgttcaaagagctgaaaaaaaccaacgacggcaacatattcttcagtccagtgggtatcctgacagccattggtatggtactcttaggtactcggggtgccacggctagccagctggaggaggtcttccactccgaaaaagagaccaaaagttcccggatcaaggcggaggaaaaggaagtagagaagattaaagacctgtttcccgatggtagcattagctcatcgaccaagttagtgctagtgaacatggtgtatttcaaaggccaatgggacagagaatttaaaaaagaaaacactaaggaggagaaattttggatgaataagtctacaagcaaatcagtgcagatgatgactcaatctcacagctttagcttcaccttcctggaggatttgcaggccaagattctgggtatcccttataaaaataacgacctgtccatgtttgtactcctgccaaacgacatcgacggtttggagaaaatcatagacaagatatcccccgagaagctagtggaatggacgtcacccggacatatggaggagcgaaaggtcaatctccacttgcccagatttgaagtggaggatggctatgatctcgaggctgtcctcgcagccatgggaatgggcgacgctttcagtgagcacaaggccgattacagcggtatgtcaagtggctccggactgtacgcccaaaaattcctccattcaagttttgttgcggtcaccgaggaagggacagaggcagctgctgccactggaattggtttcacagtgacctcagctccaggccacgaaaacgtccattgtaaccaccctttcctcttttttattcgtcataatgagtccaactcaattctctttttcggccgtttctcctctccatag

SEQ ID NO: 280321 - DNA, 930 bp, Artificial Sequence
  derived and/or modified sequence
atggactccctcggggcagtgtccacccgcctcgggttcgatcttttcaaggagcttaagaaaaccaatgacgggaacatcttcttctctccagtggggatcctgaccgcaatcggtatggtcctcctgggaacaagaggagcaaccgccagccaactggaagaggtttttcattctgaaaaagaaaccaagagctcccgcataaaggctgaggagaaggaggttgaaaaaataaaagatctcttccctgacgggtccatcagttcttctactaagctggttctcgttaatatggtttatttcaagggccagtgggatcgcgagttcaagaaagaaaataccaaggaggagaaattttggatgaataagtctacctctaaatctgtgcagatgatgactcagagtcactcattttcctttaccttcctcgaggacctccaagctaagatcctgggtattccttataaaaataatgatcttagcatgtttgttctgctgcctaacgatattgacgggctggagaagataattgacaaaataagccctgaaaaactggtcgaatggacctcacccggtcatatggaagaacgcaaagtgaacttacatctcccgaggtttgaggtagaagacggttatgatctcgaagctgttcttgccgctatgggcatgggtgacgccttttctgaacacaaagctgattactctggcatgtctagcggaagcggactgtacgcccagaagttcctgcacagctcctttgtcgctgtaacagaggaaggaacggaggcagctgcggctactggtattggatttaccgtgacctccgccccaggtcacgaaaacgtgcactgcaatcatccattcttatttttcataaggcacaatgaatcaaactccattctgttctttgggcgattcagttccccatag

SEQ ID NO: 280322 - DNA, 1437 bp, Artificial Sequence
  derived and/or modified sequence
actgctgaagcagatgtggagaactataaattaaggatcccagctacttaattgacttatgcttcctagttcgttgcccagccaccaccgtctctccaaaaacccgaggtctcgctaaaatcatcatggattcacttggcgccgtcagcactcgacttgggtttgatcttttcaaagagctgaagaaaacaaatgatggcaacatcttcttttcccctgtgggcatcttgactgcaattggcatggtcctcctggggacccgaggagccaccgcttcccagttggaggaggtgtttcactctgaaaaagagacgaagagctcaagaataaaggctgaagaaaaagaggtggaaaaaatcaaggacttgttcccagatggctctattagtagctctaccaagctggtgctggtgaacatggtttattttaaagggcaatgggacagggagtttaagaaagaaaatactaaggaagagaaattttggatgaataagagcacaagtaaatctgtacagatgatgacacagagccattcctttagcttcactttcctggaggacttgcaggccaaaattctagggattccatataaaaacaacgacctaagcatgtttgtgcttctgcccaacgacatcgatggcctggagaagataatagataaaataagtcctgagaaattggtagagtggactagtccagggcatatggaagaaagaaaggtgaatctgcacttgccccggtttgaggtggaggacggttacgatctagaggcggtcctggctgccatggggatgggcgatgccttcagtgagcacaaagccgactactcgggaatgtcgtcaggctccgggttgtacgcccagaagttcctgcacagttcctttgtggcagtaactgaggaaggcaccgaggctgcagctgccaccggcataggctttactgtcacatccgccccaggtcatgaaaatgttcactgcaatcatcccttcctgttcttcatcaggcacaatgaatccaacagcatcctcttcttcggcagattttcttctccttaagatgatcgttgccatggcattgctgcttttagcaaaaaacaactaccagtgttactcatatgattatgaaaatcgtccattcttttaaatgttgtctcacttgcatttccagtcttggccatcaaatcaatgatttaatgactccaataatgtgtgtgtttataaccatcctcgaaagtgaaatgtccttttctttgtgccatgcgtaaggtgagtcaaaccaaacctcattgataatctccctttggtttcctttgaaagtaaattggtatcttgtagttttgtgcacacgaaaggagagaaagtctctccagtaaagagtacgaactagtaattttggggggtctctctaattctggtattttgacatgttataatacgc

SEQ ID NO: 280323 - DNA, 930 bp, Artificial Sequence
  derived and/or modified sequence
atggacagcctgggcgccgtgagcaccagactgggcttcgacctgttcaaggagctgaagaagaccaacgacggcaacatcttcttcagccccgtgggcatcctgaccgccatcggcatggtgctgctgggcaccagaggcgccaccgccagccagctggaggaggtgttccacagcgagaaggagaccaagagcagcagaatcaaggccgaggagaaggaggtggagaagatcaaggacctgttccccgacggcagcatcagcagcagcaccaagctggtgctggtgaacatggtgtacttcaagggccagtgggacagagagttcaagaaggagaacaccaaggaggagaagttctggatgaacaagagcaccagcaagagcgtgcagatgatgacccagagccacagcttcagcttcaccttcctggaggacctgcaggccaagatcctgggcatcccctacaagaacaacgacctgagcatgttcgtgctgctgcccaacgacatcgacggcctggagaagatcatcgacaagatcagccccgagaagctggtggagtggaccagccccggccacatggaggagagaaaggtgaacctgcacctgcccagattcgaggtggaggacggctacgacctggaggccgtgctggccgccatgggcatgggcgacgccttcagcgagcacaaggccgactacagcggcatgagcagcggcagcggcctgtacgcccagaagttcctgcacagcagcttcgtggccgtgaccgaggagggcaccgaggccgccgccgccaccggcatcggcttcaccgtgaccagcgcccccggccacgagaacgtgcactgcaaccaccccttcctgttcttcatcagacacaacgagagcaacagcatcctgttcttcggcagattcagcagcccctag

SEQ ID NO: 280324 - protein, 1250 aa, Artificial Sequence
  derived and/or modified sequence
MAAMAPGGSGSGGGVNPFLSDSDEDDDEVAATEERRAVLRLGAGSGLDPGSAGSLSPQDPVALGSSARPGLPGEASAAAVALGGTGETPARLSIDAIAAQLLRDQYLLTALELHTELLESGRELPRLRDYFSNPGNFERQSGTPPGMGAPGVPGAAGVGGAGGREPSTASGGGQLNRAGSISTLDSLDFARYSDDGNRETDEKVAVLEFELRKAKETIQALRANLTKAAEHEVPLQERKNYKSSPEIQEPIKPLEKRALNFLVNEFLLKNNYKLTSITFSDENDDQDFELWDDVGLNIPKPPDLLQLYRDFGNHQVTGKDLVDVASGVEEDELEALTPIISNLPPTLETPQPAENSMLVQKLEDKISLLNSEKWSLMEQIRRLKSEMDFLKNEHFAIPAVCDSVQPPLDQLPHKDSEDSGQHPDVNSSDKGKNTDIHLSISDEADSTIPKENSPNSFPRREREGMPPSSLSSKKTVHFDKPNRKLSPAFHQALLSFCRMSADSRLGYEVSRIADSEKSVMLMLGRCLPHIVPNVLLAKREELIPLILCTACLHPEPKERDQLLHILFNLIKRPDDEQRQMILTGCVAFARHVGPTRVEAELLPQCWEQINHKYPERRLLVAESCGALAPYLPKEIRSSLVLSMLQQMLMEDKADLVREAVIKSLGIIMGYIDDPDKYHQGFELLLSALGDPSERVVSATHQVFLPAYAAWTTELGNLQSHLILTLLNKIEKLLREGEHGLDEHKLHMYLSALQSLIPSLFALVLQNAPFSSKAKLHGEVPQIEVTRFPRPMSPLQDVSTIIGSREQLAVLLQLYDYQLEQEGTTGWESLLWVVNQLLPQLIEIVGKINVTSTACVHEFSRFFWRLCRTFGKIFTNTKVKPQFQEILRLSEENIDSSAGNGVLTKATVPIYATGVLTCYIQIKEYLHIHNEISWEWDPSLNTKCVSYTHYTHSLKEEDRKLLVGFLEDVMTLLSLSHAPLDSLKASFVELGANPAYHELLLTVLWYGVVHTSALVRCTAARMFELLVKGVNETLVAQRVVPALITLSSDPEISVRIATIPAFGTIMETVIQRELLERVKMQLASFLEDPQYQDQHSLHTEIIKTFGRVGPNAEPRFRDEFVIPHLHKLALVNNLQIVDSKRLDIATHLFEAYSALSCCFISEDLMVNHFLPGLRCLRTDMEHLSPEHEVILSSMIKECEQKVENKTVQEPQGSMSIAASLVSEDTKTKFLNKMGQLTTSGAMLANVFQRKK

SEQ ID NO: 280325 - DNA, 3753 bp, Artificial Sequence
  derived and/or modified sequence
atggccgccatggcccccggcggcagcggcagcggcggcggcgtgaaccccttcctgagcgacagcgacgaggacgacgacgaggtggccgccaccgaggagagaagagccgtgctgagactgggcgccggcagcggcctggaccccggcagcgccggcagcctgagcccccaggaccccgtggccctgggcagcagcgccagacccggcctgcccggcgaggccagcgccgccgccgtggccctgggcggcaccggcgagacccccgccagactgagcatcgacgccatcgccgcccagctgctgagagaccagtacctgctgaccgccctggagctgcacaccgagctgctggagagcggcagagagctgcccagactgagagactacttcagcaaccccggcaacttcgagagacagagcggcaccccccccggcatgggcgcccccggcgtgcccggcgccgccggcgtgggcggcgccggcggcagagagcccagcaccgccagcggcggcggccagctgaacagagccggcagcatcagcaccctggacagcctggacttcgccagatacagcgacgacggcaacagagagaccgacgagaaggtggccgtgctggagttcgagctgagaaaggccaaggagaccatccaggccctgagagccaacctgaccaaggccgccgagcacgaggtgcccctgcaggagagaaagaactacaagagcagccccgagatccaggagcccatcaagcccctggagaagagagccctgaacttcctggtgaacgagttcctgctgaagaacaactacaagctgaccagcatcaccttcagcgacgagaacgacgaccaggacttcgagctgtgggacgacgtgggcctgaacatccccaagccccccgacctgctgcagctgtacagagacttcggcaaccaccaggtgaccggcaaggacctggtggacgtggccagcggcgtggaggaggacgagctggaggccctgacccccatcatcagcaacctgccccccaccctggagaccccccagcccgccgagaacagcatgctggtgcagaagctggaggacaagatcagcctgctgaacagcgagaagtggagcctgatggagcagatcagaagactgaagagcgagatggacttcctgaagaacgagcacttcgccatccccgccgtgtgcgacagcgtgcagccccccctggaccagctgccccacaaggacagcgaggacagcggccagcaccccgacgtgaacagcagcgacaagggcaagaacaccgacatccacctgagcatcagcgacgaggccgacagcaccatccccaaggagaacagccccaacagcttccccagaagagagagagagggcatgccccccagcagcctgagcagcaagaagaccgtgcacttcgacaagcccaacagaaagctgagccccgccttccaccaggccctgctgagcttctgcagaatgagcgccgacagcagactgggctacgaggtgagcagaatcgccgacagcgagaagagcgtgatgctgatgctgggcagatgcctgccccacatcgtgcccaacgtgctgctggccaagagagaggagctgatccccctgatcctgtgcaccgcctgcctgcaccccgagcccaaggagagagaccagctgctgcacatcctgttcaacctgatcaagagacccgacgacgagcagagacagatgatcctgaccggctgcgtggccttcgccagacacgtgggccccaccagagtggaggccgagctgctgccccagtgctgggagcagatcaaccacaagtaccccgagagaagactgctggtggccgagagctgcggcgccctggccccctacctgcccaaggagatcagaagcagcctggtgctgagcatgctgcagcagatgctgatggaggacaaggccgacctggtgagagaggccgtgatcaagagcctgggcatcatcatgggctacatcgacgaccccgacaagtaccaccagggcttcgagctgctgctgagcgccctgggcgaccccagcgagagagtggtgagcgccacccaccaggtgttcctgcccgcctacgccgcctggaccaccgagctgggcaacctgcagagccacctgatcctgaccctgctgaacaagatcgagaagctgctgagagagggcgagcacggcctggacgagcacaagctgcacatgtacctgagcgccctgcagagcctgatccccagcctgttcgccctggtgctgcagaacgcccccttcagcagcaaggccaagctgcacggcgaggtgccccagatcgaggtgaccagattccccagacccatgagccccctgcaggacgtgagcaccatcatcggcagcagagagcagctggccgtgctgctgcagctgtacgactaccagctggagcaggagggcaccaccggctgggagagcctgctgtgggtggtgaaccagctgctgccccagctgatcgagatcgtgggcaagatcaacgtgaccagcaccgcctgcgtgcacgagttcagcagattcttctggagactgtgcagaaccttcggcaagatcttcaccaacaccaaggtgaagccccagttccaggagatcctgagactgagcgaggagaacatcgacagcagcgccggcaacggcgtgctgaccaaggccaccgtgcccatctacgccaccggcgtgctgacctgctacatccagatcaaggagtacctgcacatccacaacgagatcagctgggagtgggaccccagcctgaacaccaagtgcgtgagctacacccactacacccacagcctgaaggaggaggacagaaagctgctggtgggcttcctggaggacgtgatgaccctgctgagcctgagccacgcccccctggacagcctgaaggccagcttcgtggagctgggcgccaaccccgcctaccacgagctgctgctgaccgtgctgtggtacggcgtggtgcacaccagcgccctggtgagatgcaccgccgccagaatgttcgagctgctggtgaagggcgtgaacgagaccctggtggcccagagagtggtgcccgccctgatcaccctgagcagcgaccccgagatcagcgtgagaatcgccaccatccccgccttcggcaccatcatggagaccgtgatccagagagagctgctggagagagtgaagatgcagctggccagcttcctggaggacccccagtaccaggaccagcacagcctgcacaccgagatcatcaagaccttcggcagagtgggccccaacgccgagcccagattcagagacgagttcgtgatcccccacctgcacaagctggccctggtgaacaacctgcagatcgtggacagcaagagactggacatcgccacccacctgttcgaggcctacagcgccctgagctgctgcttcatcagcgaggacctgatggtgaaccacttcctgcccggcctgagatgcctgagaaccgacatggagcacctgagccccgagcacgaggtgatcctgagcagcatgatcaaggagtgcgagcagaaggtggagaacaagaccgtgcaggagccccagggcagcatgagcatcgccgccagcctggtgagcgaggacaccaagaccaagttcctgaacaagatgggccagctgaccaccagcggcgccatgctggccaacgtgttccagagaaagaagtag

SEQ ID NO: 280326 - DNA, 3753 bp, Artificial Sequence
  derived and/or modified sequence
atggcagccatggcccctggagggagtggtagtgggggtggtgtgaatccgttcctatctgacagtgacgaggatgatgatgaagtcgccgctaccgaagagagacgggctgttctgagactaggggcgggatcagggctggaccccggaagtgctgggtccttgtctcctcaggatccagttgctcttggcagttccgcccggcccggactgcccggggaagcaagtgccgctgccgtcgcacttggaggcacgggggagacccccgcgcgcttgtctattgacgccattgccgcgcagctattaagagaccaataccttctcacggcgctggagctccacacagagctgcttgagagtggaagagagctgccccgattgagagattacttctctaatcctggtaacttcgagcgccagtccggcactccacctggtatgggggctcctggggttccgggggccgccggagtaggaggagcaggcggccgtgagccctccacggccagcggcggcggacaattgaacagagccggcagtattagtactctggactctctggatttcgcaaggtactctgacgacggaaaccgcgaaactgacgagaaggtggcagtcctagagtttgagttgcgcaaggccaaagaaaccatccaagcgctgcgggccaacctgacaaaagcggctgagcacgaggtgcctctgcaggagcggaagaattacaagtcatcccctgaaatccaggaaccaataaagcccctggagaaaagagcactcaacttcttggttaatgaatttttgcttaaaaacaattataagctgacatctataacattcagcgatgaaaatgacgaccaggacttcgagctctgggatgatgtgggactgaacatcccaaagccacctgacctcttgcagttgtacagagatttcggcaatcatcaggtgaccggaaaagatctagtggatgtggccagcggtgtggaggaagatgaactcgaggccctcactcccattatctctaaccttcccccaacactggaaaccccccagcccgcagaaaactcaatgctcgtgcagaaattggaggacaagatctctctcctcaacagcgagaaatggagcctgatggagcagatcagacggctcaagtccgaaatggatttcctaaagaatgagcatttcgccatcccggctgtgtgtgactctgtgcagccccctctggatcagctgcctcacaaagatagcgaggacagcggccagcacccagatgtgaattcatcagacaaggggaagaataccgacatccacctgtcaatctccgacgaagcagactcaaccatccccaaggaaaacagcccaaactctttcccccgcagagagagagagggcatgcccccaagctccctgtcttcaaaaaagactgtacactttgacaagcctaaccgcaagctgtctcctgcatttcaccaggcattactttctttctgccgcatgtcagccgactctagactcggctatgaggtgagtcgaatcgcggattctgagaaaagtgtgatgctgatgctggggcgatgtctgcctcacattgtgccaaatgtcctgcttgccaaaagggaggagctgatacccctcatcctctgtacagcttgtttgcatcccgaaccaaaggaacgtgatcagctgctccatatccttttcaatctcattaaaagaccagacgacgaacagaggcaaatgattctcacaggatgtgtggcctttgctagacacgtgggacccacgcgcgtcgaagccgaactgctcccccaatgctgggaacagataaatcataaatatcctgagaggcggctactggttgccgagagttgcggcgcccttgcgccatatctgcctaaggagatacgcagttctctcgtgcttagtatgttgcaacagatgctgatggaggacaaggctgatttagtgcgtgaggccgtcattaagtccctggggattatcatgggttacattgatgaccctgacaaataccaccaagggttcgaacttctcctgagtgccctcggggatccgtccgagcgcgtggtgagcgctacccaccaagtattcttgcccgcctacgctgcctggaccacggaattgggaaacctccagtctcacttgatcctgacactactaaacaaaattgagaagctgctgagggagggagaacatgggctcgacgaacataaactccatatgtacctgtccgccctgcagagtctcatccctagcctattcgccctcgttctccaaaatgcgcccttctctagcaaagccaaacttcacggggaggtgcctcagattgaagtgactcgtttccccagacctatgagccccctgcaagatgtatcgacgattatagggtcccgagagcagcttgccgtcctgctgcagctctacgattatcagttagagcaagagggcactaccggctgggaaagcctgctttgggtagttaatcagcttctgccacagctgattgagatcgtcggtaaaattaatgttacctctactgcttgtgtgcacgaattcagtcggttcttttggcgtctctgtagaaccttcggtaaaatcttcacgaacacaaaggtcaaacctcagttccaagagatcctaagactgtcagaggagaacatcgatagcagcgccggcaacggggtcctgacaaaagcgaccgtgcccatctacgcaacaggcgtgttgacatgttacattcaaattaaggaatatctccatatacacaatgagatctcatgggaatgggatccatctctcaataccaagtgtgtcagctacacacattacacccattcactcaaggaagaagatcgaaaactcctggtagggtttctggaagacgtcatgactctcctgtctctctcacacgcccccctcgattctctgaaggcttcatttgtggagttgggcgcaaatcccgcatatcatgagcttctgcttactgtgctttggtatggcgtagtacatacgagtgctttggttaggtgcaccgctgctaggatgttcgaactccttgtgaaaggagttaacgagacgcttgtcgctcagcgagtggtgcctgcactaattaccctctcctccgacccggaaatctccgtacggatagctaccatccccgctttcggcaccattatggagaccgtcatccagcgggaactgctagagcgggtgaaaatgcaattagcctctttcctggaagatccccagtatcaggaccagcattcgcttcataccgaaataatcaaaacttttgggagagtgggtcccaacgccgaacctagattccgtgacgagtttgtcattccccacttgcataaacttgcgttggtcaataaccttcagatcgtagatagcaagcgcctggatatcgcgacccacctgtttgaggcctattccgccctgagttgctgtttcatctctgaggacctcatggttaaccactttctgccagggctacgctgtctgaggacagacatggagcacctcagccccgagcacgaagttatcctcagcagtatgattaaagagtgtgaacagaaagtagagaacaaaaccgttcaagagccccagggaagtatgtcaatcgccgcctcactcgtgtctgaggacacaaagacaaagttcttaaacaaaatgggtcaactgaccacatccggagcaatgttagcaaatgtgttccagagaaaaaagtag

SEQ ID NO: 280327 - DNA, 3753 bp, Artificial Sequence
  derived and/or modified sequence
atggccgccatggcccctgggggcagcggcagcggcggcggcgtgaaccccttcctgagtgacagtgatgaagatgatgatgaggtggccgccacagaggagaggagagctgtgctgcggctgggcgccggcagcggcctggaccccggcagcgctggcagcctgagcccccaggaccctgtggccctgggcagcagcgcccggcccggcctgcccggggaggccagcgctgctgctgtggccctgggcggcactggagagaccccagcccggctgagcattgatgccatcgccgcccagctgctgcgggaccagtacctgctgacagccctggagctgcacacagagctgctggagagcggccgggagctgccccggctgcgggactacttcagcaaccctggcaactttgagcggcagagcggcaccccacctggcatgggcgcccctggggtgcctggagctgctggggtgggcggggccggcggccgggagcccagcacagccagcggcggcggccagctgaacagagctggcagcatcagcaccctggacagcctggactttgcccgctacagtgatgatggcaaccgggagacagatgagaaggtggccgtgctggagtttgagctgaggaaggccaaggagaccatccaggccctgcgggccaacctgaccaaggctgctgagcacgaggtgcccctgcaggagaggaagaactacaagagcagccctgagatccaggagcccatcaagcccctggagaagagggccctgaacttcctggtgaatgagttcctgctgaagaacaactacaagctgaccagcatcaccttcagtgatgaaaatgatgaccaggactttgagctgtgggatgatgtgggcctgaacatccccaagcccccagacctgctgcagctgtacagagactttggaaaccaccaggtgacaggcaaggacctggtggatgtggccagcggcgtggaggaggatgagctggaggccctgacccccatcatcagcaacctgccccccaccctggagaccccccagcctgctgagaacagcatgctggtgcagaagctggaggacaagatcagcctgctgaacagcgagaagtggagcctgatggagcagatccggcggctgaagtctgagatggacttcctgaagaatgagcactttgccatcccagctgtgtgtgacagcgtgcagccccccctggaccagctgccccacaaggacagtgaagattctggccagcacccagatgtgaacagcagtgacaagggcaagaacacagacatccacctgagcatcagtgatgaggccgacagcaccatccccaaggagaacagccccaacagcttcccccggcgggagcgggagggcatgccacccagcagcctgagcagcaagaagacagtgcactttgacaagcccaacaggaagctgagccctgccttccaccaggccctgctgtccttctgcaggatgtctgctgacagccggctgggctatgaggtgtccagaattgctgacagcgagaagtctgtgatgctgatgctgggccgctgcctgccccacatcgtgcccaacgtgctgctggccaagcgggaggagctgatccccctcatcctgtgcacagcctgcctgcaccctgagcccaaggagcgggaccagctgctgcacatcctcttcaacctgatcaagaggccagatgatgagcagaggcagatgatcctgaccggctgtgtggcctttgcccggcacgtgggccccaccagggtggaggccgagctgctgccccagtgctgggagcagatcaaccacaagtacccagagcggcggctgctggtggccgagagctgtggggccctggccccctacctgcccaaggagatccgcagcagcctggtgctgtccatgctgcagcagatgctgatggaggacaaggctgacctggtgcgggaggccgtcatcaagagcctgggcatcatcatgggctacattgatgatcctgacaagtaccaccagggctttgagctgctgctgagcgccctgggggaccccagcgagcgggtggtgtctgccacccaccaggtgttcctgcctgcctatgctgcctggaccacagagctgggcaacctgcagagccacctgatcctgaccctgctgaacaagattgagaagctgctgcgggagggggagcacggcctggatgagcacaagctgcacatgtacctgagcgccctgcagagcctcatccccagcctgtttgccctggtgctgcagaatgcccccttcagcagcaaggccaagctgcacggggaggtgccccagatcgaggtgacccgcttcccccggcccatgagccccctgcaggatgtgtccaccatcatcggcagccgggagcagctggccgtgctgctgcagctgtatgactaccagctggagcaggagggcaccaccggctgggagagcctgctgtgggtggtgaaccagctgctgccccagctgattgaaattgtgggcaagatcaacgtgaccagcacagcctgtgtgcatgagttcagccgcttcttctggaggctgtgcaggaccttcggcaagatcttcaccaacaccaaggtgaagccccagttccaggagatcctgcggctgtctgaagaaaatattgacagcagcgctggaaatggagtgctgaccaaggccaccgtgcccatctatgccaccggggtgctgacctgctacatccagatcaaggagtacctgcacatccacaatgagatctcctgggagtgggaccccagcctgaacaccaagtgtgtgtcctacacccactacacccacagcctgaaggaggaggacaggaagctgctggtgggcttcctggaggatgtgatgaccctgctgagcctgagccacgcccccctggacagcctgaaggccagctttgtggagctgggcgccaacccagcctaccacgagctgctgctgactgtgctgtggtatggagtggtgcacaccagcgccctggtgcgctgcacagctgccaggatgtttgagctgctggtgaagggcgtgaatgagaccctggtggcccagagggtggtgcctgccctgatcaccctgagcagtgaccctgagatctctgtgagaattgccaccatcccagccttcggcaccatcatggagaccgtcatccagcgggagctgctggagcgggtgaagatgcagctggccagcttcctggaggacccccagtaccaggaccagcacagcctgcacacagagatcatcaagaccttcggccgggtgggccccaatgctgagccccgcttcagagatgaatttgtgatcccccacctgcacaagctggccctggtgaacaacctgcagatcgtggacagcaagaggctggacatcgccacccacctgtttgaggcctacagcgccctgagctgctgcttcatcagcgaggacctgatggtgaaccacttcctgcccggcctgcgctgcctgaggacagacatggagcacctgagccctgagcacgaggtgatcctgagctccatgatcaaggaatgtgagcagaaggtggagaacaagacagtgcaggagccccagggctccatgagcattgctgccagcctggtgtctgaggacaccaagaccaagttcctgaacaagatgggccagctgaccaccagcggggccatgctggccaacgtgttccagaggaagaagtag

SEQ ID NO: 280328 - DNA, 3753 bp, Artificial Sequence
  derived and/or modified sequence
atggccgccatggcccccggcggcagcggcagcggcggcggcgtgaatccttttcttagcgactcagacgaggacgacgatgaagtggcagctaccgaggagcgtagagcagttctgaggctcggggccggaagcgggctcgacccaggctctgctggatccctgtcccctcaggatccagtggcactgggatccagcgcccgccctgggctccccggtgaggcctcagcggccgcagtggccctgggaggaaccggggagacccctgctaggctatccatcgacgcgatagccgcccagctgctgcgggatcagtatctattgacagctctcgagctccacaccgaactgttagagagcggaagggaactgccaagattgcgggattacttttctaatcccggaaattttgaaagacagagcggtacccctcctggaatgggggctcccggggtgcctggcgccgctggtgtgggaggagccggcggccgggagccgagtactgcctctggaggaggccagctcaatcgcgccggctctatctccacgttagattcacttgattttgcccgatattccgacgatggaaacagggagacggatgagaaagtagcagtgttggagtttgagttgagaaaagccaaagagacaatccaggccctaagggccaacctgacaaaggccgcagaacacgaggtgcccctacaggagcgcaagaactataagagttcacccgagatacaggaaccaatcaagcctctggagaaaagggcccttaacttcttggtcaacgaatttctgcttaagaataattacaaacttaccagcatcacatttagtgacgaaaacgacgaccaagacttcgaactgtgggacgatgttggacttaatatacctaaacctcctgatctcctgcagctctacagagacttcggaaaccatcaagtgaccgggaaagatctggtggatgtcgcctccggggtggaagaagatgagctggaggcacttacacccataatttccaacctgccaccaacactggagacgcctcagcccgctgaaaatagtatgcttgtccagaagttggaagataagatatctcttttaaacagcgagaaatggtcacttatggagcagatccgccggctgaaaagcgaaatggatttcctcaaaaacgaacatttcgccattcccgccgtgtgtgattccgtccagccccctctcgatcagttgcctcacaaggactccgaagactctggccagcatcctgatgtcaatagcagtgataagggaaaaaataccgacattcaccttagcattagcgacgaagctgattcgacgatacccaaagaaaacagtcccaatagctttcccagacgcgaaagagaaggcatgcctccttccagcctgtccagtaaaaaaactgtacatttcgataagccaaatcgcaagctgtctcccgcgtttcaccaagcattgctgtccttctgtcgcatgtcagccgacagtcgtctcgggtacgaagtctcacggattgcagacagcgagaagtccgtaatgctgatgttgggacgctgtctgccccacatcgttccaaacgtactgcttgccaaacgcgaagagctgatcccccttatcctgtgcacagcctgcctgcaccctgagcccaaggagcgtgatcagctgctgcacatcctttttaatctgatcaaacgacctgacgacgaacagaggcagatgatactgaccggctgtgtggcttttgccagacatgtcggtcctacgcgtgtggaagcggagctgctgccacaatgttgggaacagatcaaccacaagtaccctgaacgcagactgctggtggcggagtcatgtggcgcactcgctccctacctcccgaaagagattcgaagcagccttgtcctgtcaatgttacagcagatgcttatggaggacaaagcagacctcgttagggaagccgtgataaaatccttaggcattatcatgggttatatcgacgacccggacaaataccaccagggattcgaacttttgttaagtgctctgggtgaccctagcgaacgagtggtttccgccacgcatcaggttttcctgccggcgtacgcagcctggacgacagagttgggaaaccttcagtctcacttaatccttacgctgcttaataaaatcgagaaattacttagagaaggcgaacacggcctggatgaacacaagctgcacatgtatctgtccgcactgcagagccttatcccatcgttgttcgctttggtgcttcagaatgccccattcagctcaaaagccaagcttcatggggaagtgccacagattgaggtcactagattccccagacctatgtctcccctgcaggacgtcagcaccataatcggctcccgtgaacagctcgccgtgctcttacagctctatgattatcaattagaacaggaggggacaacaggctgggagtccctactctgggtggtgaatcaacttctaccccaactgatagaaatagtgggcaagattaacgttactagtacagcctgtgtacatgaatttagcagatttttttggagactatgccgcacttttggcaaaatctttactaacactaaagtgaaaccccagttccaggagatccttagactgagcgaagagaacatagatagctcagctggcaatggagtgctgactaaagcaacagttcccatttacgcgaccggagtgctgacatgctacatccaaataaaagaatacctccatattcataacgagatatcatgggagtgggatccctcgctgaatactaagtgtgtatcttacacccactacacacactctctcaaggaggaggatagaaagctgctcgtcggctttctggaagacgtgatgaccttactgagtttaagtcatgccccgctggactctctgaaggcatctttcgtcgagctgggcgctaacccagcctaccacgaattactcctgaccgtactctggtacggcgtcgtgcacaccagcgcattagtgcgatgtactgccgcccgaatgttcgaactgctcgtcaagggagtcaatgaaacgctggtggcccaaagagtagttcccgccctcatcacactttcgagtgatccagagatatccgttcggatcgccactatcccagcatttgggaccattatggaaacggtgattcaaagagagctgcttgaacgcgtgaaaatgcaactcgcatcttttctggaggatccccagtaccaggaccagcactccctccataccgaaattataaagacttttggaagggtgggcccaaacgcagagccaaggttcagagacgagttcgttattcctcacctgcataagctggctctggtaaataacctgcagattgtggactcaaaaagactggacatcgcaacccacctgtttgaagcttacagcgctctgagctgctgcttcatcagcgaagatctgatggtgaaccattttctgcctgggttacggtgtctgcggactgacatggaacacctgagcccggaacacgaagtaatcctcagcagcatgattaaggagtgcgagcaaaaagtcgagaacaaaactgttcaggaaccgcaaggcagtatgtccatcgctgcttccctcgtgtctgaggacacgaaaactaaattcttaaacaaaatgggacagctaactacaagcggggcaatgctggccaacgtattccaacgtaagaagtag

SEQ ID NO: 280329 - DNA, 3753 bp, Artificial Sequence
  derived and/or modified sequence
atggccgctatggcacccggagggagcggttcaggtggcggtgtgaatcctttcctgtctgacagtgatgaagatgacgatgaggtagccgcaactgaagaaaggcgcgcagtgctcagactcggagccggtagtggacttgacccagggagcgctggctcgttgtcaccacaagaccccgtggccctcggctcatctgccaggcctgggctgcctggcgaggcttccgcagcagccgtagcactcggagggactggcgagactccggcacgcctgtccatcgacgccatcgctgcccaattgctgcgcgaccagtaccttcttacagctttagaacttcacactgaactattggaatccggccgtgagctccctaggctacgcgattacttctcaaacccaggcaattttgagagacagagtgggacaccacctgggatgggcgcacccggtgtgcccggtgcagccggagttggcggagctgggggacgagagcccagtactgcctcaggagggggacagctcaatagagcaggaagtatttcaacacttgattctcttgacttcgccaggtattctgatgatggtaatcgagagaccgatgaaaaagtcgccgtccttgaattcgagcttaggaaggctaaagaaacgattcaggccttacgagctaatcttaccaaagcggcagagcatgaggtgccacttcaggaaaggaaaaattataagagcagtcctgaaattcaggagcctatcaagcccctggagaagcgggcactgaacttcttagtcaacgaattccttttgaaaaacaactacaagctgacgagtattactttcagcgatgagaacgatgaccaggacttcgagctatgggacgacgtcggacttaacatcccaaagcccccagatctgcttcaattatacagagactttggcaaccaccaggtgaccggcaaggaccttgtggatgtggcatccggggtcgaggaggatgaacttgaagcgttgacacccattatcagtaacctccccccaactctggagaccccacagccagccgaaaacagtatgctggtacagaagctggaagacaagatcagcttattgaacagcgagaagtggagtctgatggagcagatccgcaggctcaaatccgagatggactttttaaaaaatgaacacttcgccattccagctgtttgcgattctgttcaacccccattagatcagctgccacataaggactcagaggatagtggacaacaccctgacgtcaacagttctgacaaggggaaaaatactgatatccatctgagcatctcagacgaagcggacagcactattcccaaggagaatagccccaattcttttcctcggagagagcgagaaggcatgcctcccagcagtctgagttccaagaaaaccgtgcattttgataaaccgaaccgaaaactttcgcctgctttccaccaggcactgctgagcttttgtaggatgtccgcagacagtcggttaggatatgaggtatcccgcatcgcagacagcgaaaagtcggtcatgttgatgctcggaagatgcctcccacacatcgtccccaacgtactccttgcaaagagggaagagttgatcccactgatactgtgtaccgcatgcctacatccagagccaaaagaacgcgatcaactgctgcatatcttgtttaacctgatcaaacgtcccgatgatgaacagcgccaaatgatcctcaccgggtgtgtggccttcgctagacacgtggggcctacccgcgtggaggccgaacttcttccccaatgctgggaacaaattaaccacaaataccctgaaaggagactgctggtggcggagtcctgtggcgctttggccccttacctacctaaagaaattagatcctccttggtgctgagtatgttgcaacagatgctcatggaggataaggccgaccttgtgagggaggcagttatcaagtccctcggtatcatcatgggatacatagacgatccggataagtaccatcagggttttgaactgctgttgtcagcattaggggaccccagtgaaagagttgtgtccgccacacatcaggtgttcctaccggcttacgcggcatggaccaccgaattaggtaacttacagagccatctcatccttacactactgaataagatcgagaaactgcttcgagagggcgagcatgggttggatgagcacaagttgcatatgtacctaagcgctctacagtcactgattccatcgctgttcgctctagtgctgcaaaacgctcctttttcatcaaaggccaaactccatggggaggtccctcagatcgaagttacacgctttcccaggcctatgtctccgttgcaagatgtgtctacaatcatcgggagccgcgaacagctggccgtgctgctccagctgtacgattatcagctcgagcaggaaggtacaacaggttgggaatccctgctgtgggtggtgaaccagttactcccacagcttattgagatcgtgggcaagattaatgtgacttcaactgcttgcgttcatgaattctctaggttcttctggcgtctgtgtagaactttcggcaaaatcttcaccaacaccaaggtgaagccacagtttcaggagatacttagactttcagaggaaaatattgattctagcgccggtaatggggtcctgactaaagctacagtgcccatttatgccacgggtgttcttacctgttacatccagatcaaggagtacttacatatacacaatgagatcagttgggaatgggatccatctctcaataccaaatgtgtgtcttatactcactacacccactcccttaaggaagaagatcggaagctgttggtgggttttctcgaggacgtgatgacacttctctctctgagccatgcccctcttgatagcctaaaagcaagtttcgtggagctgggagctaacccagcctaccatgaattactactcactgtactctggtacggagttgtgcacacctcagcgctagtgagatgcaccgcggctcgcatgtttgagcttctggttaagggagtcaacgagactctcgtggcacagcgcgtggtgcctgcgctgattacccttagcagcgaccccgaaatatcggtacgtatcgccaccattcccgcatttgggacaatcatggagactgtgattcaacgggagctactagagagggtgaagatgcagttggcctcatttctggaggacccccaataccaggaccaacactcgctgcataccgaaataattaagacatttgggagggtgggaccaaatgcggaaccacgtttcagagacgaattcgtaattccacacctgcacaagctggcgctcgtcaataatctccagatagttgattctaaacgattggacatagccactcatctcttcgaggcttatagcgcccttagctgctgtttcatcagtgaggatctgatggttaaccatttcctccccggtctgcgatgcctcagaaccgacatggagcacttgtcacctgagcatgaagtaattctaagcagtatgataaaggagtgtgaacagaaggtggagaacaagaccgtgcaggaaccccagggttccatgtctatcgctgcctccttggtcagtgaggataccaagacaaaatttctaaataagatgggacagctgaccacgtctggggcaatgctcgccaatgtcttccagcgtaagaaatag

SEQ ID NO: 280330 - DNA, 5555 bp, Artificial Sequence
  derived and/or modified sequence
agagccgggctgctggtgcagcagaggctgaggcatcaggtgcagctgcatccggatctcctgccttggagcgtactccttgtctctaagtcgggaggcaggacgtggtcaggccggggctgtggaggtgcgctgtgtcccctgaggcctagaggattcgggctgcggcccgtcggaaccagtcagggaggcgcccacactcctgacaggataagatggcggcgatggcgcctggaggtagtggcagtggtggcggcgtgaatccatttctcagtgattcggatgaggacgatgacgaggtagctgcaacagaggaacggcgggcagtacttcggctgggcgccggaagtggcctagatcctggctctgcgggctcgctgtcgccacaggatcccgtggccttaggaagcagtgcgcggccagggctccctggggaggcgtcggcggctgcagtggccctggggggcaccggggagaccccggcccgattatcaattgatgcgatcgctgctcagctgttgcgcgatcaatacttgctgaccgccctggagctgcataccgagctgttagagagtggccgggagctgcctcggctgcgcgactacttctccaatccaggcaacttcgagaggcaaagtggaaccccgccggggatgggggcgccaggggtccctggagcagccggcgttgggggcgctggaggtcgggaaccgagtacagcgtcgggcgggggacagctcaatcgagctgggagcattagtacccttgattctttagactttgcaagatattcagatgatggtaacagggaaacagatgaaaaagtggcagtcctggagtttgaactacggaaagccaaggagaccattcaggccctccgagccaacctgacaaaggccgcagaacatgaagttcctttacaggaacgaaaaaattacaaatcaagtcctgaaattcaggagccaatcaaacctcttgaaaagagagctctaaacttcttagtcaatgaatttttattgaagaataactataagcttacatcaataaccttttcagatgaaaacgatgatcaggattttgaattatgggatgatgtaggattaaacattccaaaacctccagacttattgcaactctaccgggattttggaaatcatcaagtaactggaaaagatcttgtagatgtggccagtggagtagaagaagatgaattagaggcccttacaccaattataagcaaccttcctccaactcttgaaactccccagcctgcagagaactccatgttagtacagaaattagaagataaaattagtttgttaaatagtgagaaatggtcattgatggagcaaatcagaagacttaaaagtgaaatggacttcctcaaaaatgaacactttgccatcccagcagtttgtgactctgttcagcctcctttggatcagttgccccacaaagactctgaggacagtggacagcatccagatgtaaatagttcagacaagggaaaaaacacagacatccatctttcaatatcagatgaagctgattccactattcctaaagagaattccccaaattcattccccaggagagaaagagaaggaatgccaccttcttctctatcaagtaaaaagacagttcattttgataaacctaataggaaattgtctcctgcattccatcaagcactactctctttttgtcgaatgtcagcagatagtcgtttaggatacgaggtgtctcgtattgcagacagtgaaaaaagcgttatgttaatgctgggacgctgcctgccacacattgttcccaatgtgctattggcaaagagagaggagttgatccccctcatattgtgtacagcatgtctacatcctgagcctaaagagcgagatcagcttctccacatacttttcaatttgatcaagaggccagatgatgagcaaaggcaaatgatactgacaggttgtgtggcatttgcgcgtcatgttggaccaacacgtgtagaagctgaacttttaccacagtgttgggaacagattaatcacaaatacccagaaagacgactgcttgtggcagaatcctgtggagcactggcaccttaccttcctaaagaaatccgtagctccttggttctttcaatgttgcaacaaatgttaatggaagataaggcagatttggtaagagaagctgttatcaaaagccttggtatcattatgggatacattgatgatccagacaaatatcatcagggttttgaattgttgctgtcagccttgggtgatccctcagaaagagtagttagtgctacacatcaagtatttttaccagcttacgctgcgtggactacagaacttggaaatttacagtctcatcttatacttacactactgaacaagattgaaaaacttctcagggaaggagaacatggactggatgaacacaaactccacatgtatctttctgccttgcagtccttgatcccatctctctttgcattagtgctacagaatgcacctttctccagcaaagccaagcttcatggtgaagtgccacagatagaagtgactaggtttcctcggcctatgtcgcctcttcaagatgtgtccactattatcggaagtcgtgagcaattggcagtgctgctgcaactttatgactaccagctagaacaagagggtacaacaggctgggagagtttactgtgggttgtcaatcaattgttgccacaacttatagaaatagttggcaaaattaatgttacttcaactgcctgtgtccatgaattctccagatttttctggcgcctttgccggacatttggcaaaatttttacaaacactaaggtaaaacctcagttccaggagattttaagactatctgaagaaaacattgattcctcagcaggaaatggggtcctcactaaagctacagtccccatttatgcaacaggagtccttacgtgttatattcagataaaggagtatttgcatatacataatgagatatcttgggaatgggacccaagtctaaacacaaaatgtgtttcatatacacattatacacatagcctgaaggaagaagaccgaaaactgttagttggattcttagaagatgtaatgacgctgctttcattatctcatgctcctcttgatagcctgaaggcttcttttgtggaattgggtgcaaacccagcctaccatgagttactattaactgttttgtggtatggtgttgtccatacttcagcactcgtgaggtgtactgctgctagaatgtttgagctgttggtgaagggggtgaatgaaactctggtagctcagagggttgttcctgctctcattactctctccagtgaccctgaaatctctgtcaggattgccacaattccagcctttggcactattatggaaacagtaattcaaagagagttgctggaaagagtgaaaatgcagttggcttctttcctggaagatcctcagtatcaagaccaacattctttgcatacagagatcataaaaacatttggtagagttggccctaacgcagaacccaggttccgagatgagtttgttataccacatttgcataagttagccttggtgaacaacttacagattgtggattctaaaagactggacattgctacgcatctttttgaagcctacagtgcactttcctgttgtttcatttcagaggatttaatggttaatcactttttacctggtctcagatgtttacggactgacatggaacatctctctccagagcatgaggttattttaagttccatgataaaagaatgtgaacaaaaagttgaaaacaagaccgtccaagagcctcaaggctcaatgtcaattgctgcaagcttagtgagtgaagatacaaagaccaagtttttgaacaaaatgggccagttgacaacatcaggtgccatgttggccaatgtatttcagagaaagaagtagaagcaggaaagaagcccccagtaaacactaagatggacctcaagccgactggttccttgtacttgaagtacttgccttttttgtttcctcagttttatgttcttgcattataattttatcctaacctccaaagatatttgcactgcttttaattactgctgtatatttgttgattttggagttacaactgtggtgatagaaaattgagttgatggtctgtaccaagtcccttgtctatgttcttgtctttcagaataatttttatataaatatatatatagtgaagaagttttttttaatttttggatgggatattcgcaaatatctgtattatacactaagctattacaatggtacttaaaataatgtaaatttgaagtcattgttataaaataataaagtggagattacttaagtatttaaattatgaaagaataatgcagactttttattgtttcttaactgactagaaagagccaccagcattactctgtgccttttggacatcagtttgtgtgttctgtaggaattgtgtgcattccattcacacagtatttctttaggatgctgtgatgatttgaattacaaatcctacagtcaatagctaaagacgaaaccttcatttcagaactctcatgaatattctttaagtgctatttaaacctccccagcacttagatgcatataatggacttacctgaggaaagacagcacataggcatggggagaggtaaccaaggtgaattttacaaactggtgtatagtagatttaaatgctcaaaaataaatgtaactgagaagagttaataattgtgagatttttcccaaattgagatacagaagaaaatatagtttgaatctgaaatttaacacttatttatgtaaaacactttatttaagatattttctaatgattttaattttagagagtaccttttcattctgtgtgttacagagaagtactgaaaagttaaggacacttgggggctacttttttccctctaaactaaaaaagacattggctgaattataactagttagttatcacctcgtcccttaaagtcagtgacctcctgtgtttgatgtatattacatagagtcttaagtcagtgtacagttccactggaatttgacagttgtctctacagtcatgcaactcgaagtagaaaagagtgctggacataggaagggggtgcttggtttgaggggttaatgtgaggcctttttgaaaaatgaatattttgataaaaagaattcttgttttagcacagttgatgcacataagtgattctcatatttgttgtataaactggtttaatacatttggaacatagttggattacattcatttcctgggaaagctagcttaccatacattcaagtttataaaacaatttgccataggcaaagccatttaaaaagttcattctgaaattatttcatttacctacagtgaaataattgtgaactaagtagtctttctgaaaactgttgggttctaggcattcctgagaaattgaaagtggctacctttcatgtcaaaaatgttgatctattataaataaaatgtttttgcatatgtttttg

SEQ ID NO: 280331 - protein, 218 aa, Artificial Sequence
  derived and/or modified sequence
MTDGDYDYLIKLLALGDSGVGKTTFLYRYTDNKFNPKFITTVGIDFREKRVVYNAQGPNGSSGKAFKVHLQLWDTAGQERFRSLTTAFFRDAMGFLLMFDLTSQQSFLNVRNWMSQLQANAYCENPDIVLIGNKADLPDQREVNERQARELADKYGIPYFETSAATGQNVEKAVETLLDLIMKRMEQCVEKTQIPDTVNGGNSGNLDGEKPPEKKCIC

SEQ ID NO: 280332 - DNA, 657 bp, Artificial Sequence
  derived and/or modified sequence
atgaccgacggcgactacgactacctgatcaagctgctggccctgggcgacagcggcgtgggcaagaccaccttcctgtacagatacaccgacaacaagttcaaccccaagttcatcaccaccgtgggcatcgacttcagagagaagagagtggtgtacaacgcccagggccccaacggcagcagcggcaaggccttcaaggtgcacctgcagctgtgggacaccgccggccaggagagattcagaagcctgaccaccgccttcttcagagacgccatgggcttcctgctgatgttcgacctgaccagccagcagagcttcctgaacgtgagaaactggatgagccagctgcaggccaacgcctactgcgagaaccccgacatcgtgctgatcggcaacaaggccgacctgcccgaccagagagaggtgaacgagagacaggccagagagctggccgacaagtacggcatcccctacttcgagaccagcgccgccaccggccagaacgtggagaaggccgtggagaccctgctggacctgatcatgaagagaatggagcagtgcgtggagaagacccagatccccgacaccgtgaacggcggcaacagcggcaacctggacggcgagaagccccccgagaagaagtgcatctgctag

SEQ ID NO: 280333 - DNA, 657 bp, Artificial Sequence
  derived and/or modified sequence
atgactgatggcgactatgattacttgatcaagctcctggccctgggcgattctggggtggggaaaaccacatttttatatcgctatacggataataagtttaatcccaagtttattactaccgtgggcatcgatttcagggaaaaaagagtggtctacaacgcacagggacctaacgggagcagcggaaaagcctttaaagtccacctgcagctgtgggacacggccgggcaggagagatttcggtctcttaccaccgctttctttagagacgcaatgggttttctgctaatgtttgacctcacatcccaacagtctttcttgaacgtgcgaaattggatgtcccaactccaggctaatgcttactgtgagaatcctgacattgttctgattggtaacaaggcagacctgcccgatcagcgggaggttaatgaaaggcaagcacgggaactggctgataagtacggcattccttacttcgagacctcggcagccaccgggcagaatgtggagaaagcagtcgagacacttctggacctaataatgaagaggatggagcagtgcgtggagaagacacagataccagacaccgtgaatggggggaattcaggtaacctggacggtgagaagccacccgagaaaaaatgcatatgttag

SEQ ID NO: 280334 - DNA, 657 bp, Artificial Sequence
  derived and/or modified sequence
atgacagatggagactatgactacctgatcaagctgctggccctgggggacagcggcgtgggcaagaccaccttcctgtaccgctacacagacaacaagttcaaccccaagttcatcaccaccgtgggcatcgacttccgggagaagagggtggtgtacaatgcccagggccccaacggcagcagcggcaaggccttcaaggtgcacctgcagctgtgggacacagctggccaggagcgcttccgcagcctgaccacagccttcttcagagatgccatgggcttcctgctgatgtttgacctgaccagccagcagagcttcctgaatgtgaggaactggatgagccagctgcaggccaatgcctactgtgagaacccagacatcgtgctgattggcaacaaggctgacctgcctgaccagcgggaggtgaatgaaaggcaggcccgggagctggccgacaagtatggcatcccctactttgagaccagcgctgccaccggccagaatgtggagaaggctgtggagaccctgctggacctgatcatgaagaggatggagcagtgtgtggagaagacccagatcccagacacagtgaatggaggcaacagcggcaacctggatggagagaagcccccagagaagaagtgcatctgctag

SEQ ID NO: 280335 - DNA, 657 bp, Artificial Sequence
  derived and/or modified sequence
atgaccgacggcgactacgactacctgatcaagctgctggccctgggagattccggcgtgggtaagactactttcctgtaccgctacactgataataagtttaacccaaagtttatcaccacggtgggaattgacttccgcgagaagagagtggtctataatgcccagggcccaaacggaagctccggaaaggcttttaaggttcatctgcagctgtgggacaccgccgggcaggagcgctttcgcagtttaacaactgccttctttagggacgccatggggttccttcttatgttcgacctgacctcacaacagtcatttcttaacgttcgcaattggatgagccagctacaggctaacgcatattgtgaaaatcctgatattgtgctgataggcaacaaagcagatctcccagaccagagggaggtcaacgagaggcaagcgcgcgaactggcagataagtacggtattccatactttgaaaccagcgcagctaccgggcagaatgttgagaaggccgtcgagaccttgcttgacctgattatgaagagaatggagcagtgtgtagagaagactcagattccagatactgttaatggggggaattccggtaacctcgacggcgagaaacccccagaaaaaaaatgtatctgctag

SEQ ID NO: 280336 - DNA, 657 bp, Artificial Sequence
  derived and/or modified sequence
atgaccgatggtgactacgactatcttattaaactactggccctgggcgactccggagttggaaaaaccaccttcttatacagatacaccgacaataagttcaaccctaaattcatcactaccgtcggcattgatttccgggagaaacgggtggtgtacaatgcccaaggaccaaatggatcaagtggtaaggcattcaaagtgcacctgcagctctgggacaccgccggtcaggagcgattcaggtcacttaccaccgctttcttcagagacgcgatgggattcctccttatgttcgatctcacgagccaacagagctttctgaatgttaggaattggatgagccagttgcaggcaaatgcctactgtgaaaaccccgatatcgtcctgatagggaacaaggccgatcttccagatcagagagaagtcaacgaacgtcaagcgcgagagctggccgataagtatggaataccgtactttgagacgtccgccgctacaggacagaatgtcgagaaagcagtagaaacactattggatttgatcatgaagcgcatggaacagtgcgtcgaaaaaacacagattccagatacggtgaatggcggaaactccgggaacttggatggcgaaaagccaccggaaaagaaatgtatttgctag

SEQ ID NO: 280337 - DNA, 7003 bp, Artificial Sequence
  derived and/or modified sequence
actcgcagtcctgacgggcaggggctgcggaccgcccggccttggacccatccggagccacaggttggaggagataagtagctgtccccgtgctcatcgccctgtggagcagatcctgtctccttgctgacggtggagcccgggagttccagggcttgggaaggggaaggaaacctctctgaaatctgacacctgctctcccggcaaggaaacttcgcaggctgaccgaccaagaccatcactatgaccgatggagactatgattatctgatcaaactcctggccctcggggattcaggggtggggaagacaacatttctttatagatacacagataataaattcaatcccaaattcatcactacagtaggaatagactttcgggaaaaacgtgtggtttataatgcacaaggaccgaatggatcttcagggaaagcatttaaagtgcatcttcagctttgggacactgcgggacaagagcggttccggagtctcaccactgcatttttcagagacgccatgggcttcttattaatgtttgacctcaccagtcaacagagcttcttaaatgtcagaaactggatgagccaactgcaagcaaatgcttattgtgaaaatccagatatagtattaattggcaacaaggcagacctaccagatcagagggaagtcaatgaacggcaagctcgggaactggctgacaaatatggcataccatattttgaaacaagtgcagcaactggacagaatgtggagaaagctgtagaaacccttttggacttaatcatgaagcgaatggaacagtgtgtggagaagacacaaatccctgatactgtcaatggtggaaattctggaaacttggatggggaaaagccaccagagaagaaatgtatctgctagactctacatagaaactgaacatcaagaaccccaccaaaatattacttttaaaaacaatgacaaaccacacaattgttgttgagtaaaccacgcacaatggcatgtctttctttttctgccagaaaatctattttaagaaaccagaatagtcaacagtgttcaaaagaattgactagttatccctgaggccctttcaaacatgatcaaagatttcccaatgtgatctcatcatcatggatactcaatttgttttttcttatagagaaaatgagtatataagacaatatacaagaagaaatatcagtgagttttaaatcagaacaagttacctgtcacattgaagaaaagggtaggcactaaagggagaacacagaaagaagaatttctaaaatattggatttacttcttatattgagtcagatgcatacttttagatttgcattggggaaaatgtactagctaaaaatggatacacaatgaagaattctatttggctaattaagaatgatatactatgtacacccaataagctgtactagaatgaataaattactgataaggttacaaataggtaaatgtcacacttctgttaaaatgcaggaggtagtgtcataatgccgtctttatattcttaataaatagcactttgacaagaacaggactgtaaatgatgaagtacaagacaaataccctgggaaaaaaaatgaaagtatgagaaattggcatttctacagctgaaattcaatgtatctgttagagatgtctggaagggttacttagccaaattttactcaagccaattaggagctgatattatcagttggaattaagagaactccagaggtttccatttcaaacaaaattttagaaattggtttggtgttcagcttcacatttcattttttcttagcacatgttgataaaatagtcacaaggagaaattaccagttacggtttattaaatctcttttaaaatgcagtcaaggaaaactagccttgaattttttttagataaaataagatggtgatatgaaacaaaaagtggcaattattgcaggtttccttttagtttacaaaagtactggaaactaaatcatatttcttccctccaaatttcacccattcctgactttgaatcaattgcagaaatgcaggtgtgttactttgttgatcaataactttggaacaattatggatcaattctatggtcactctgaattttcatgtcattaatcacataaaaattgataatacctcattctgtattacaatatgattttattttgccaaaggcaagacacctatagttgagctgtattttgggggattgggtgaggaaggacttctgatcttatctcaacaaaaaactggccagtatttttgttaatgtaaagcttccttttctttctaaaaaatagtaacaaaattatttttcattggcctattctgttcttgtgtctaaactaacattacattaatttttaatcttagtttctgataaacacaagccattcctatcaaaatattatttatttcagtcaattttaccaaataacaaagacaatatattttcgtttttttttattatgagcatatgattttttgacaggctgtttcctcgtcgtatagattttttccaatcaaacctactttttccatactctgtgcatattttttgtgaagttatacacattgaagaccctaaaaatcccagtccatcattcagcttacctctgcgaacttctatctggtattgaatcagtttcagaaacacagacagatccaaggaaatgtctctttataatgttcttaggatggactagacccataaatgtgccatgaatcaaaatattaataatttgaaagctttcatgctgttagcccctgatgaaattctcagcattaactggccagctcctctgatttctgcagcatcgcaacaggttcgaagatgggttgtggctgggtattccctcccatggtgtttcctctgggatgctcttcattatctcaatgcctgtgccatgaagatagaaaactgtaagctaacatttaagatgtttcttctggaaggaaagtgagcaggaacaagttatattgccactgctgtggcaaattttggtgaacttttggggtcattatatcaattttttctttggattcaaattgtaatgtcccctgcatttccttaatagggaatgtgaaacctttataaaactctaaaagtattctgttttgatatgtctttttgtttctattcattttcagttatatgattgatttacttatgccaagattctgtcactgtcagttatttaatgagtgttttttcagggtctgttttaagatcattatttgatagctgtagcatgaagcagaggttgatgatgcccataattgcaagactattcctgtaaaaataacaattattgggtaataacttcaagaggaatgagaagtgacaaaattgatttaaaatattgttctacttataaataaatgcttgatataaaaaattttctccataaagtttgacatctgaccccagattctatgtaatcattattagaaattccttctctcattatttcaggattagtagttctgtgtaattcattttacaatttcaaattgttctggtgccataaagtatacagactactttaaagatttccaaatcccctaatttaccccacaacagcatgtaattttagccaagatatgtcctgttactaagtatctcccaatgctttagtaaaacgtatttaggagaaatgttgaaaatgtacatgaagctcctttctgatatagaaaccatttctggagtatttacactggtttgatgtttacattgctctaactcggtgcctcagatacctctgtgaccaaatttgtctccaaccacatagctcatttcctataatgttatatcataggaagccctcacagagacactaacacagctaaagatcttctgatattatcagcaagggatgcaaggactttattggaatctggagagtttaactgccttctcttggtctcctcacttacttcttatgaagttggcattacctgagactcttagctgtgattaggtacaagcttaccttttagggtagaaaaagaaagatcatttgaaaaatgtatctaaaataatccagagaacataatgtttgtcttggtctgataatgataagaagtcaaggattggcagagaaaatactaaacgccaagagttgagcctgtgggtctctccataagagttttaaaactcttgccagttaccactttatccaatttgctatcattttcgtattatcagctatcgccctgtaaaatattcaaaactagctatttctaaagtaaacattttatctgttacttttaaccagataggtgtctttgtcatccttctactataaattgttctttgccaacctgtacaggtagatgaaccaggcgagagttttaatcagccttttcttgtcccctttgtaagaaagagatgcttgccatagagaaggacatgagtacattaaaaataatttaatagccacaatatgatgttctttaagctgcaaattgagtacactgggaatcaacaaatttgatgaagcctgtctgtctcttcaccagtggagtgagtgcagcagttagaaagagaagcaatattgtgcaactggtgcagtggtgagttaatcatagtgtataaccttgtgttcatgaaacaggttgttcattgttctgcatctctcttcatttaaaaaggatacacaattctttcctcattgcatattacaccaaacgtttgagggaaaaatcctcattcgtaaaggattttggatgtataatctaaaactcaacaataaagaaataatattccaagtctctggtttcctaagatacataataactgtttataaagaaggtctaagagctgatatttgccaaagtgatagaagagttgttttttcctctctactaccaagctttaagacattaaaagaagtctagtgtatttgaatattttagagaaagctttatcattttttaagatgccaagatgctgcctacgtttgcaaaagttgtctaagaattcaccatgagctatattttcttctggatctttgaccaaggtgatgtcagcttatttctggggaaggtgttgagctcttatacatgaaaatggatataggctattctctgggatgagtgtcatttcaatgctttataaatccatgaagctgcttgtctcataaagtagaactgatacaaattttggttggatatatagagaattttataaatgtattgccttagaatttctgggtggagacccaactacaatgacattgtcatgccagaactataaagataattagagttaaaagttgtttaaattgtgcccttaaatacagcagaacctggagaaggtcatacttcaaaggtcgattttgagtccgaataaagaaagacctagtaacagatagtttttttttgttcattttcttctaccaagtagaggtttatgccctcagaactaaactagtaaaaatatctgaacaaaaaacctttcgttgttggcataaaaatgtgatacacttagagacattttgtttattgcatataaatctaatttttccataaattagatttatgatattttcataaagcacttgattagtttttcaaggcgtaccatcacaaagatgctttcctgcagagttctttgtatcaacagcctatggttgagatgttttctcatttcctgtagagagagaataccactaacaaacaaacaaaaactttagtgccaaaatagtggaactattttgtcatcttttgagaaaaaaatatacaaagaagtcatcttttcattaagtggattccctggttcctttccagctggttgtggaagtaatggctaacatccttcagctgactttgtctacaaggattattagcaaattctgtaggagcaagcatgtctgaccttaacttaatggatcccttattcaatcagtggcttctgtctttatgtctgttggcatatcaaaatggtttctgttcctagaaaagtaataacatatgcttatctttattctttttccaggtgattttgttttcaaatgctccttgtgaaaacacctagtgttgtagaaaggaaagtggccagaaagaacaacttgggaccatgagtaggtcattaaatagcttagtgatttatcctcatatagggcttataaaccctgtatgtgtttatatgtgcttcacagagttcgtgtcaggctcaaaggagatatgtataagaaagtggtttgtaaattatgttccatttcataaatagacactattcacaaactaaaatctaataaaaaaccacagttgtaatttaaactgcttgatataaaaagaggtatcatagcagggaaaacacactaattttcatacagtagaggtattgaaaactgaaaatgggaaggcaacttgaagtcattgtatttgattgaaaatgtttaatacatctcattattgacaaaatatgtcatcttgtatttatttcaaggaaaccaatgaattctaggtagtatattacaagttggtcaaaatattccatgtacaaatagggcttctgtgtccatagccttgtaagagatactgattgtatctgaaattattttttaaaaaaataaattatcctgctttagttagtgtgttaaaagtagacgatgttctaatataacactgaagtgcttcattgtatcccaacagtttaccttcaagtaatattatctttatttttaggctaagcacgtttgattattttgtctgtctcctatatagatctgttttgtctagtgctatgaatgtaacttaaaactataaacttgaagtttttattctatatgccccttaatagactgtggttcctgacgcacactgttaggtcattattttgttgtaccaaagttctagtggcttcagaaatcatagcatccaatgattttttggtgtctggctatgaatactatggttgagaattgtattcagtgattgtttctgcacacttttcaaataaaaaatgaatttttatcaatta

SEQ ID NO: 280338 - protein, 532 aa, Artificial Sequence
  derived and/or modified sequence
MLAEPFPKVVASLIILHLSGATKKGTEKQTTSETQKSVQCGTWTKHAEGGIFTSPNYPSKYPPDRECIYIIEAAPRQCIELYFDEKYSIEPSWECKFDHIEVRDGPFGFSPIIGRFCGQQNPPVIKSSGRFLWIKFFADGELESMGFSARYNFTPDPDFKDLGALKPLPACEFEMGGSEGIVESIQIMKEGKATASEAVDCKWYIRAPPRSKIYLRFLDYEMQNSNECKRNFVAVYDGSSSVEDLKAKFCSTVANDVMLRTGLGVIRMWADEGSRNSRFQMLFTSFQEPPCEGNTFFCHSNMCINNTLVCNGLQNCVYPWDENHCKEKRKTSLLDQLTNTSGTVIGVTSCIVIILIIISVIVQIKQPRKKYVQRKSDFDQTVFQEVFEPPHYELCTLRGTGATADFADVADDFENYHKLRRSSSKCIHDHHCGSQLSSTKGSRSNLSTRDASILTEMPTQPGKPLIPPMNRRNILVMKHSYSQDAADACDIDEIEEVPTTSHRLSRHDKAVQRFCLIGSLSKHESEYNTTRV

SEQ ID NO: 280339 - protein, 533 aa, Artificial Sequence
  derived and/or modified sequence
MIHGRSVLHIVASLIILHLSGATKKGTEKQTTSETQKSVQCGTWTKHAEGGIFTSPNYPSKYPPDRECIYIIEAAPRQCIELYFDEKYSIEPSWECKFDHIEVRDGPFGFSPIIGRFCGQQNPPVIKSSGRFLWIKFFADGELESMGFSARYNFTPDPDFKDLGALKPLPACEFEMGGSEGIVESIQIMKEGKATASEAVDCKWYIRAPPRSKIYLRFLDYEMQNSNECKRNFVAVYDGSSSVEDLKAKFCSTVANDVMLRTGLGVIRMWADEGSRNSRFQMLFTSFQEPPCEGNTFFCHSNMCINNTLVCNGLQNCVYPWDENHCKEKRKTSLLDQLTNTSGTVIGVTSCIVIILIIISVIVQIKQPRKKYVQRKSDFDQTVFQEVFEPPHYELCTLRGTGATADFADVADDFENYHKLRRSSSKCIHDHHCGSQLSSTKGSRSNLSTRDASILTEMPTQPGKPLIPPMNRRNILVMKHSYSQDAADACDIDEIEEVPTTSHRLSRHDKAVQRFCLIGSLSKHESEYNTTRV

SEQ ID NO: 280340 - DNA, 1599 bp, Artificial Sequence
  derived and/or modified sequence
atgcttgcggagcctttccccaaagtagtggcgagcctgatcatcctgcacttgagtggggccaccaaaaagggtaccgagaaacagaccacctctgagacacagaaaagcgttcaatgcggtacgtggaccaagcatgccgagggtggcatctttacctcaccaaattatccatccaagtaccccccagatcgggagtgcatatacatcatcgaagctgcccctcgtcagtgtatagaattgtacttcgacgagaaatattccatcgaaccaagctgggagtgcaaattcgatcatattgaggtgcgggacggcccattcgggttctctcccataataggacgcttctgtgggcagcaaaaccccccagtgatcaagagtagcggccgattcctatggatcaagtttttcgcggacggggagctggagtctatgggcttcagtgcacggtacaattttacaccagaccccgatttcaaggatctgggggcactgaagccccttccggcctgcgagttcgagatgggcggatcggaagggatcgttgaaagcattcagataatgaaggaaggcaaggccacagcctcagaggccgtggactgtaagtggtatatccgagcccctcctagaagtaaaatctacttgaggttcctggactatgaaatgcagaacagcaatgaatgtaagcgcaactttgtggccgtgtatgatgggtccagtagtgtcgaggatctgaaggctaaattttgttctaccgtagctaacgacgtcatgctacggactggactgggagttattaggatgtgggctgacgagggtagccgcaactccaggtttcaaatgttgttcacatccttccaagagcctccctgtgagggaaacacgttcttctgccatagcaacatgtgcattaacaacacattggtctgtaatggcctgcagaactgcgtctatccttgggacgagaatcattgcaaggaaaagcggaagaccagcttgctcgatcagctaactaatacttctggcacagtgatcggagtcacttcttgcattgtaataatcctgatcatcatcagcgtgatcgtacaaattaaacagccgcgaaagaaatacgtccaacgtaagagtgattttgatcagaccgtgttccaggaagtgtttgaaccaccacattacgaactgtgcacactgcgaggcactggggccaccgctgatttcgctgacgtggctgacgacttcgagaattaccataaactcagacgatcgtcttccaaatgtatccacgatcaccactgtgggtctcagctgtcctctacaaaaggtagtaggtccaatctatccaccagggacgcgagcatattaacagagatgcctacccagcctggcaagcccctgattccacctatgaaccggcggaacattctcgtcatgaaacacagctactcccaggacgccgccgatgcgtgtgatatcgatgagatcgaggaggtgcctactacttcacacaggctgtccaggcatgacaaggccgtacaaagattttgcctcattggctcgctgagcaagcacgagtccgaatataatacaactagagtgtag

SEQ ID NO: 280341 - DNA, 1602 bp, Artificial Sequence
  derived and/or modified sequence
atgattcacgggaggagcgttctgcacatagtggcaagtctgattattctgcacctcagcggcgctaccaagaagggcacagagaagcaaaccacctctgagacccagaagagtgttcagtgcggtacctggacaaaacatgcagaagggggcatattcacgagccctaactatccttctaaataccctcctgaccgtgagtgcatttatattatcgaagccgcccctcgccagtgcattgagctgtactttgatgaaaagtactccatcgagccctcatgggagtgcaagtttgaccatatagaagttcgcgacgggcctttcggtttcagtcctatcatcgggcgcttctgtggccaacagaatcctcctgtgattaagagcagcggaagattcctgtggatcaaattctttgcagacggcgaactggagagcatggggttcagcgcacgttataactttacccctgatccagacttcaaggatcttggagcactgaagccccttcctgcatgtgagttcgagatgggcgggagcgaaggaatcgttgaatccatccagatcatgaaggaaggtaaggctactgcttcagaggccgtggactgcaagtggtacatacgcgcccccccccggtctaaaatatacctgcgcttcttggattatgagatgcaaaattctaatgaatgtaaacggaatttcgtagcagtgtacgacggatcaagcagcgttgaagacctcaaggcaaaattctgtagcaccgtagctaatgacgtaatgctgagaactgggctgggagttatcagaatgtgggcggacgagggtagcagaaattctcggtttcagatgttgtttacttctttccaggaaccgccatgtgagggcaatacgttcttctgccacagtaatatgtgcataaataatacactggtgtgtaacggcctgcaaaactgcgtgtacccttgggacgagaaccattgcaaggaaaagcgcaaaacatctctgctcgatcagctaactaacacgtctgggacggtgatcggcgtaaccagctgtattgtcatcatcctgatcattatctctgtcattgtccagatcaagcagccgaggaaaaaatatgtacagcgcaaaagcgacttcgaccaaactgtcttccaggaagtatttgagccgcctcattacgagttgtgcactctcagaggaaccggtgccacggccgactttgctgacgtcgccgacgacttcgagaactaccacaagcttcgcaggtcctcttccaaatgcatccacgaccatcattgcggcagccagctgtcttcgacgaaaggcagtaggtccaatctttcgacccgggacgcttcaattctaaccgaaatgccgactcagcctgggaagccgctcatcccgcctatgaaccggcggaatatcctagtcatgaagcactcatacagtcaagatgcagccgatgcgtgcgatatagatgaaattgaagaggtgccaaccacttcccaccgtttgagccgccatgataaagccgtccagagattctgcctgattggatcccttagtaagcatgagagcgaatataatacgaccagagtatag

SEQ ID NO: 280342 - DNA, 1602 bp, Artificial Sequence
  derived and/or modified sequence
atgatccatggtcggtcggttttgcatattgtcgcttccctaatcatcttgcacctgagtggcgctaccaaaaagggcacagagaaacagaccacttctgaaacccagaagagtgtgcagtgcggtacctggacaaagcacgcggaaggggggatcttcacctctcctaattacccctccaagtatcctcccgatagagaatgtatttatatcatcgaggcagcgcccagacagtgcatcgaactgtacttcgatgagaagtactctattgagccctcatgggagtgcaaatttgatcacatcgaagtcagagatggccctttcggcttctcaccgatcattggccgcttctgtggacagcagaatccacctgtgatcaagtcctcagggagattcctgtggataaaattttttgctgatggtgagctcgagtcaatgggcttcagcgctagatacaacttcacacctgaccccgatttcaaggacttaggagctctcaaacctctgcccgcatgtgagttcgagatggggggatctgagggcattgtggagtcaatccagattatgaaagagggaaaagccaccgccagcgaggcggttgattgtaaatggtacattagagccccgccaaggagtaagatctacttaaggttcttggattatgagatgcagaatagcaatgaatgcaagcgcaacttcgtggccgtgtatgatggttccagtagtgtggaggacctcaaagccaaattctgtagcaccgtagccaacgatgtgatgcttcgaacaggcctcggagtgatccggatgtgggccgacgaaggctctcgcaattcacggtttcagatgttgtttactagttttcaggaaccaccttgtgaaggcaacactttcttctgtcattctaatatgtgtatcaacaatacactggtgtgcaatgggctccagaactgcgtgtacccatgggatgagaaccactgcaaagaaaagcggaaaacgtcactcttggatcaacttactaacactagcggcactgtgatcggcgtaaccagctgcatagtgataatcctaatcattattagcgttattgtgcaaataaagcaaccaaggaaaaagtatgtgcagaggaaaagcgattttgaccagaccgtgttccaagaagtgtttgaaccaccgcactacgagctgtgtaccctacggggaacaggagctacggccgacttcgccgatgtcgccgacgatttcgaaaactatcataagcttcggcggagcagctcaaaatgcatccatgaccaccattgcgggagccaactgagctctaccaaaggcagccggtcgaaccttagcacccgcgatgcctctattttaaccgagatgcctacccagcccggaaagcctctgatccctcctatgaacaggcgtaacattctagtcatgaagcacagttattcacaggacgccgctgatgcctgcgatatcgatgaaatagaagaggtgccgactacttcccataggctgtctagacacgataaagcagtccagaggttctgtctcatcggctctctgtctaagcacgagagcgagtacaatacaaccagagtgtag

SEQ ID NO: 280343 - DNA, 1599 bp, Artificial Sequence
  derived and/or modified sequence
atgctggccgagcccttccccaaggtggtggccagcctcatcatcctgcacctgagcggggccaccaagaagggcacagagaagcagaccaccagcgagacccagaagtctgtgcagtgtggcacctggaccaagcatgctgagggcggcatcttcaccagccccaactaccccagcaagtaccccccagaccgggagtgcatctacatcattgaagctgccccccggcagtgcatcgagctgtactttgatgagaagtacagcattgagcccagctgggagtgcaagtttgaccacatcgaggtgagagatggccccttcggcttcagccccatcatcggccgcttctgtggccagcagaacccccctgtgatcaagagcagcggccgcttcctgtggatcaagttctttgctgatggagagctggagagcatgggcttcagcgcccgctacaacttcaccccagaccctgacttcaaggacctgggcgccctgaagcccctgcctgcctgtgaatttgagatgggcggcagcgagggcatcgtggagagcatccagatcatgaaggagggcaaggccacagccagcgaggccgtggactgcaagtggtacatccgggccccacccaggagcaagatctacctgcgcttcctggactatgagatgcagaacagcaatgaatgcaagaggaactttgtggccgtgtatgatggcagcagctctgtggaggacctgaaggccaagttctgcagcacagtggccaatgatgtgatgctgaggacaggcctgggcgtcatccgcatgtgggcagatgagggcagcaggaacagccgcttccagatgctgttcaccagcttccaggagcccccctgtgagggcaacaccttcttctgccacagcaacatgtgcatcaacaacaccctggtgtgcaatggcctgcagaactgtgtgtacccctgggatgagaaccactgcaaggagaagaggaagaccagcctgctggaccagctgaccaacaccagcggcaccgtgattggagtgaccagctgcatcgtcatcatcctgatcatcatctctgtgattgtgcagatcaagcagcccaggaagaagtatgtgcagaggaagagtgactttgaccagacagtgttccaggaggtgtttgagcccccccactatgagctgtgcaccctgcggggcaccggggccacagctgactttgctgatgtggctgatgactttgagaactaccacaagctgcggcgcagcagcagcaagtgcatccatgaccaccactgcggcagccagctgagcagcaccaagggcagccgcagcaacctgagcaccagagatgccagcatcctgacagagatgcccacccagcccgggaagcccctcatcccccccatgaacagaagaaacatcctggtgatgaagcacagctacagccaggatgctgctgatgcctgtgacattgatgaaattgaggaggtgcccaccaccagccaccggctgagcagacatgacaaggctgtgcagcgcttctgcctgattggcagcctgagcaagcatgaaagtgagtacaacaccaccagggtgtag

SEQ ID NO: 280344 - DNA, 1602 bp, Artificial Sequence
  derived and/or modified sequence
atgattcatggccgctctgtgctgcacatcgtggccagcctcatcatcctgcacctgagcggggccaccaagaagggcacagagaagcagaccaccagcgagacccagaagtctgtgcagtgtggcacctggaccaagcacgccgagggcggcatcttcaccagccccaactaccccagcaagtaccccccagaccgggagtgcatctacatcatcgaggccgccccccggcagtgcatcgagctgtactttgatgagaagtacagcattgagcccagctgggagtgcaagtttgaccacatcgaggtgagagatggccccttcggcttcagccccatcatcggccgcttctgtggccagcagaacccccctgtgatcaagagcagcggccgcttcctgtggatcaagttctttgctgatggagagctggagagcatgggcttcagcgcccgctacaacttcaccccagaccctgacttcaaggacctgggcgccctgaagcccctgcctgcctgtgaatttgagatgggcggcagcgagggcatcgtggagagcatccagatcatgaaggagggcaaggccacagccagcgaggccgtggactgcaagtggtacatccgggccccacccaggagcaagatctacctgcgcttcctggactatgagatgcagaacagcaatgaatgcaagaggaactttgtggccgtgtatgatggcagcagctctgtggaggacctgaaggccaagttctgcagcacagtggccaatgatgtgatgctgaggacaggcctgggcgtcatccgcatgtgggcagatgagggcagcaggaacagccgcttccagatgctgttcaccagcttccaggagcccccctgtgagggcaacaccttcttctgccacagcaacatgtgcatcaacaacaccctggtgtgcaatggcctgcagaactgtgtgtacccctgggatgagaaccactgcaaggagaagaggaagaccagcctgctggaccagctgaccaacaccagcggcaccgtcatcggcgtgaccagctgcatcgtcatcatcctgatcatcatcagcgtcatcgtgcagatcaagcagcccaggaagaagtatgtgcagaggaagagtgactttgaccagaccgtcttccaggaggtgtttgagcccccccactatgagctgtgcaccctgcggggcactggagccacagctgactttgctgatgtggctgatgactttgagaactaccacaagctgcggcgcagcagcagcaagtgcatccatgaccaccactgcggcagccagctgagcagcaccaagggcagccgcagcaacctgagcaccagagatgccagcatcctgacagagatgcccacccagcccgggaagcccctcatcccccccatgaacagaagaaacatcctggtgatgaagcacagctacagccaggatgctgctgatgcctgtgacattgatgaaattgaggaggtgcccaccaccagccaccggctgagcagacatgacaaggctgtgcagcgcttctgcctgattggcagcctgagcaagcatgagagcgagtacaacaccaccagggtgtag

SEQ ID NO: 280345 - DNA, 1599 bp, Artificial Sequence
  derived and/or modified sequence
atgctggccgagcccttccccaaggtggtggccagcctgatcatcctgcacctatcaggcgctactaaaaaaggtaccgagaagcagacgacatcagagactcagaaatcagtccagtgcggcacctggacaaagcacgcggagggcgggatattcactagtcccaactatccctccaagtatcccccagaccgggaatgcatttatattatagaggccgccccccgccagtgcatcgaactgtacttcgacgagaagtacagcatcgaaccctcttgggagtgcaaattcgaccacattgaagtgagagatggaccattcgggtttagccccataatcggccggttttgcgggcagcagaatcctcccgtgatcaagtcctcgggtaggttcctctggatcaagtttttcgccgatggcgagttggagagtatggggttctccgcccggtacaacttcacaccagacccagacttcaaagacctgggagctctcaaaccactacctgcctgtgagttcgaaatgggtggaagcgagggcatcgtggagtctatccagattatgaaggagggtaaagcaactgcttcagaggccgtggactgtaagtggtatattcgtgctccaccccgcagcaagatttatttgcgctttttagattatgagatgcagaactctaacgagtgcaagcgaaatttcgtggccgtttacgacgggtcttcaagcgtggaagacttgaaggctaagttctgttccaccgttgcaaatgacgtcatgttgagaaccggcctgggcgtgatccgcatgtgggccgacgaaggcagcagaaactcccgtttccagatgctgttcacgtcatttcaggagcctccgtgcgaaggcaatacctttttctgtcactctaacatgtgcatcaacaatactttggtttgtaacggacttcagaattgtgtatacccttgggatgagaaccactgcaaagagaagcgcaaaacgtctttactcgaccagctcactaacactagtggtactgtaatcggggtcacctcgtgcatcgtgattatcctgattattatcagtgtgattgtacagatcaaacaaccccggaagaaatacgtgcagaggaaaagtgattttgatcagacagtgttccaagaggtgttcgaaccacctcactatgagctgtgcactctgcgcggaacaggggccaccgccgattttgctgatgtagccgacgacttcgagaattaccataagctcaggcggtcctcctccaagtgcattcatgaccaccattgcggttcccagctctcttcgactaaaggctcgcggtcaaacctgtccacgcgagatgcctcgattctcacagaaatgccaacccagcccgggaagcctctcatccctcctatgaaccggcgcaacatccttgttatgaagcattcttacagtcaggacgcagcagacgcatgcgacatcgatgaaatcgaggaagttcccacaacttcccacaggctgagccgccacgacaaggccgtgcagaggttttgtctgatcgggtccctctcaaaacatgagtcggaatacaatacaacccgggtatag

SEQ ID NO: 280346 - DNA, 1602 bp, Artificial Sequence
  derived and/or modified sequence
atgatccacggccggagcgtgctgcacatcgtggccagcctgatcatcttgcatctgagtggggccacaaaaaagggcacagagaaacagaccacaagcgagacccaaaagtccgttcagtgtgggacgtggacaaaacacgccgaaggcggcatttttacctcccccaattacccaagcaaatacccacccgaccgcgagtgcatctatattatagaagccgctccacgacaatgtattgagctttacttcgatgagaaatactctatagaaccgtcttgggaatgcaaattcgatcacattgaggtgcgggatggccctttcgggttttcaccaatcattgggcggttctgtggccaacaaaatccaccagtgattaagtcctcaggacggtttctttggattaagtttttcgctgacggcgaactggaatcaatggggtttagtgctcgctataacttcacgccggaccctgatttcaaggatcttggcgcactcaagcctctaccagcctgtgaatttgagatgggcgggtccgagggaatagtggagagcatacagattatgaaagagggcaaggcgactgcctccgaggcggtggactgtaaatggtacattcgagccccaccaagatccaagatctacctgaggttcctggactatgagatgcaaaactccaatgagtgtaaacgcaactttgtggctgtttatgatggatccagttctgtcgaggacctgaaagctaaattttgctccacagtggccaacgatgtgatgctgcgaactggactgggagtaataagaatgtgggctgacgaggggagccggaatagtagattccaaatgctgtttacatcttttcaagagccaccttgcgaaggcaataccttcttctgccactcaaacatgtgtatcaacaacactctggtatgcaacggactgcagaattgtgtgtacccttgggacgaaaatcactgcaaagagaagaggaaaaccagcctgctggatcagctcacaaacacttctggtaccgtgatcggggtaaccagctgtattgttattatcctgatcatcatcagcgtgattgtccaaatcaagcagcctcgaaagaaatatgtgcaaaggaaatcagactttgaccagaccgtcttccaggaggtcttcgaacctccccactacgaactgtgtacgctccgcggaactggggccacggccgactttgcggacgtagcagatgatttcgagaactatcacaagctgcggcgctccagctccaaatgcattcatgaccaccattgtggatcccagctcagcagcactaagggcagtagaagcaatttgtccacaagagatgcttccatccttaccgagatgcccacccaacccgggaagccactgattccacccatgaatagacggaacatcctggtgatgaagcactcctattctcaagacgccgcagacgcatgtgatattgatgaaatcgaggaagtgcccacaactagtcacagactttcaagacatgacaaagcagtgcagcgcttctgccttatcggatcactgtctaagcatgaaagcgagtacaacaccacaagggtgtag

SEQ ID NO: 280347 - DNA, 1602 bp, Artificial Sequence
  derived and/or modified sequence
atgatccacggccggagcgtgctgcacatcgtggccagcctgatcatcttgcatctttccggagcaacgaaaaaaggaaccgaaaaacagaccacaagtgagacccagaaaagcgttcaatgtgggacttggacaaagcacgcagagggagggatcttcacctccccaaactatccaagtaaatatcccccggaccgggaatgcatttatatcattgaggccgccccgcgacagtgcatcgaactgtatttcgacgagaaatattcaatagagccctcatgggaatgtaaattcgatcacatcgaggtccgagatggcccatttggcttctccccgatcattggcagattctgcgggcagcagaatccacccgtcatcaaatcttctggacgcttcttgtggatcaagttttttgcggatggtgagttggagagtatgggctttagtgctcgctacaatttcacccccgatcccgatttcaaagatctcggtgcactcaaacctctgccagcctgtgagttcgagatgggaggttcagaggggattgtggagagcatccagatcatgaaggaagggaaggccactgcctccgaggccgtggactgcaaatggtacatcagagccccaccccgcagtaaaatctacctgagatttctggattacgagatgcaaaactcaaacgaatgcaagagaaattttgtggccgtttacgatggctcaagctcagtggaggacctgaaggccaagttctgcagtaccgtagccaacgacgtaatgctaagaactggattgggagtgatccgcatgtgggctgatgagggtagccgtaatagtcgtttccagatgctgttcactagtttccaagaacccccatgtgagggcaacacatttttctgtcatagcaatatgtgcataaataacactttggtttgcaacggacttcagaattgcgtgtacccctgggatgagaaccactgcaaagaaaagaggaaaacttcattgctcgaccagctcactaacacctcaggaaccgttatcggagtgacctcatgcatcgttataatccttatcatcattagcgttattgtccaaattaagcagcccaggaagaaatacgtgcagcggaagtcagattttgaccagacggtctttcaggaggtgttcgagccaccccactatgagctctgcacactccgcggcaccggagcaacagctgacttcgctgacgtggcggatgattttgagaattatcacaaactgcgcaggtcttccagcaagtgtatccatgatcaccactgcgggagccagctgagcagtaccaagggctccaggtctaatctctccacaagggatgcctccattctgaccgagatgcctactcagcccggaaagcctctcatcccccctatgaacagaaggaacatccttgtgatgaagcattcatatagccaggacgccgcggacgcttgtgacattgacgagatcgaggaggtgccaaccacaagtcatcgcctaagcagacacgacaaggccgtgcaaagattttgcctcattggcagtctctcaaagcatgaatctgagtataacactacaagggtgtag

SEQ ID NO: 280348 - DNA, 2328 bp, Artificial Sequence
  derived and/or modified sequence
acagccacactgcagtatgtcaggaacagtcatggagctgttctcattgtttgcctctccttttcctcctttttaccttctggcccctctcttcattcagagatgctggcagagccattccctaaggttgtagcaagtttaatcatcctccatttgtctggggcaaccaagaaaggaacagaaaagcaaaccacctcagaaacacagaagtcagtgcagtgtggaacttggacaaaacatgcagagggaggtatctttacctctcccaactatcccagcaagtatccccctgaccgggaatgcatctacatcatagaagccgctccaagacagtgcattgaactttactttgatgaaaagtactctattgaaccgtcttgggagtgcaaatttgatcatattgaagttcgagatggaccttttggcttttctccaataattggacgtttctgtggacaacaaaatccacctgtcataaaatccagtggaagatttctatggattaaattttttgctgatggagagctggaatctatgggattttcagctcgatacaatttcacacctgatcctgactttaaggaccttggagctttgaaaccattaccagcgtgtgagtttgagatgggcggttccgaaggaattgtggagtctatacaaattatgaaggaaggcaaagctactgctagcgaggctgttgattgcaagtggtacatccgagcacctccacggtccaagatttacttacgattcttggactatgagatgcagaattcaaatgagtgcaagaggaattttgtggctgtgtatgatggaagcagttccgtggaggatttgaaagctaagttctgtagcactgtggctaatgatgtcatgctacgcacgggtcttggggtgatccgcatgtgggcagatgagggcagtcgaaacagccgatttcagatgctcttcacatcctttcaagaacctccttgtgaaggcaacacattcttctgccatagtaacatgtgtattaataatactttggtctgcaatggactccagaactgtgtgtatccttgggatgaaaatcactgtaaagagaagaggaaaaccagcctgctggaccagctgaccaacaccagtgggactgtcattggcgtgacttcctgcatcgtgatcatcctcattatcatctctgtcatcgtacagatcaaacagcctcgtaaaaagtatgtccaaaggaaatcagactttgaccagacagttttccaggaggtatttgaacctcctcattatgagttatgcactctcagagggacaggagctacagctgactttgcagatgtggcagatgactttgaaaattaccataaactgcggaggtcatcttccaaatgcattcatgaccatcactgtggatcacagctgtccagcactaaaggcagccgcagtaacctcagcacaagagatgcttctatcttgacagagatgcccacacagccaggaaaacccctcatcccacccatgaacagaagaaatatccttgtcatgaaacacagctactcgcaagatgctgcagatgcctgtgacatagatgaaatcgaagaggtgccgaccaccagtcacaggctgtccagacacgataaagccgtccagcggttctgcctcattgggtctctaagcaaacatgaatctgaatacaacacaactagggtctagaaagaaaattcaagagaagaactatttatacaaacatggggactgtgaaaagaaaattctatagtgaattgtgaaaagtggacatatttctaaattcattccactgcctttatccaaacttaagaattacagacatttgttattccttcggcaagacatccccgctgcacactgatatgttcatttcgtaatttggttgctggccaccaagtgctccttagtttttaaatacattttgagattaactggaaacttgaagaagaaattagttcccgattaagactatcccaactttatttttattgtcagtttcacttttgtttctatgttgttttatgtctttgttatataattgtacattgtgtgatatgtgaaaaaaaaacacgaatttggatgaaccttgtgttacatgtacattgttttcattatatagacagcttgagaatagtgcgttcctgaatgattttgaacatgctacagtgaaaagtgacagtgtggaccatggaatcaccagctagaggttatggactatacacacctattattatattctgattaaatacaggaaaaagtaacaagtaaaattactagattgcaataaaaaaattcattttttggtctttcctg

SEQ ID NO: 280349 - DNA, 8003 bp, Artificial Sequence
  derived and/or modified sequence
atgacggaccccttcttcctgccttcaatgcctcagcggaagatccccaagggctggagcgaggagcgctgccgctggacatcctcccggggaggctgctccgacctgctgcgcggcgcgtctgagactggggactgagccaccccgccgccgccggcgccgccgccgccgcccgctccgtcgctgccgtcggtctggactggcccccacctcgctgcgccctctccccggccccggccccggctcggggcgtcccggggctcgccctgcgaccgccgcctcccgcgcgccgcgtcctcccgaccccgcggcggcgacgatgcccgggaggagggtcctgacggcggcggcgcggatggtggcggccggcgcccgggtgtgatgcgagcgtcacggtggggatgctgctggctgcgcggcgctgagggccagcgagagcgagagcccgcccggggcggaggacggactcatccggatctggctgcagcgtgggctcggagctcccccttcctctcggtctccctctcggcccccctttatttccttcttgctttgcgtctttaacacctctcgaccctgtcctccccccgccactggaagtcttcccgtctctaaatggaattagtggagcccggagcctctggtgtaacgcacagacatgatccatgggcgcagcgtgcttcacattgtagcaagtttaatcatcctccatttgtctggggcaaccaagaaaggaacagaaaagcaaaccacctcagaaacacagaagtcagtgcagtgtggaacttggacaaaacatgcagagggaggtatctttacctctcccaactatcccagcaagtatccccctgaccgggaatgcatctacatcatagaagccgctccaagacagtgcattgaactttactttgatgaaaagtactctattgaaccgtcttgggagtgcaaatttgatcatattgaagttcgagatggaccttttggcttttctccaataattggacgtttctgtggacaacaaaatccacctgtcataaaatccagtggaagatttctatggattaaattttttgctgatggagagctggaatctatgggattttcagctcgatacaatttcacacctgatcctgactttaaggaccttggagctttgaaaccattaccagcgtgtgagtttgagatgggcggttccgaaggaattgtggagtctatacaaattatgaaggaaggcaaagctactgctagcgaggctgttgattgcaagtggtacatccgagcacctccacggtccaagatttacttacgattcttggactatgagatgcagaattcaaatgagtgcaagaggaattttgtggctgtgtatgatggaagcagttccgtggaggatttgaaagctaagttctgtagcactgtggctaatgatgtcatgctacgcacgggtcttggggtgatccgcatgtgggcagatgagggcagtcgaaacagccgatttcagatgctcttcacatcctttcaagaacctccttgtgaaggcaacacattcttctgccatagtaacatgtgtattaataatactttggtctgcaatggactccagaactgtgtgtatccttgggatgaaaatcactgtaaagagaagaggaaaaccagcctgctggaccagctgaccaacaccagtgggactgtcattggcgtgacttcctgcatcgtgatcatcctcattatcatctctgtcatcgtacagatcaaacagcctcgtaaaaagtatgtccaaaggaaatcagactttgaccagacagttttccaggaggtatttgaacctcctcattatgagttatgcactctcagagggacaggagctacagctgactttgcagatgtggcagatgactttgaaaattaccataaactgcggaggtcatcttccaaatgcattcatgaccatcactgtggatcacagctgtccagcactaaaggcagccgcagtaacctcagcacaagagatgcttctatcttgacagagatgcccacacagccaggaaaacccctcatcccacccatgaacagaagaaatatccttgtcatgaaacacagctactcgcaagatgctgcagatgcctgtgacatagatgaaatcgaagaggtgccgaccaccagtcacaggctgtccagacacgataaagccgtccagcggttctgcctcattgggtctctaagcaaacatgaatctgaatacaacacaactagggtctagaaagaaaattcaagagaagaactatttatacaaacatggggactgtgaaaagaaaattctatagtgaattgtgaaaagtggacatatttctaaattcattccactgcctttatccaaacttaagaattacagacatttgttattccttcggcaagacatccccgctgcacactgatatgttcatttcgtaatttggttgctggccaccaagtgctccttagtttttaaatacattttgagattaactggaaacttgaagaagaaattagttcccgattaagactatcccaactttatttttattgtcagtttcacttttgtttctatgttgttttatgtctttgttatataattgtacattgtgtgatatgtgaaaaaaaaacacgaatttggatgaaccttgtgttacatgtacattgttttcattatatagacagcttgagaatagtgcgttcctgaatgattttgaacatgctacagtgaaaagtgacagtgtggaccatggaatcaccagctagaggttatggactatacacacctattattatattctgattaaatacaggaaaaagtaacaagtaaaattactagattgcaataaaaaaattcattttttggtctttcctgtatacccctgatttcctttttgttttatatcaaagaaagtactgagtttcagaaatcctttttgaagtcaggtattttaccattcatactctacagtagaaatgtttttgattaagcactcagcaatatgaccaaattgacagtttgagaaaataccctgcatgtcagtactggatatttgagttgggaaaatatcctttttgttagacacattgtgaaaagcatgcattgtcaaatactgttgttactcttccatttctttatgtcatatgcttgctacttacgactttttatataaatatatataaaatgtataataatttcctaatttgagttaagagaaatgttttcttccattagagtgattaaaaaactgactcacataaatacacattttatgtcaactctttccaccttttagggtacaggatgtccttcagtattgaggtttacttcccaaaatatttggcttctaaaagtttaggggaatattttcttcttttagaatagggaactctttttaaaactgctttaaaatcacaagcccttttatgaattaaaccaccattatgaattattcttattctcaggtacacataatacacctgaaagcttagtgattatgatgtgtttaacataaagtaaaatcctaaaatatattttactgctattaaattatatacacactctgtaaagtttgatttggtgagtggttattttttaaaatattcaatgtgtaatcttacaaaataaatttttaaaataagaattactatcagtatatatgcttcccaacattttcaaaactactgaattctccaggtttaaagaactctgtccttccactaacagagcagtctggtctactaaaatttggactttgcaattcaagcaggctttgcaaactagatgaattactgttatacttccctactaggaatacaatgtcatatatgttaaaaaataagcaaatagaaaataaatttttataatagaaaagtcaaagagttatcatagccattataaacactctatcttgaaaaaatgtcaagctacagaatcacttcaatgaatttgataaactagggaatcagaaaaggttttgaacatgacaaagattatttttcattgttatgctacatagttttatacacattgcttatgataaaatgtacccttttttatttggcttgactggtttatttattaccatggttccttttttgccctttaatttaaaattaatacaccaaagatttttttaaaggattaatcatatcttatattgctttctccatttagaaatcttcagaggactcctttccctttgaatgataatctcaaaagtatgatataactgtcaagattttttatttgtaacagcaataaaaatagtgaaataagttaggtgaacattttactattaatttgttctataactgtccggcatgtccgtcccctccagtttctcctgaatatacagaatgctgattccctgcttaaaaggtattttcaccagaaatctaccaatgggactttaaaaaaaaacactaaatgaagtataataataagaatgaatagctcacatatatttaacacacagcagcttcatgggaaaacaactgtattttaaatgaagaacaggcctcctcagtgataactctaaaatttctcaacaatgtacagacacagactaatcatgaaagaagataatgacgatgctgggcagtgtctggaggtagccttttctcctggcattcactctagatgctcaaacttgggagtgcagcgctctggcagagttgggagatgttctctggagggctctggcggtgcttatttatcagccagtattgaaatttgtcaatatatcaaaaacgatttagtagctatatcagaccttatcacctgaatgcagcctttggcccacattctaaaggtggtgacacacatagataaggaatgagatgtctcaagacttataagacatgttattttaataaatgattatattttttgataaagtgaattcaaatattaccaacccaagtgctttattgatttaacaagatgatttcaaataatgcattaagttagcctgctgtgttaatttcataaagctattctttttcattttattttttcaagttttcattcacttttcaaaataatggtagcatataatcacatgcaatgccaatgaatccccatattaagcttcgtacttctgtccaaatgtattgtagttgcctaatttcaaggttctaatttggaaatctgatttattttgtatgtttttatatacataccaattttaagcattatcttgcaaagtagacataggtggtgtttgatttgccataattaacttgaatttgattttgtaaccaaaatgtggctgtccacataattggagatcagtgtctttgggcttttaatggagaacaaatcacattgtggtgttgctggtttttctgtttcacatttacttttgctctagaagtatttccgtgagtctgatgactccataagttatgatcctcagtgttaagtaacttagacggttggcattactttaatattcacttaagcttctgtatcatttttttctgtatttttcccttaggaatttaattcgggtcttcctcaaattttacagctttaaaaaaattccatgaatgggttttcctcaacctcagaatatcataataaattacaagatatgaccccctggttcctattaccttgattaaagtggcggcaattaatttactgatgttttgtcagtgaaataaataatagcatcttatgaagtttgtgtatctctgatgaaaatgagtcatgtcagattccctctctgaagggaagttaaataaacaacatttttaaaattctttgaattctaaataaatatgctttgaaaagtgagttagggttttgtctaattgcactgaggcgagctagcttcggtgccatttttctctgtgcccttttccctccatggattcatttctatctattgcactctagcgtaaaggacccagccaagaaattgtaaaatagattcaacaacaaaataaacaggtcttgagttaattatcaatctctatgcacttaattaatatttcccaagcccatcttaaaggtgtaataaggtagaaaaataaaagtacactgttaaaatagccagaaatgtttttataaataatcctgctaaataaatctgaggccctttgttaatttacaattatgattcattttattaataaacttgtttgaattgtaccacaaatttaactgaattgtatcatcaaaataaataaaacagggtaataaaaataacaattagggtgactgatgtcagacactcatatcaactcatcattttcttgtagcctctgattctgtactttcttgtgtattattaaagaggtaaatgctctcttaaaatgcctctagttcctcagaggtaggaaaaataaactcaacctgctttggacttgtgtatttacttgggttggtttccagaatctccttattcctgaaacagtatgatcatgtagttaaactactcctttatatctgtaagtactgtgcagccaacatgttcttttttgtccccaacttctgccatctttccaacctctgaggcatgctattttatagtggtttgctctttgaaaaattgtttttgtgccctctcttaatagtcacagatactgacacaaaacttaaaaatgaccagaaaacaatgtataaattatttaaaataaaacattctttttatatcacattatcaaatttgtactctttattcacttttccattaagtgtgatatcaatatagctaggctgttttgagcttgcacagtctgtctaccaagctccttcctaagtactttgagggtaaaatgaagaaggcagtctaggaaggaacacaattacagagccctgtagaaggcagactgcttacaggagctgtataaggaaaattaagcccaacattatgtgctgtgttggccatcatgcaaagctgattgcaaagccctggttacctccttcatcatcttccatggaagataaaaataaattcaaatgttaattcaatagacatgatgctttataatgaagaagtttgtagcagaaacctgagaatataggtatcttcttaagatcaagagaggctttgtgaataactgaccttctaagcaggtcttgaagaatggagacaatggtcaaatagtagtgcagggagaaatttccacctagagtaattaaagcagatgtaggctcagaagatcatctaattgagctggttggaacatagacaggagacatactaagtatatttgacagagtaggtttgagtttacatcatgatttctgagtgcatggaatactatccaaaggaatttacactttattcaagggagaatattttaagatctcagcagaatggaacttaagatttctactttcagtagaagcctctgacaggtatgtttgctaaattgaatgggagtgaaatacagtagaatcaaaacagtgtagaaacaagacatgagaaagagtaacgggcagattgttagatgtccaggaatatttgtctggcttttttacttctactatactttattgtttcaaggtgatggttgactagcgaacatactgagggtcacatgccaaacaccattttgagtgttttacatgtaatttttttccttggtcatcttagcaattctatgactaattaataatatttgttgttatttattgtacagatgaggaaactgaagagttttagtaacttttttaagattacacaataaacaatgatgaatcaagctttgaagccaacctcaccaaccacaagatcaaccaacactcttcaccaatgtgtaatataaccacgttaatattcaacatagtacgtactgctgaaagaagttgatacttattcatattaaccccgtagttttgtgtttcctcatctgtaaaagtatgtattataacaccttctctccaccttacagcgtgtgaggttcaaatgaccattcattggaagatattttttatatcctataatgcattataaaaataaatcatttttcctaaa

SEQ ID NO: 280350 - DNA, 2357 bp, Artificial Sequence
  derived and/or modified sequence
gggtgtgatgcgagcgtcacggtggggatgctgctggctgcgcggcgctgagggccagcgagagcgagagcccgcccggggcggaggacggactcatccggatctggctgcagcgtgggctcggagctcccccttcctctcggtctccctctcggcccccctttatttccttcttgctttgcgtctttaacacctctcgaccctgtcctccccccgccactggaagtcttcccgtctctaaatggaattagtggagcccggagcctctggtgtaacgcacagacatgatccatgggcgcagcgtgcttcacattgtagcaagtttaatcatcctccatttgtctggggcaaccaagaaaggaacagaaaagcaaaccacctcagaaacacagaagtcagtgcagtgtggaacttggacaaaacatgcagagggaggtatctttacctctcccaactatcccagcaagtatccccctgaccgggaatgcatctacatcatagaagccgctccaagacagtgcattgaactttactttgatgaaaagtactctattgaaccgtcttgggagtgcaaatttgatcatattgaagttcgagatggaccttttggcttttctccaataattggacgtttctgtggacaacaaaatccacctgtcataaaatccagtggaagatttctatggattaaattttttgctgatggagagctggaatctatgggattttcagctcgatacaatttcacacctgatcctgactttaaggaccttggagctttgaaaccattaccagcgtgtgagtttgagatgggcggttccgaaggaattgtggagtctatacaaattatgaaggaaggcaaagctactgctagcgaggctgttgattgcaagtggtacatccgagcacctccacggtccaagatttacttacgattcttggactatgagatgcagaattcaaatgagtgcaagaggaattttgtggctgtgtatgatggaagcagttccgtggaggatttgaaagctaagttctgtagcactgtggctaatgatgtcatgctacgcacgggtcttggggtgatccgcatgtgggcagatgagggcagtcgaaacagccgatttcagatgctcttcacatcctttcaagaacctccttgtgaaggcaacacattcttctgccatagtaacatgtgtattaataatactttggtctgcaatggactccagaactgtgtgtatccttgggatgaaaatcactgtaaagagaagaggaaaaccagcctgctggaccagctgaccaacaccagtgggactgtcattggcgtgacttcctgcatcgtgatcatcctcattatcatctctgtcatcgtacagatcaaacagcctcgtaaaaagtatgtccaaaggaaatcagactttgaccagacagttttccaggaggtatttgaacctcctcattatgagttatgcactctcagagggacaggagctacagctgactttgcagatgtggcagatgactttgaaaattaccataaactgcggaggtcatcttccaaatgcattcatgaccatcactgtggatcacagctgtccagcactaaaggcagccgcagtaacctcagcacaagagatgcttctatcttgacagagatgcccacacagccaggaaaacccctcatcccacccatgaacagaagaaatatccttgtcatgaaacacagctactcgcaagatgctgcagatgcctgtgacatagatgaaatcgaagaggtgccgaccaccagtcacaggctgtccagacacgataaagccgtccagcggttctgcctcattgggtctctaagcaaacatgaatctgaatacaacacaactagggtctagaaagaaaattcaagatgaggaaactgaagagttttagtaacttttttaagattacacaataaacaatgatgaatcaagctttgaagccaacctcaccaaccacaagatcaaccaacactcttcaccaatgtgtaatataaccacgttaatattcaacatagtacgtactgctgaaagaagttgatacttattcatattaaccccgtagttttgtgtttcctcatctgtaaaagtatgtattataacaccttctctccaccttacagcgtgtgaggttcaaatgaccattcattggaagatattttttatatcctataatgcattataaaaataaatcatttttcctaaatcatgtgtagacttcattttatgatcgacatggaacaaaagtatcatctataaagagtaacaatgtagagtaacccccctcagaacttgtccaccataaaatatatgactttccaaatccaa

SEQ ID NO: 280351 - DNA, 1599 bp, Artificial Sequence
  derived and/or modified sequence
atgttagcggagcctttccctaaggttgtggcgtcattaatcatcttgcacctgtcaggcgcaaccaaaaagggaacagaaaaacagacgacatccgaaacacagaaatccgtccagtgcgggacatggaccaaacatgccgagggtggtatattcacgtctcccaattatccatccaagtacccccctgatagagagtgtatctatatcatcgaagctgcccctcgacagtgcatagagctgtattttgacgagaaatacagtatcgagcccagttgggagtgtaaatttgatcacatcgaggttagagacgggccattcggattctcaccgattattggcaggttttgtggtcagcagaatccacctgttatcaagtcgtctggtagattcttatggatcaaattctttgccgatggagaattggagagcatgggcttctccgccaggtacaactttactccagaccccgattttaaggacttgggcgctctgaagcccctcccagcatgcgagtttgaaatgggcggtagcgagggcatcgtagaaagcatacagataatgaaggaggggaaggccacggccagcgaggctgtcgactgcaagtggtatattagggcgccaccacggtcaaaaatttatctgcgcttcctggactacgagatgcagaactctaatgagtgcaaacggaactttgttgccgtttacgatgggagtagctcagtcgaggacttaaaggccaagttttgcagcaccgtggccaacgacgtgatgttacgcaccgggctgggcgttattcgaatgtgggccgatgaaggatccaggaacagcagatttcagatgttatttacatctttccaggaaccgccatgtgagggaaatactttcttctgccattcaaacatgtgcatcaacaacactctcgtttgcaacggtctgcagaactgcgtatacccttgggacgagaaccactgcaaggagaaaagaaagactagcttgttggatcagctcaccaatacatcaggcaccgtgatcggagtcaccagctgcatcgtgattatactcattattatctccgtgattgtgcaaatcaagcaacctcggaaaaaatatgtgcagcggaagagcgattttgatcagaccgtgttccaggaagtgtttgagccccctcactatgagctgtgcacgttgagaggcacaggcgctaccgcagattttgccgatgtggctgatgactttgagaactaccacaaattgcggagaagttccagtaagtgcattcacgaccaccactgcgggagtcaattgagctcaacaaagggaagccgatctaatctttctacgagggacgccagcatactgacagaaatgcctactcagcccggaaagcccctgataccccctatgaacagacgaaatatcctggtcatgaagcattcctacagccaggacgcagcagatgcctgcgacatcgacgagatcgaagaagtccccactacttcccataggctgagccggcatgacaaagcggttcagcggttttgtctcataggatcgcttagcaagcacgaaagcgaatataacacaaccagggtgtag

SEQ ID NO: 280352 - DNA, 1602 bp, Artificial Sequence
  derived and/or modified sequence
atgatacatggtcgttcagtcttacacatcgtggcgtctctgatcatcttgcacctcagcggcgctaccaaaaaggggacggagaaacagacaactagcgaaactcagaagtcagtccaatgcgggacctggaccaaacacgcggagggaggtatttttactagccctaattacccatctaagtacccccctgatcgtgaatgtatctatataattgaagccgcacctagacagtgtattgaactgtattttgacgaaaagtatagcatcgagccttcgtgggaatgcaagttcgatcacattgaagttcgcgacggaccgtttgggttcagcccaattattggaagattctgcggacagcagaatccacctgtgatcaaaagctccgggcgtttcctttggatcaaattctttgctgacggcgagctcgaatccatgggcttttccgctagatataatttcacgcccgatcctgacttcaaggaccttggagctttaaagccacttcctgcttgtgagtttgagatgggtgggagtgagggcatcgtggagagcatccagattatgaaggagggaaaagcaaccgccagtgaggcagtcgattgcaagtggtacatacgcgctcctccgagatcaaagatttacttgcgatttctggactacgagatgcagaattccaacgagtgcaaacggaattttgtggccgtgtatgatggttcctctagtgtggaagacctcaaggcgaaattctgctcaacagtagcgaacgacgtgatgctccgcacgggattgggggttatccgcatgtgggctgacgagggaagccggaacagccggtttcagatgctctttacttccttccaggagcccccatgtgaggggaacacattcttttgtcactccaatatgtgtattaataacacattagtgtgtaatggcctgcagaactgtgtgtatccttgggacgagaaccattgtaaagaaaagcgcaagacttcattactggaccagctcactaatacttcgggaacagtgatcggcgtgacctcatgcattgtgatcatcctaataataattagcgttattgtgcagatcaagcagccccgaaaaaagtatgtccagaggaaatctgattttgatcagacggtatttcaagaggtctttgaacctccccattacgagctctgtacgctgcgcggaacgggcgcaactgccgatttcgcggatgtggctgatgacttcgagaactaccataagctgagaaggtcctcaagcaagtgcattcatgaccaccattgtggcagccaactctcttccactaagggctcaaggtccaacctgagtacccgagacgcatcaatcctcacagagatgcccacccaaccaggcaagccccttatcccacccatgaatcgaagaaacatattggtgatgaagcatagttatagccaggacgccgctgatgcctgtgatattgacgagatcgaagaggtgccaaccacttctcacagactgagtcgccacgacaaggcagtgcagaggttctgtctcatcggctccttgagtaagcatgaaagcgagtacaacacaactcgtgtgtag

SEQ ID NO: 280353 - DNA, 1602 bp, Artificial Sequence
  derived and/or modified sequence
atgattcacggaagaagcgtactccacattgtcgcgtctttgataatcctgcacctgtcgggggctactaaaaaaggcacggagaaacagaccacaagtgagacccaaaaaagtgtacagtgtggcacttggacaaagcatgccgaagggggtatttttacctcaccgaactaccctagcaaatacccccctgatagggagtgcatctacattattgaagctgccccacggcagtgcattgagctgtatttcgacgaaaaatatagcattgagcccagctgggaatgtaagtttgaccatatagaggtcagggatggcccttttggatttagccctatcattggtaggttctgcggccaacagaatcctccagtgatcaagtcctccggccgatttttgtggatcaaatttttcgctgacggggagctagagagtatggggttttcagcccgatacaatttcactccggatcctgacttcaaagatctcggagcacttaagcctcttccagcatgcgaattcgaaatgggcggatccgaggggattgttgaatcgatccagattatgaaggagggcaaagccaccgcttctgaggctgttgattgtaaatggtacattagggctccacccagatcaaagatttaccttcgcttcctagactacgaaatgcagaatagcaatgagtgtaaacggaattttgtggccgtatacgacggatcatcctctgtggaggacctgaaagccaaattctgctctacggtggccaacgacgtcatgcttcggacggggctgggcgtcataaggatgtgggcagatgagggaagtcgcaattcacggtttcagatgctgttcacatcgtttcaagagcccccatgcgagggcaacacgtttttttgtcacagcaacatgtgcatcaacaatacactagtttgtaacggcctgcaaaactgcgtatatccttgggacgaaaaccattgtaaggagaagagaaagacatccctgctcgaccagctaacaaatactagcggtaccgttatcggggtaacctcatgtattgtcatcattcttatcattatttccgtaatcgtacaaatcaagcagccccgaaaaaagtacgtgcagagaaaatccgatttcgatcagacagtgttccaagaagtgtttgaaccaccgcactatgaactgtgtaccctaagaggaaccggagcgaccgcggacttcgcagacgtggctgatgacttcgaaaattaccataaattgaggcggagtagcagcaaatgcattcatgatcaccattgcggcagccagctgtcctccacgaaggggagccgatccaacctgagtacccgagatgcgtccatcctaacggagatgcccacccagccaggcaagccactaatcccgccaatgaataggcggaatattcttgtgatgaagcattcatatagccaagacgccgcagacgcttgtgatatcgatgaaatcgaggaggtgcctactacctcccaccgattgtcccggcacgataaagccgtgcaaaggttctgtctcattgggagcctgtctaagcacgagtcagagtacaacaccacgcgtgtgtag

SEQ ID NO: 280354 - DNA, 1599 bp, Artificial Sequence
  derived and/or modified sequence
atgctggccgagcccttccccaaggtggtggccagcctgatcatcctgcacctgagcggcgccaccaagaagggcaccgagaagcagaccaccagcgagacccagaagagcgtgcagtgcggcacctggaccaagcacgccgagggcggcatcttcaccagccccaactaccccagcaagtacccccccgacagagagtgcatctacatcatcgaggccgcccccagacagtgcatcgagctgtacttcgacgagaagtacagcatcgagcccagctgggagtgcaagttcgaccacatcgaggtgagagacggccccttcggcttcagccccatcatcggcagattctgcggccagcagaacccccccgtgatcaagagcagcggcagattcctgtggatcaagttcttcgccgacggcgagctggagagcatgggcttcagcgccagatacaacttcacccccgaccccgacttcaaggacctgggcgccctgaagcccctgcccgcctgcgagttcgagatgggcggcagcgagggcatcgtggagagcatccagatcatgaaggagggcaaggccaccgccagcgaggccgtggactgcaagtggtacatcagagccccccccagaagcaagatctacctgagattcctggactacgagatgcagaacagcaacgagtgcaagagaaacttcgtggccgtgtacgacggcagcagcagcgtggaggacctgaaggccaagttctgcagcaccgtggccaacgacgtgatgctgagaaccggcctgggcgtgatcagaatgtgggccgacgagggcagcagaaacagcagattccagatgctgttcaccagcttccaggagcccccctgcgagggcaacaccttcttctgccacagcaacatgtgcatcaacaacaccctggtgtgcaacggcctgcagaactgcgtgtacccctgggacgagaaccactgcaaggagaagagaaagaccagcctgctggaccagctgaccaacaccagcggcaccgtgatcggcgtgaccagctgcatcgtgatcatcctgatcatcatcagcgtgatcgtgcagatcaagcagcccagaaagaagtacgtgcagagaaagagcgacttcgaccagaccgtgttccaggaggtgttcgagcccccccactacgagctgtgcaccctgagaggcaccggcgccaccgccgacttcgccgacgtggccgacgacttcgagaactaccacaagctgagaagaagcagcagcaagtgcatccacgaccaccactgcggcagccagctgagcagcaccaagggcagcagaagcaacctgagcaccagagacgccagcatcctgaccgagatgcccacccagcccggcaagcccctgatcccccccatgaacagaagaaacatcctggtgatgaagcacagctacagccaggacgccgccgacgcctgcgacatcgacgagatcgaggaggtgcccaccaccagccacagactgagcagacacgacaaggccgtgcagagattctgcctgatcggcagcctgagcaagcacgagagcgagtacaacaccaccagagtgtag

SEQ ID NO: 280355 - DNA, 1602 bp, Artificial Sequence
  derived and/or modified sequence
atgatccacggcagaagcgtgctgcacatcgtggccagcctgatcatcctgcacctgagcggcgccaccaagaagggcaccgagaagcagaccaccagcgagacccagaagagcgtgcagtgcggcacctggaccaagcacgccgagggcggcatcttcaccagccccaactaccccagcaagtacccccccgacagagagtgcatctacatcatcgaggccgcccccagacagtgcatcgagctgtacttcgacgagaagtacagcatcgagcccagctgggagtgcaagttcgaccacatcgaggtgagagacggccccttcggcttcagccccatcatcggcagattctgcggccagcagaacccccccgtgatcaagagcagcggcagattcctgtggatcaagttcttcgccgacggcgagctggagagcatgggcttcagcgccagatacaacttcacccccgaccccgacttcaaggacctgggcgccctgaagcccctgcccgcctgcgagttcgagatgggcggcagcgagggcatcgtggagagcatccagatcatgaaggagggcaaggccaccgccagcgaggccgtggactgcaagtggtacatcagagccccccccagaagcaagatctacctgagattcctggactacgagatgcagaacagcaacgagtgcaagagaaacttcgtggccgtgtacgacggcagcagcagcgtggaggacctgaaggccaagttctgcagcaccgtggccaacgacgtgatgctgagaaccggcctgggcgtgatcagaatgtgggccgacgagggcagcagaaacagcagattccagatgctgttcaccagcttccaggagcccccctgcgagggcaacaccttcttctgccacagcaacatgtgcatcaacaacaccctggtgtgcaacggcctgcagaactgcgtgtacccctgggacgagaaccactgcaaggagaagagaaagaccagcctgctggaccagctgaccaacaccagcggcaccgtgatcggcgtgaccagctgcatcgtgatcatcctgatcatcatcagcgtgatcgtgcagatcaagcagcccagaaagaagtacgtgcagagaaagagcgacttcgaccagaccgtgttccaggaggtgttcgagcccccccactacgagctgtgcaccctgagaggcaccggcgccaccgccgacttcgccgacgtggccgacgacttcgagaactaccacaagctgagaagaagcagcagcaagtgcatccacgaccaccactgcggcagccagctgagcagcaccaagggcagcagaagcaacctgagcaccagagacgccagcatcctgaccgagatgcccacccagcccggcaagcccctgatcccccccatgaacagaagaaacatcctggtgatgaagcacagctacagccaggacgccgccgacgcctgcgacatcgacgagatcgaggaggtgcccaccaccagccacagactgagcagacacgacaaggccgtgcagagattctgcctgatcggcagcctgagcaagcacgagagcgagtacaacaccaccagagtgtag

SEQ ID NO: 280356 - protein, 535 aa, Artificial Sequence
  derived and/or modified sequence
MKKISLKTLRKSFNLNKSKEETDFMVVQQPSLASDFGKDDSLFGSCYGKDMASCDINGEDEKGGKNRSKSESLMGTLKRRLSAKQKSKGKAGTPSGSSADEDTFSSSSAPIVFKDVRAQRPIRSTSLRSHHYSPAPWPLRPTNSEETCIKMEVRVKALVHSSSPSPALNGVRKDFHDLQSETTCQEQANSLKSSASHNGDLHLHLDEHVPVVIGLMPQDYIQYTVPLDEGMYPLEGSRSYCLDSSSPMEVSAVPPQVGGRAFPEDESQVDQDLVVAPEIFVDQSVNGLLIGTTGVMLQSPRAGHDDVPPLSPLLPPMQNNQIQRNFSGLTGTEAHVAESMRCHLNFDPNSAPGVARVYDSVQSSGPMVVTSLTEELKKLAKQGWYWGPITRWEAEGKLANVPDGSFLVRDSSDDRYLLSLSFRSHGKTLHTRIEHSNGRFSFYEQPDVEGHTSIVDLIEHSIRDSENGAFCYSRSRLPGSATYPVRLTNPVSRFMQVRSLQYLCRFVIRQYTRIDLIQKLPLPNKMKDYLQEKHY

SEQ ID NO: 280357 - DNA, 1608 bp, Artificial Sequence
  derived and/or modified sequence
atgaagaagatcagcctgaagaccctgagaaagagcttcaacctgaacaagagcaaggaggagaccgacttcatggtggtgcagcagcccagcctggccagcgacttcggcaaggacgacagcctgttcggcagctgctacggcaaggacatggccagctgcgacatcaacggcgaggacgagaagggcggcaagaacagaagcaagagcgagagcctgatgggcaccctgaagagaagactgagcgccaagcagaagagcaagggcaaggccggcacccccagcggcagcagcgccgacgaggacaccttcagcagcagcagcgcccccatcgtgttcaaggacgtgagagcccagagacccatcagaagcaccagcctgagaagccaccactacagccccgccccctggcccctgagacccaccaacagcgaggagacctgcatcaagatggaggtgagagtgaaggccctggtgcacagcagcagccccagccccgccctgaacggcgtgagaaaggacttccacgacctgcagagcgagaccacctgccaggagcaggccaacagcctgaagagcagcgccagccacaacggcgacctgcacctgcacctggacgagcacgtgcccgtggtgatcggcctgatgccccaggactacatccagtacaccgtgcccctggacgagggcatgtaccccctggagggcagcagaagctactgcctggacagcagcagccccatggaggtgagcgccgtgcccccccaggtgggcggcagagccttccccgaggacgagagccaggtggaccaggacctggtggtggcccccgagatcttcgtggaccagagcgtgaacggcctgctgatcggcaccaccggcgtgatgctgcagagccccagagccggccacgacgacgtgccccccctgagccccctgctgccccccatgcagaacaaccagatccagagaaacttcagcggcctgaccggcaccgaggcccacgtggccgagagcatgagatgccacctgaacttcgaccccaacagcgcccccggcgtggccagagtgtacgacagcgtgcagagcagcggccccatggtggtgaccagcctgaccgaggagctgaagaagctggccaagcagggctggtactggggccccatcaccagatgggaggccgagggcaagctggccaacgtgcccgacggcagcttcctggtgagagacagcagcgacgacagatacctgctgagcctgagcttcagaagccacggcaagaccctgcacaccagaatcgagcacagcaacggcagattcagcttctacgagcagcccgacgtggagggccacaccagcatcgtggacctgatcgagcacagcatcagagacagcgagaacggcgccttctgctacagcagaagcagactgcccggcagcgccacctaccccgtgagactgaccaaccccgtgagcagattcatgcaggtgagaagcctgcagtacctgtgcagattcgtgatcagacagtacaccagaatcgacctgatccagaagctgcccctgcccaacaagatgaaggactacctgcaggagaagcactactag

SEQ ID NO: 280358 - DNA, 1608 bp, Artificial Sequence
  derived and/or modified sequence
atgaagaagatcagtttgaagaccttgaggaaaagcttcaaccttaacaagagcaaggaggaaaccgatttcatggtggtccagcagccttctctcgcaagcgactttggtaaagatgactccctatttggttcatgctacggcaaagatatggcgagttgtgatataaacggtgaggatgagaaaggagggaaaaataggagtaaatctgaatccctgatgggtacattgaagaggcggttgtccgctaaacagaagtccaaggggaaggctggaacgccaagtggttccagtgcagatgaggacaccttttcatcttcaagtgcccccatcgtctttaaggacgttcgtgctcaacgccccatcagaagcactagcctccggtcccatcactactcacccgcgccctggcccctgcgaccaacaaactctgaggagacttgtatcaagatggaggtacgtgtcaaagccctcgtgcattcaagtagcccttcccccgccctcaatggggttcgcaaagatttccacgatcttcagtccgagaccacttgccaggaacaggccaatagcctcaagagttctgcgtcacacaatggggatctgcatcttcatctggatgagcacgtccccgtagtcattgggcttatgccccaggactacatccagtatacggtgccattagatgagggcatgtaccctctggagggtagcaggagttattgtttagacagcagcagcccgatggaggtgtctgccgtccccccgcaggttggcgggcgcgccttccccgaggacgaaagccaagttgatcaggatcttgtggtggcccccgagattttcgttgaccagtcagtgaatggcctccttattggcacgactggagtcatgcttcagagccccagggccggccatgatgacgtgcctcccctgtctccgctgttgccacctatgcaaaacaaccagatccagagaaacttttcagggctgacagggacggaggcccatgtggcagagagcatgaggtgtcaccttaattttgatccaaactcggcgccgggtgtcgcccgagtgtatgactccgtgcaatcaagcggcccaatggtcgtgacaagcttgaccgaagaactgaagaaactcgccaagcaggggtggtactggggacctattaccaggtgggaggctgaaggtaagctggctaacgtgccagacggatccttcctggtccgggactcatcagatgaccgctaccttttatcgttgagcttcagatcacatggcaagacactgcatactagaatagaacattcaaacgggcgtttttcgttctacgaacagccagacgttgaggggcatactagtatcgtggacttgatcgagcattccataagggactcggagaacggagctttctgctacagccgatcccggttacccggaagtgctacttatccggtgcgtctcaccaatccagtctcaaggtttatgcaagtccgctctcttcagtacctgtgcaggttcgtgattcgtcagtacacccggattgacctgatccaaaaactccctctccccaataagatgaaggattacttgcaggaaaaacactactag

SEQ ID NO: 280359 - DNA, 1608 bp, Artificial Sequence
  derived and/or modified sequence
atgaagaagatcagcctgaagaccctgaggaagagcttcaacctgaacaagagcaaggaggagacagacttcatggtggtgcagcagcccagcctggccagtgactttgggaaggatgacagcctgtttggcagctgctacggcaaggacatggccagctgtgacatcaatggagaagatgagaagggcggcaagaacagaagcaagtctgagagcctgatgggcaccctgaagaggcggctgagcgccaagcagaagagcaagggcaaggccggcaccccatctggcagcagcgcagatgaggacaccttcagcagcagcagcgcccccatcgtgttcaaggatgtgcgggcccagaggcccatccgcagcaccagcctgcggagccaccactacagccctgccccctggcccctgcggcccaccaacagcgaggagacctgcatcaagatggaggtgcgggtgaaggccctggtgcacagcagcagccccagccctgccctgaatggagtgaggaaggacttccatgacctgcagagcgagaccacctgccaggagcaggccaacagcctgaagagcagcgccagccacaacggggacctgcacctgcacctggatgagcacgtgcctgtggtgattggcctgatgccccaggactacatccagtacacagtgcccctggatgagggcatgtaccccctggagggcagccgcagctactgcctggacagcagcagccccatggaggtgtctgctgtgcccccccaggtgggcggccgggccttcccagaagatgagagccaggtggaccaggacctggtggtggcccctgagatctttgtggaccagagcgtgaatggcctgctgattggcaccactggagtgatgctgcagagcccccgggccggccatgatgatgtgccccccctgagccccctgctgccccccatgcagaacaaccagatccagaggaacttcagcggcctgaccggcacagaggcccacgtggccgagagcatgcgctgccacctgaactttgaccccaacagcgcccctggggtggcccgggtgtatgacagcgtgcagagcagcggccccatggtggtgaccagcctgacagaggagctgaagaagctggccaagcagggctggtactggggccccatcacccgctgggaggccgagggcaagctggccaacgtgcctgatggcagcttcctggtgcgggacagcagtgatgaccgctacctgctgagcctgtccttccgcagccacggcaagaccctgcacaccagaattgagcacagcaatggccgcttctccttctatgagcagccagatgtggagggccacaccagcatcgtggacctgattgagcacagcatccgggacagtgaaaatggagccttctgctacagccgcagccggctgcccggcagcgccacctaccctgtgcggctgaccaaccctgtgagccgcttcatgcaggtgcgcagcctgcagtacctgtgccgcttcgtcatccggcagtacaccagaattgacctgatccagaagctgcccctgcccaacaagatgaaggactacctgcaggagaagcactactag

SEQ ID NO: 280360 - DNA, 5817 bp, Artificial Sequence
  derived and/or modified sequence
ctccgcacccgctccccgctcgggccgaggcgccgcggccgcgcgcccctcctggaggaggaggaggaaggaggcgggaggaggagttgccgagaggagaaggcgagcgcggcagtcgcgccggcgctgggcgaggaagcggagccgggccgcctccggaaaatggctccaaaggttaaatgaagcaggaaaaatacatagatgcagccttgcagcctctccagatgtttggggataatattccagatagaaatattgatcccttggattaggtaactagtcataatgaagaaaattagtcttaaaaccttacggaaatcttttaacttgaataaaagtaaagaagaaactgatttcatggtagtacaacaaccatcgctagccagtgactttggaaaagatgattccttatttggtagctgctatggtaaagatatggccagctgcgatatcaacggtgaagatgaaaaaggcggaaaaaacagatcaaaaagcgagagcctgatgggtacgctaaaaaggcggctttctgcaaaacagaagtcaaaaggcaaggcgggcacaccctctgggagctctgccgacgaggacaccttctcctcctcctcagcacccatagtctttaaagacgtgagagctcagaggccgataaggtccacgtcgctccgcagccatcactacagtcccgcgccgtggcctctgcggcccacaaactccgaggagacctgcatcaagatggaggtgagagtcaaggccttggttcactcttccagcccgagtccagccctgaatggcgtccggaaggatttccacgacctccagtctgagaccacgtgccaggagcaagccaattcactgaagagctcggcttctcataatggagacctgcatcttcacctggatgaacatgtgcctgtcgttattggacttatgcctcaggactacattcagtatactgtgcctttagatgaggggatgtatcctttggaaggatcacggagctattgtctggacagctcttctcccatggaagtctctgcggttcctcctcaagtgggagggcgcgctttccccgaggatgagagtcaggtagaccaggacctagttgtcgccccagagatcttcgtggatcagtccgtgaatggcttgttgattggcaccacgggagtcatgttgcagagcccgagagcgggtcacgatgatgtccctccactctcaccattgctacctccaatgcagaataatcaaatccaaaggaacttcagtggactcactggcacagaagcccacgtggctgaaagtatgcgctgtcatttgaattttgatccgaactctgctcctggggttgcaagagtttatgactcagtgcaaagtagtggtcccatggttgtgacaagccttacagaggagctgaaaaaacttgcaaagcaaggatggtactggggaccaatcacacgttgggaggcagaagggaagctagcaaacgtgccagatggttcttttcttgttcgggacagttctgacgaccgttaccttttaagcttgagctttcgctcccatggtaaaacacttcacactagaattgagcactcaaatggtaggtttagcttttatgaacagccagatgtggaaggacatacgtccatagttgatctaattgagcattcaatcagggactctgaaaatggagctttttgttattcaaggtctcggctgcctggatctgcaacttaccccgtcagactgaccaacccagtgtcccggttcatgcaggtgcgctcgttgcagtacctgtgtcgttttgttatacgtcagtataccagaatagacttaattcagaaactgcctttgccaaacaaaatgaaggattatttacaggagaagcactactgaaagattgagaaccctgcatcttgcactttgggaataagaacaagagattgaaatacagtttacaaactttcattgccatcaaaatcttttgctgccataactatttcagttttatgtgtaaaagagtcatcagtttgtttaggggtggggaagtgtcagcaaggtgtcttgggtttattttggttctttaaaaaagggaagtcttgaggttttagaggtgtgaattatgtttcatcaatgtgcagaataatcacaatgtgaattatcaaattctcctcaatgccccccccgcccagtcctttgctgctatccactgtgatttttatgcattaaaagcacatttcatgtgtattcaaccctaagtaaagttgaatgaaacttaacagaatggaaattgctatgtctttttaaatggtccattttcaaaagacagtgttgaataaacatacctgtgtgataaaacacagaatttacatatacactgaagatgagtttttaatctcttactttaaaaagatttatttagaatcgtgaattgacataatcttgggtaatggaacggagatctgcaacatatcttttaacaacacttttttctaaattatttctaaggttgtgctaattcttttggttgtgaaaagttgaatttttctgttgccttcgttttcatcttctagtttgtctattttaataaatggccttacattaaaaaattgtaaagaaatgtataccaccaatttagaaattgttgccttttctgtaattaaactcgggtacaaattggcataacatgaaaacctatggaactagaattattattaaagaaatattagatgatcatagcttcctgtgatagcatttttttgtgtgttacctatccttttggtaaaatgttttatctgtgatttctttagcttagtcaacattttcttgggtgaacttgattgtcaactaattttcataaatggactggattctcttgcaacattaatgtttataaaaagttttaaattgatttgaatagaaagaaaacattgttttaaagttggatttatatttttcttctatgtagttactataaaagtgtgctggatttgaccaatccttacccccactataaagagaacccgtgatgactttagtttaaaaattgtggaaattgtggagcaatttttctcacaatgtgagaaaaattctaaaccatattagataatgtggaagtcatattgtctatcatatatactgccatttaaaaataggtttttaaaatttagctaagtcttaagtaatttgccgttgctaataattttatctccttgagtcggttgttggggagagatgttatattcaataatttttagttattttgtaatgcagagtgtttattcatttcacagttctgcaatggatgtagtattttgggattgccctgtccagaaaattttcagctacacacctttaaaggaaaatgtttctatctcagatgaaacatgtaatttgggatggttcttcctttgtcacttaaaggaagagataggaaaagtctcttacccactttaaacatgagggtaaaggtttaggtcaaacttactggctttgtcattcaagcatatctgaatcctcacttttttctctttgctttttagggtcagaactgagatattaccaagaaaaggcacaatgccataatattatggtgttatggtattttgacttaaaggggaaaaggtacttaattttggtgggatgttgattgtaccttgttaaaaagactctcattttctcatatgttttctcctaataagatggaatatggagtatactgtaataatataagtgttcattataagctatttggattaagaactattgcagagttgtaagcttgttatcaaattaatgcaagacatttaaactatttttttgcaaaactatttatttttaaaacaacttaaagtatatctagggtgagttaaaagtccctgtgcatctatattagatggcaggttttgtcacagagtcactgtgtattaataataaatgttgaaatggcttctccgtgtctccagaagcatttacatgtcctccttgtgagatcatggtgcacagaggtctttggactgccctgaacccgtcttatgtggacataacctattcccttcgttttctcatcatgccatgtgtttaagatctacccgcttagtgtcaagattattgagattttcatctaaatgtttttaaaattgtattttgtgttttagtggaggacagtcttgatactgttctaattcagaaagccaaattttgatgcgcttttgtatattcataatatatactttaatatgccctattctaatctagtttgaaattgttagattctgatagtataatgataaaatcaaactatttgccaaaaagttaaatttacaagcagaaagatgttttgcgatattttctacttttgtgtagaaagataaccatttggggtaggcagcacaacagaatgtgaaagattggctttatatgatactaacacagtccagttaaaagtggaaacagggaaaagagagagagaaaactcatcatttagtttggtctagacacaatttggttaaattttaggattctattggcagttaacatagatgacatggacacagcctatgagtgctttttaaatacgtgcttctaaaaatctgagctcaaagcaagaaaaagaaaacaggaaagctgtatccatttgccataatagatgaatcagaattgttttctattaaatatttcatcacgaaatatgatggaggccagaagctatttttaggcttactataacactattatgcatttttataaataagaagaaggctgtagaaagtacttgaaaaatatctaattctctttctgtctaaggaaaactctttctacttggtgcaataatctgaaaatttagaaggtcaaaatatgtcacaggaaatgatcatagacctaaaaatagtttttaaggaaaccagctacacggggcaaccaaccatcttgctgttgaagaaaacagttccaaaaggctaaatcattggcataaaggaaacaaaacccaaagtatgcgttgtaattcttgagccagtattactgaaacaggataaaagttataaaatctaacataggttaatgcaatgtctctgctagtgctacaagtctaaaatatctttgtaacaatgctttcagaaatgccagttttaattacatttcacattgtatatgagagatactgctttatgaatgaatcggaataatacattttcatttaaatcttaattgcttttcattaaatgcgaagtcttaatttcaaaatgaaatcacactaccagcaatagacagttttcttgaaaactctaataaggaacaatagccagttccgtaaataactttaaaattctaaaagtgttggtacactagcaatcacaaatatggtttcttttaatacttttttaatcctgtaaagaagggtttttataaacattctttttattaatcagtcataacatggcgaagtgtgtagttgctgtttctgaaaagtgatccaaactctacatccagagattatgaaaaattcttatagaattttgtaacaagtatttacatgttgggtgaaagaaatttcatagtcgttggagtgccatgaaattaatacttgcaattcagattgcggtagtttacactttttctgtatgtttcaaatcaggtgtgtaccatttgtactgagaacaccacagaatgaattatccaaagtccattgattttaatacgtgttttggtttgtaaacaaattatagtaatttcttgcacatttttggaaattaattgtataagaatttatgtatctgcttctagatacagtgtgtaaataaaaaatttcgttcacaagac

SEQ ID NO: 280361 - DNA, 1608 bp, Artificial Sequence
  derived and/or modified sequence
atgaagaagatcagcctgaagaccctgcggaagagcttcaacctgaacaagtcaaaggaagaaactgatttcatggttgtccaacaaccttctttggcttctgacttcggtaaagatgactcactttttggctcatgttatgggaaagatatggcgtcatgcgacattaatggggaggacgagaagggcggcaaaaaccggtccaaaagcgaatccctcatgggaacactgaaacgacggctatcggccaaacagaagtcaaagggtaaggccggaactcctagcggctcctcagctgatgaggatacattcagttccagctcagctccgatcgtgttcaaagatgttagagctcagaggcccattcgaagtacgagcttgaggtctcaccactacagtccagcgccctggccccttcggcccaccaatagtgaagaaacatgtatcaagatggaagtccgggtgaaggcactcgtgcactcctcctctccgtcacctgctctgaatggagttagaaaagactttcatgacctgcaatcggagaccacctgccaggagcaggctaattccttaaagagttcagcttctcataatggtgacctgcatcttcaccttgacgaacacgtgccagttgtgataggattgatgccacaggactacattcagtacactgtgcccctcgatgaagggatgtacccactggagggaagtcggtcctactgtctcgacagtagtagtcccatggaagtttccgccgttcccccacaggtgggtggcagggcatttcccgaagatgagagtcaggtggatcaggaccttgtggtggcccctgagatctttgttgaccagagtgtaaatggacttctgattggaacaactggcgtgatgttgcagtcgccccgtgctgggcacgatgacgttccacccctctctccattactgccccctatgcagaataatcagattcaaaggaacttctccggactcaccggtaccgaagcacacgtggccgagtcgatgcgctgccaccttaactttgaccctaattctgcaccaggagtcgctcgcgtgtatgacagtgtccaatcctccggcccgatggtagtgaccagccttacggaggaactgaagaagctggccaagcagggttggtattggggcccaatcacccgttgggaggccgagggcaagctagccaacgtgccagacggttcttttcttgtgcgcgattcttccgacgatcggtacttgctctcactgtctttccgcagccacggtaaaacgctgcataccagaatcgagcactccaatggaaggttctccttctatgaacagcctgatgttgaagggcacacgagtattgtggacctgatcgaacattcaattcgcgactctgaaaatggcgcattctgctactcccggtcacggctgcccggtagtgctacttatcctgtaagactgaccaatcctgtaagccgttttatgcaggtcagatcacttcaatacctatgccgatttgtgattcgccaatacacgcgcattgacctcattcagaaactgcccctacccaataaaatgaaggactatctgcaggaaaagcactattag

SEQ ID NO: 280362 - DNA, 1608 bp, Artificial Sequence
  derived and/or modified sequence
atgaagaagataagtctgaaaacgctgcgtaaaagttttaatctaaacaaatctaaagaggagaccgattttatggttgtgcagcagccttccctcgctagcgattttggcaaagacgattccctctttgggagctgctatggaaaggacatggcctcgtgtgacatcaacggcgaggatgagaaggggggtaaaaatagaagcaaatctgaatctctgatgggcaccctcaagcgaagactctccgcgaagcagaagagtaagggtaaggctgggacacccagcgggtcctccgccgatgaagataccttttcatcctcttcggctcctatcgtgtttaaggatgtccgggcacagaggccaattaggtccacatcattaaggtcccaccactatagccctgccccttggcccctgaggccaactaactccgaagagacttgcattaagatggaagttcgcgtcaaagccctagtgcattcctccagtccttcacccgctctgaatggcgtgcggaaagatttccacgatctgcagagcgagactacttgtcaggaacaggccaattctttgaaatcgtccgcctcccacaacggagacctccacctgcacctcgacgagcacgtgccggtggttatcggattgatgccacaggactacatccagtatactgtgcccctggatgaaggaatgtaccccttagagggctcaaggagctactgtctggactcctcatctcctatggaagtgtctgcagtaccccctcaggtgggtggccgagcttttcccgaggatgagagccaggtggaccaagacctagtggtggcacctgaaatattcgtggaccagtcagtgaatggtctcctgattggaaccacaggggtgatgttgcaatctccaagagctgggcacgatgatgtgcccccactctcccccttgctgcctccgatgcaaaataaccagatccaacgaaacttctctggtctgactggcacagaggcccatgtggccgaatccatgcgctgccacttgaattttgacccaaacagcgccccaggtgtggcacgggtttatgactcagtacagagttccgggcctatggtagtcacctccctgacagaggaactcaaaaagctcgctaagcagggctggtactggggtccaatcacccgctgggaagcggaaggcaagttggccaacgtgcccgatggctctttcctggtcagggacagtagcgacgatcggtatctgctctcgctgtccttccgaagtcacggtaagacactacatacgagaatcgagcacagcaacggtcgcttctcattttatgagcaacctgatgtcgagggccacacttctatcgtcgacctgattgagcattctatacgcgactccgagaacggagctttttgctacagtcgatcccgcttgccagggtccgcaacgtacccagttagactgacaaatcccgtatcgcgcttcatgcaggtgcggtctctccagtatctttgtaggtttgtgatccggcaatataccaggattgacttgatccagaaactgcctttacccaataaaatgaaggattatctccaggaaaaacattactag

SEQ ID NO: 280363 - DNA, 1478 bp, Artificial Sequence
  derived and/or modified sequence
aggtcagccccgcggccctccatggcgctggtgcgcgcactcgtctgctgcctgctgactgcctggcactgccgctccggcctcgggctgcccgtggcgcccgcaggcggcaggaatcctcctccggcgatagggatagcccacctcatgttcctgtacctgaactctcaacagacactgttataaatgtgatcactaatatgacaaccaccatccagagtctctttccaaatctccaggttttccctgcgctgggtaatcatgactattggccacaggatcaactgcctgtagtcaccagtaaagtgtacaatgcagtagcaaacctctggaaaccatggctagatgaagaagctattagtactttaaggaaaggtggtttttattcacagaaagttacaactaatccaaaccttaggatcatcagtctaaacacaaacttgtactacggcccaaatataatgacactgaacaagactgacccagccaaccagtttgaatggctagaaagtacattgaacaactctcagcagaataaggagaaggtgtatatcatagcacatgttccagtggggtatctgccatcttcacagaacatcacagcaatgagagaatactataatgagaaattgatagatatttttcaaaaatacagtgatgtcattgcaggacaattttatggacacactcacagagacagcattatggttctttcagataaaaaaggaagtccagtaaattctttgtttgtggctcctgctgttacaccagtgaagagtgttttagaaaaacagaccaacaatcctggtatcagactgtttcagtatgatcctcgtgattataaattattggatatgttgcagtattacttgaatctgacagaggcgaatctaaagggagagtccatctggaagctggagtatatcctgacccagacctacgacattgaagatttgcagccggaaagtttatatggattagctaaacaatttacaatcctagacagtaagcagtttataaaatactacaattacttctttgtgagttatgacagcagtgtaacatgtgataagacatgtaaggcctttcagatttgtgcaattatgaatcttgataatatttcctatgcagattgcctcaaacagctttatataaagcacaattactagtatttcacagtttttgctaatagaaaatgctgattctgattctgagatcaatttgtgggaattttacataaatctttgttaattactgagtgggcaagtagacttcctgtctttgctttctttttttttttctttttgatgccttaatgtagatatctttatcattctgaattgtattatatatttaaagtgctcattaatagaatgatggatgtaaattggatgtaaatattcagtttatataattatatctaatttgtacccttgttgaaattgtcatttatacaataaagcgaattctttatctct

SEQ ID NO: 280364 - DNA, 636 bp, Artificial Sequence
  derived and/or modified sequence
atgtccctcctaatgattagtgaaaacgttaaactggctcgcgaatacgccctactcggaaactacgatagcgccatggtgtattaccagggggtcctggaccagatgaacaagtacctttattcagtgaaggacacgtacttgcaacaaaagtggcaacaagtgtggcaggagataaacgtagaggccaagcacgtcaaagacattatgaaaacactggaatcctttaagctggacagcacaccccttaaagcggctcagcatgacctcccagcatccgagggcgaggtttggtccatgccagtgcccgtggaacggagacccagtcctggtccaagaaagcggcagagctctcagtatagcgatcccaagagccacggcaaccggccaagcactaccgtgagggtacacagaagcagcgcgcagaatgtccataatgatcggggaaaagccgtgcggtgtcgcgagaagaaggaacagaacaaggggagggaagaaaaaaacaaatcacccgctgccgtcaccgaacctgagacaaacaagttcgacagcacagggtacgacaaggaccttgtggaagccctggaaagagacattatcagtcagaaccctaacgttcgttgggatgatatctag

SEQ ID NO: 280365 - DNA, 716 bp, Artificial Sequence
  derived and/or modified sequence
ctgacctcggtgtgtgtgtgagtgtggtgaaaatcaagtgggagggaaagtgagcaagcacctgaacaagcttacagttgaacatgagtcttcttatgattagtgagaatgtaaaattggctcgtgaatatgcattgctgggaaactatgactctgcgatggtctattatcagggagttcttgaccaaatgaacaagtatctgtactcagtcaaagatacatacctccagcagaaatggcaacaggtttggcaggaaataaatgtggaagctaaacatgttaaagatatcatgaaaacactagagagctttaaactggacagcactcccttgaaagcggcacagcatgaccttccagcttctgagggagaagtctggtccatgcctgtacctgttgaacgaagaccctcaccaggacctagaaaacgccaatcttctcagtacagtgaccctaaatcacatggtaatcgtccaagtacaactgtcagagttcaccgttcatctgcacagaatgttcacaatgacagagggaaagctgttcgttgtcgtgaaaagaaagaacagaataaaggaagagaggaaaagaacaaatcacctgctgcagtaacagaaccagagacaaataaatttgatagtaccggatatgataaagacttagtagaagctttggaaagagatataatttcccagaatcccaatgttcgatgggatgatatc

SEQ ID NO: 280366 - DNA, 636 bp, Artificial Sequence
  derived and/or modified sequence
atgagcctgctgatgatcagtgaaaatgtgaagctggcccgggagtatgccctgctgggcaactatgacagcgccatggtgtactaccagggcgtgctggaccagatgaacaagtacctgtacagcgtgaaggacacctacctgcagcagaagtggcagcaggtgtggcaggagatcaacgtggaggccaagcacgtgaaggacatcatgaagaccctggagagcttcaagctggacagcacccccctgaaggccgcccagcacgacctgcctgccagcgagggggaggtgtggagcatgcctgtgcctgtggagcggcggcccagccctggccccaggaagaggcagagcagccagtacagcgaccccaagagccacggcaaccggcccagcaccaccgtgcgggtgcacaggagcagcgcccagaatgtgcacaatgaccggggcaaggctgtgcgctgccgggagaagaaggagcagaacaagggccgggaggagaagaacaagagccctgctgctgtgacagagcctgagaccaacaagtttgacagcacaggctatgacaaggacctggtggaggccctggagcgggacatcatcagccagaaccccaacgtgcgctgggatgacatctag

SEQ ID NO: 280367 - DNA, 636 bp, Artificial Sequence
  derived and/or modified sequence
atgagcctgctgatgatcagcgagaacgtgaagctggcccgggagtatgctcttcttggcaactacgatagtgcaatggtttactaccagggcgtattggatcaaatgaacaagtacttatattctgtaaaagatacctatctgcagcagaaatggcagcaggtttggcaggagatcaacgtagaggcgaagcacgtgaaggatattatgaagactcttgaatctttcaaattggattctacacctctgaaagccgctcaacatgatttacctgctagcgagggcgaggtttggtccatgccagtgcccgttgagcggagaccgagcccagggccccgcaagcgacaatcctctcagtattctgacccaaagagtcatggaaacaggcccagcaccactgtgcgggtacaccggtcatctgcgcagaatgtccataacgatcgcggcaaggccgtgcggtgtagagagaagaaagagcaaaacaaaggtcgggaggaaaagaataaaagtccagcagccgtgactgagcctgaaacaaacaagttcgactctacaggttatgataaggatctcgtggaagccctcgagcgcgacatcatcagtcagaaccctaatgtcagatgggatgatatttag

SEQ ID NO: 280368 - DNA, 636 bp, Artificial Sequence
  derived and/or modified sequence
atgtctctcttaatgatctccgagaacgtcaagcttgccagagaatacgctttgctgggcaactatgactccgctatggtctactatcagggggtgctagaccagatgaataagtatctgtacagcgtcaaggatacctatctgcagcagaagtggcagcaggtctggcaagaaatcaacgttgaagccaagcatgttaaggacatcatgaagacactagaatctttcaaactcgatagcacccctctgaaagcagcacaacacgatttgcctgctagcgagggagaggtgtggtctatgcccgtgccagtggaaagaagaccctccccaggaccccgaaagcgccagagttctcaatattccgatccgaaatcgcacggcaatcgcccatccaccacagttcgggtccacaggtctagcgcacagaacgtgcacaatgacaggggaaaggcagtgcggtgtcgggagaaaaaggagcaaaataaggggagggaggagaagaacaagtcaccggcagctgtgacggaacctgaaaccaacaaatttgattcgaccggctacgacaaggacctcgtcgaagctctagaacgcgacattatctcccagaatccaaatgttcgttgggacgacatctag

SEQ ID NO: 280369 - DNA, 636 bp, Artificial Sequence
  derived and/or modified sequence
atgagcctgctgatgatcagcgagaacgtgaagctggccagagagtacgccctgctgggcaactacgacagcgccatggtgtactaccagggcgtgctggaccagatgaacaagtacctgtacagcgtgaaggacacctacctgcagcagaagtggcagcaggtgtggcaggagatcaacgtggaggccaagcacgtgaaggacatcatgaagaccctggagagcttcaagctggacagcacccccctgaaggccgcccagcacgacctgcccgccagcgagggcgaggtgtggagcatgcccgtgcccgtggagagaagacccagccccggccccagaaagagacagagcagccagtacagcgaccccaagagccacggcaacagacccagcaccaccgtgagagtgcacagaagcagcgcccagaacgtgcacaacgacagaggcaaggccgtgagatgcagagagaagaaggagcagaacaagggcagagaggagaagaacaagagccccgccgccgtgaccgagcccgagaccaacaagttcgacagcaccggctacgacaaggacctggtggaggccctggagagagacatcatcagccagaaccccaacgtgagatgggacgacatctag

SEQ ID NO: 280370 - DNA, 567 bp, Artificial Sequence
  derived and/or modified sequence
atgggctattgctcggggaggtgcaccctgatcttcatctgtggcatgcagttggtgtgtgtactggagcgacagattttcgacttcctcggataccagtgggctcccatcctcgcgaattttgttcatattatcattgtgatcctgggcctttttgggactatccagtataggccaaggtacatcacaggctatgcagtgtggcttgtgctttgggtgacatggaatgtcttcgtaatttgcttctatcttgaggccggtgacctaagcaaagaaacagacttgatccttacgttcaatatttcaatgcaccgatcttggtggatggagaacggcccgggttgcacagtgacgagtgtcactcccgcccctgactgggccccagaggatcatcgctacatcaccgtgtccggctgtctgcttgaatatcagtatattgaagtcgcacactcttcactccagattgttttggccgtgtcagtgggctcgcagcctctgttgctggtgcctctgggccttttttatttctgcgccaacagcgtgcacacaaatggcatatgcggatag

SEQ ID NO: 280371 - DNA, 567 bp, Artificial Sequence
  derived and/or modified sequence
atgggctactgcagcggccgctgcaccctcatcttcatctgtggcatgcagctggtgtgtgtgctggagcggcagatctttgacttcctgggctaccagtgggcccccatcctggccaactttgtgcacatcatcatcgtcatcctgggcctgtttggcaccatccagtaccggccccgctacatcaccggctatgctgtgtggctggtgctgtgggtgacctggaatgtgtttgtgatctgcttctacctggaggccggggacctgagcaaggagacagacctgatcctgaccttcaacatctccatgcaccgctcctggtggatggagaatggacctggctgcaccgtgacctctgtgaccccagccccagactgggcccctgaggaccaccgctacatcaccgtgtctggctgcctgctggagtaccagtacatcgaggtggcccacagcagcctgcagatcgtgctggccgtgtctgtgggcagccagcccctgctgctggtgcccctgggcctcttctacttctgtgccaacagcgtgcacaccaacggcatctgtggctag

SEQ ID NO: 280372 - DNA, 1106 bp, Artificial Sequence
  derived and/or modified sequence
gtgggggctcgacggtggccgacgtgggacagtctggctgtggcaggggtctcggaaaccatgggttattgcagtggcaggtgcacgcttatctttatctgtggcatgcaactggtttgtgtgctggagaggcaaatatttgacttccttggatatcagtgggcacctatcctggcaaattttgtacatattattatcgtcattcttggtttgtttggaactattcaatatagacctcgttacataacaggatatgctgtctggctagtcctctgggttacgtggaatgtgtttgttatctgcttctatttggaggctggggacctctcaaaggaaacagaccttatcctgacttttaatatatcaatgcaccgatcttggtggatggagaatggaccaggatgtacggtgacgtcagtgacacctgccccagactgggccccagaagaccatcgctacatcacggtctcagggtgtttgctggagtaccagtacatagaagtggctcatagttccctccagattgtcctcgcagtaagtgttggcagccaaccgctccttctagtgcctctggggttgttttatttctgtgcgaactcagtgcacacaaatggaatctgtgggtaaagtgtggcctttttgctttttcctcattaatgcgacttttaacaggaaatcctcaggttaaactaaaccatcctctggacttagtgtgctgattttcttcgacaattagtaaataccctttgttatcatcagcattttacataggaaatccaatcagtcaagatgtgattacgtgacttttggtagacttttccaaggattctgaagggatgatcagagatttttttcataacgttctacagtactcaaaattataagatttccataagtgttttctcttttagtgcttcttttggctgtgctgctagccctgggatttctctttttcatttgccctatctccttcttccttcctagatttctcccaggcaccatccatcacctttaatctcccactttttttccagaaaaaatcacattttctatagattctaattctaagacattcatgcccccatttttcatagtactgtaacaat

SEQ ID NO: 280373 - DNA, 567 bp, Artificial Sequence
  derived and/or modified sequence
atgggctactgcagcggccggtgcaccctgatcttcatctgcggcatgcaattggtgtgtgtcctcgagagacagatcttcgattttctaggttaccagtgggcccccatcctcgccaatttcgtgcatatcatcattgtcatcctggggctgtttggcactatccaatatcgcccgaggtatatcaccggctatgccgtgtggctggtgctgtgggttacctggaacgtatttgtgatttgcttctacctggaagccggagatctgtccaaggaaaccgatttgatcctcaccttcaacatctctatgcacaggagttggtggatggaaaatggccctggatgtactgtcacaagtgtgacacctgcccccgactgggcaccagaggaccaccggtacatcaccgtgtcaggttgcctcttagagtaccagtacatagaagtggcccattcttcgctgcagatcgtgttagccgtgtctgttggttcacagccacttctgcttgtccctctgggtctgttctacttctgcgctaatagcgtccacactaatggaatctgcgggtag

SEQ ID NO: 280374 - DNA, 567 bp, Artificial Sequence
  derived and/or modified sequence
atgggttactgctctggacgttgtacgttaatcttcatttgcggcatgcagctagtatgtgttttggaaaggcaaatctttgatttcttgggctatcaatgggcccctatccttgccaactttgtgcacattatcatagtgattctaggactctttggaaccatccaataccgtccgagatacatcacagggtatgcagtgtggctggtactttgggtgacctggaatgtgttcgtgatatgtttctacctggaagccggtgacctgtccaaagagacagatctaatcctgacgtttaacatctccatgcatcgttcatggtggatggagaacggacctggctgtactgttacgtcggtcaccccggctcccgactgggcacccgaagatcatcgatacattactgtctctggatgtttactggagtaccagtatatcgaggtcgcacatagcagccttcaaattgttctggctgtaagcgtaggcagtcagccattgctgctcgtaccactgggccttttttacttttgtgctaactcggttcacacaaacggtatatgtggctag

SEQ ID NO: 280375 - DNA, 567 bp, Artificial Sequence
  derived and/or modified sequence
atgggctactgcagcggcagatgcaccctgatcttcatctgcggcatgcagctggtgtgcgtgctggagagacagatcttcgacttcctgggctaccagtgggcccccatcctggccaacttcgtgcacatcatcatcgtgatcctgggcctgttcggcaccatccagtacagacccagatacatcaccggctacgccgtgtggctggtgctgtgggtgacctggaacgtgttcgtgatctgcttctacctggaggccggcgacctgagcaaggagaccgacctgatcctgaccttcaacatcagcatgcacagaagctggtggatggagaacggccccggctgcaccgtgaccagcgtgacccccgcccccgactgggcccccgaggaccacagatacatcaccgtgagcggctgcctgctggagtaccagtacatcgaggtggcccacagcagcctgcagatcgtgctggccgtgagcgtgggcagccagcccctgctgctggtgcccctgggcctgttctacttctgcgccaacagcgtgcacaccaacggcatctgcggctag

SEQ ID NO: 280376 - protein, 1330 aa, Artificial Sequence
  derived and/or modified sequence
MPLSPPAQGDPGEPSPCRPPKKHTTFHLWRSKKKQQPAPPDCGVFVPHPLPAPAGEARALDVVDGKYVVRDSQEFPLHCGESQFFHTTSEALGSLLLESGIFKKSRAQPPEDNRRKPVLGKLGTLFTAGRRRNSRNGLESPTRSNAKPLSPKDVVASPKLPERESERSRSQSSQLKQTDTSEEGSPRENPREAEGELPESGGPAAPPDAELSPRWSSSAAAVAVQQCHENDSPQLEPLEAEGEPFPDATTTAKQLHSSPGNSSRQENAETPARSPGEDASPGAGHEQEAFLGVRGAPGSPTQERPAGGLGEAPNGAPSVCAEEGSLGPRNARSQPPKGASDLPGEPPAEGAAHTASSAQADCTARPKGHAHPAKVLTLDIYLSKTEGAQVDEPVVITPRAEDCGDWDDMEKRSSGRRSGRRRGSQKSTDSPGADAELPESAARDDAVFDDEVAPNAASDNASAEKKVKSPRAALDGGVASAASPESKPSPGTKGQLRGESDRSKQPPPASSPTKRKGRSRALEAVPAPPASGPRAPAKESPPKRVPDPSPVTKGTAAESGEEAARAIPRELPVKSSSLLPEIKPEHKRGPLPNHFNGRAEGGRSRELGRAAGAPGASDADGLKPRNHFGVGRSTVTTKVTLPAKPKHVELNLKTPKNLDSLGNEHNPFSQPVHKGNTATKISLFENKRTNSSPRHTDIRGQRNTPASSKTFVGRAKLNLAKKAKEMEQPEKKVMPNSPQNGVLVKETAIETKVTVSEEEILPATRGMNGDSSENQALGPQPNQDDKADVQTDAGCLSEPVASALIPVKDHKLLEKEDSEAADSKSLVLENVTDTAQDIPTTVDTKDLPPTAMPKPQHTFSDSQSPAESSPGPSLSLSAPAPGDVPKDTCVQSPISSFPCTDLKVSENHKGCVLPVSRQNNEKMPLLELGGETTPPLSTERSPEAVGSECPSRVLVQVRSFVLPVESTQDVSSQVIPESSEVREVQLPTCHSNEPEVVSVASCAPPQEEVLGNEHSHCTAELAAKSGPQVIPPASEKTLPIQAQSQGSRTPLMAESSPTNSPSSGNHLATPQRPDQTVTNGQDSPASLLNISAGSDDSVFDSSSDMEKFTEIIKQMDSAVCMPMKRKKARMPNSPAPHFAMPPIHEDHLEKVFDPKVFTFGLGKKKESQPEMSPALHLMQNLDTKSKLRPKRASAEQSVLFKSLHTNTNGNSEPLVMPEINDKENRDVTNGGIKRSRLEKSALFSSLLSSLPQDKIFSPSVTSVNTMTTAFSTSQNGSLSQSSVSQPTTEGAPPCGLNKEQSNLLPDNSLKVFNFNSSSTSHSSLKSPSHM

SEQ ID NO: 280377 - protein, 316 aa, Artificial Sequence
  derived and/or modified sequence
MQKPKTVAWENLGPEMSALGTAFSREGGRKVEFPTDPKVVVYEKPFFEGKCVELETGMCSFVMEGGETEEATGDDHLPFTSVGSMKVLRGIWVAYEKPGFTGHQYLLEEGEYRDWKAWGGYNGELQSLRPILGDFSNAHMIMYSEKNFGSKGSSIDVLGIVANLKETGYGVKTQSINVLSGVWVAYENPDFTGEQYILDKGFYTSFEDWGGKNCKISSVQPICLDSFTGPRRRNQIHLFSEPQFQGHSQSFEETTSQIDDSFSTKSCRVSGGSWVVYDGENFTGNQYVLEEGHYPCLSAMGCPPGATFKSLRFIDV

SEQ ID NO: 280378 - protein, 542 aa, Artificial Sequence
  derived and/or modified sequence
MQKPKTVAWENLGPEMSALGTAFSREGGRKVEFPTDPKVVVYEKPFFEGKCVELETGMCSFVMEGGETEEATGDDHLPFTSVGSMKVLRGIWVAYEKPGFTGHQYLLEEGEYRDWKAWGGYNGELQSLRPILGDFSNAHMIMYSEKNFGSKGSSIDVLGIVANLKETGYGVKTQSINVLSGVWVAYENPDFTGEQYILDKGFYTSFEDWGGKNCKISSVQPICLDSFTGPRRRNQIHLFSEPQFQGHSQSFEETTSQIDDSFSTKSCRVSGGSWVVYDGENFTGNQYVLEEGHYPCLSAMGCPPGATFKSLRFIDVEFSEPTIILFEREDFKGKKIELNAETVNLRSLGFNTQIRSVQVIGGIWVTYEYGSYRGRQFLLSPAEVPNWYEFSGCRQIGSLRPFVQKRIYFRLRNKATGLFMSTNGNLEDLKLLRIQVMEDVGADDQIWIYQEGCIKCRIAEDCCLTIVGSLVTSGSKLGLALDQNADSQFWSLKSDGRIYSKLKPNLVLDIKGGTQYDQNHIILNTVSKEKFTQVWEAMVLYT

SEQ ID NO: 280379 - DNA, 3993 bp, Artificial Sequence
  derived and/or modified sequence
atgcctctctcccctcccgcccagggggaccctggagagccatcaccatgtaggccgcccaagaagcacaccactttccatctctggcgcagtaagaaaaaacaacaaccggcgccgcccgattgcggggtgtttgtgccccatccactccctgctcccgccggagaggctcgggctctggacgtggtggatggtaaatacgtggtgcgagatagccaggagttccctctgcactgcggggaatcacagttttttcatacaacttccgaggccctcggatcattgctgttagagtccgggatcttcaaaaaatcccgcgcccagccgcctgaagacaatcggcgtaaacctgttttggggaagttgggaaccttgtttactgctggccgcaggagaaacagtcggaatggcctggagtcccctacaaggagtaacgctaagcccctgtcccctaaagatgtggtcgcctctcccaaacttccagagagagaatctgagaggagtcggagtcagtcctcgcagctgaagcaaaccgatacctcggaggagggcagtcccagggagaacccgcgcgaagccgaaggcgagttgcccgagagcgggggccccgccgcgccaccggatgctgagctgtcccccaggtggtccagttcggcagccgccgttgcagtgcagcagtgtcacgagaacgattctcctcaactggaacccctagaggcggagggagagccatttccagacgccaccactaccgctaaacagttgcacagcagccctggcaacagcagtagacaggagaacgctgagactccagcccgatcacctggtgaagatgccagccccggcgctggacacgagcaggaggcctttctgggcgtgcgcggagccccagggagcccaacacaggagcgaccagcagggggcctgggtgaagcccccaatggcgcaccctcagtgtgtgcagaggaaggatccctcggtccccgcaatgccaggtcccagccaccaaaaggcgcatccgacctgcctggagaaccacccgccgagggagccgcccatactgcctctagcgcacaagccgattgcactgccaggccaaaaggacacgcccaccccgcaaaagtcttgacactggacatttacctgtccaaaaccgagggtgctcaagtggatgagcccgtcgttattacaccacgtgccgaagactgtggagactgggatgacatggagaaaagatcctctggccgccgctcaggtaggcggaggggcagtcagaagagcaccgacagtcccggagccgacgccgagttacctgaaagtgcggccagagacgatgcagtgtttgacgacgaggtggctccgaatgcagcttcggacaacgcttccgcggagaagaaagtcaaaagcccgagggccgccttggacgggggggttgcctccgccgctagccctgagtccaagccttcaccaggtaccaaaggacaattgcgaggggagagcgacagaagcaagcaaccccctcccgcctcttccccaactaaaagaaagggacggagcagggcgctggaggccgttcctgccccccccgccagcgggccacgggcacctgccaaggaatcaccaccaaaaagagtgcccgacccttctccggtgactaagggcaccgccgcggaatcgggcgaggaggccgcccgagcgattccacgcgaattgcccgttaagtcttcttctcttctgcctgaaatcaagcccgagcacaaacggggacctttgccaaaccacttcaacgggagggccgagggcgggagatctcgagagcttggccgagccgccggagcgcctggcgccagcgatgccgatggactgaaaccccgaaatcacttcggcgttggccggagtacagtgaccacgaaagtcaccctccctgcgaaacccaagcacgtggaactgaatctgaaaactccaaagaacctggattcactgggaaacgagcacaacccattctctcagcctgtgcacaaaggcaatacagccactaaaatctcactgttcgagaataagaggacgaacagctcaccccgtcatactgacatcagaggtcagcgaaatacaccggcaagctcaaagacgtttgttggaagagctaaacttaatctggcaaaaaaagccaaggagatggagcaaccggagaagaaggtgatgccaaactcaccacagaatggtgtactggtgaaggagacagcaatcgagacaaaggttacagtgtcagaagaggagattctcccagccactcgaggaatgaatggagattcctctgagaaccaagctctaggccctcaacccaatcaggacgacaaagccgatgtccagacggacgccggatgcctgtcagaaccagtggccagcgcccttattcctgtgaaggatcacaagcttttggaaaaggaggactccgaggccgccgacagcaagtccctcgtgttggagaacgttactgacaccgcccaggatatccctaccactgttgatactaaagacttgccgccaaccgccatgcctaagccgcaacacactttttccgatagccagtcccccgcagaatcatctcctggccctagcctgagcctttcggctcctgcccctggagatgtgccgaaggatacatgcgtgcagagcccgatttctagttttccatgcactgacttgaaagttagcgagaaccataagggctgtgtgttgcccgtcagtcggcaaaacaatgaaaaaatgccactcctggaactggggggcgagactacacccccactatcaacagagcggtctcccgaggctgtagggagtgaatgcccatcgagagtgctagttcaagtgcgctccttcgtgttgccagttgagtctacacaggacgtctcttcacaggttatccccgaatcttcggaggtcagggaagtgcagctccctacttgccattccaatgaacccgaggttgtttccgttgcctcgtgcgcacccccgcaagaggaggttctgggaaacgagcatagccactgcacggcagagctcgccgccaagtcagggccacaggtgatccccccagcctctgaaaaaactctccccattcaggcccagtcacagggatctagaacaccattgatggccgaatcctcccctaccaactctcctagttctggaaatcacctcgctacaccccagaggccagatcagaccgtgactaatggccaggacagccctgccagtttactgaacatctcagcaggcagtgacgatagtgttttcgattcatcctccgacatggagaagtttaccgaaattatcaagcaaatggatagcgctgtctgcatgcccatgaagcgcaagaaggcacgaatgcccaatagtcccgcgccccattttgctatgccacctattcacgaggaccacctggagaaagtctttgatcctaaggtgttcacctttggacttggtaagaagaaagagtcacaacccgaaatgtcgcccgcacttcatttaatgcagaatttagataccaagtcaaagttaaggcctaaacgtgcaagtgccgaacaatccgtcttatttaagagtctccacacaaatacgaatggcaatagcgaaccactggtgatgccagaaattaatgataaggaaaatcgtgatgtcactaatggtggaatcaaacggagcagactggagaaaagcgcactgttttcttccctgctgtcctcactaccacaggataagatcttcagtccatccgtgacatccgtgaatacaatgacaactgctttcagcacgtcacaaaatgggagcctaagccaatcctctgtcagccaacctactaccgaaggcgcgcccccgtgtggacttaataaggagcagagcaacctgctccccgacaacagcctgaaagtgtttaatttcaactcctcgtccacgagtcactcttccctgaagagcccctcacatatgtag

SEQ ID NO: 280380 - DNA, 5172 bp, Artificial Sequence
  derived and/or modified sequence
atggagaaacgcagctctgggagaagatccggcagaagacgggggagccaaaaaagtacagatagccccggcgctgatgctgaattgccagagagcgccgctcgcgacgacgcagtcttcgacgatgaggtggctcccaacgctgcatctgataacgccagtgctgagaaaaaagttaaatctccaagggccgctctggatggcggcgttgcaagcgccgcatctccggagagcaaaccatctccaggcacgaagggccaattacggggtgaatctgacaggtctaaacagccaccccctgcaagttcacccactaaaaggaagggccgctcccgagccctggaggctgttccagccccccccgccagtgggcctagggctccagcgaaagaatcccctcctaagagggttcctgacccttcccccgtgacgaagggaacggctgcagagagtggagaggaagcagcaagagctatcccaagagagcttccagtcaagtcttcgtccctgctacccgagatcaaacctgagcataagagaggtcccctccccaatcactttaatgggcgagcggaaggtggcagatcacgcgaattaggcagagcggcgggagctcccggcgcatctgacgccgatggactgaaacctaggaaccatttcggagtcgggcggagcacggtaactaccaaggtcaccctccccgctaagccaaagcatgtggagctcaatttaaagacacccaagaatttagattcattgggcaatgaacacaatcccttttcccagcccgtgcataagggaaatactgcaaccaagattagcctcttcgaaaacaagcggaccaatagcagtcctcgccatacagacattcggggccagagaaacacacccgcctccagcaaaaccttcgttggcagggctaagctgaatctggctaaaaaagctaaggaaatggagcagccggagaaaaaggtgatgccgaattcgcctcagaatggtgtgctggttaaggagacggcaatcgaaaccaaggttacagtgagtgaggaagagattttaccagctaccaggggtatgaacggcgactctagcgaaaatcaggctttgggacctcaacccaaccaagacgacaaagccgatgttcaaaccgatgctggctgtctctctgagcctgtggccagcgcactaatccccgtgaaagatcacaagcttctcgagaaggaggattcagaagccgcagattccaaatcactggtcctggagaatgtcacggacacggctcaggatattccaacaacagtggatactaaagacctcccccccaccgcgatgcccaagcctcaacacactttctccgactcacaaagtccagctgagtcttccccaggtccgtcgcttagtctgagcgcccctgcccctggcgacgtaccgaaggacacctgtgtgcaaagccccataagctccttcccatgcactgacctgaaagtttctgaaaatcacaaaggatgtgtcctgcccgtgtcacgtcagaacaatgaaaaaatgccccttctggagcttggaggtgagactactccaccactgtccactgagcgttcgcctgaggctgttggatcagagtgcccatctagggtcctggttcaggtgcgcagttttgtccttccggtcgaatctacccaggacgtctcatcacaggtgatacccgagtcatcagaggtgcgcgaggtccagctgccaacgtgccattcaaatgagcctgaggtcgtgtcagttgccagttgcgcccccccccaggaagaagtgttggggaacgagcattcacattgcaccgcagagttggcagccaagtccgggcctcaggtgatcccgccagcctcggaaaaaaccctacctatccaagcgcagtcacaaggtagccggactccattgatggccgaatcttctccaaccaactcaccttcttcaggcaaccacctcgctaccccccaaagaccggatcaaactgtcaccaatggtcaggacagcccagctagcctgctgaatatttcagccggatcagacgactcagtctttgacagctcttctgatatggagaaatttacggaaattatcaaacaaatggattctgccgtctgcatgccaatgaagcggaagaaagctcgcatgcccaacagcccagcaccacattttgctatgccccctatccacgaagaccatcttgagaaggtgttcgaccccaaagtctttacatttggcttggggaagaagaaggaatcccagcctgaaatgtcccctgccctgcaccttatgcagaacctggacacaaaaagcaagctccgccccaaacgtgcatccgcggaacagagtgtgctcttcaaatccttgcataccaatactaacggtaatagtgagcccttagtgatgcccgagatcaatgataaggagaatcgtgacgtcactaacggaggaatcaagcgctctcgactcgaaaagtccgcccttttcagcagcctcctgtcaagccttccgcaagataagatattctcaccgagcgtaacctccgtgaacaccatgactactgcatttagcaccagtcaaaatggctccctgtctcagtcctcagtctcccagcctacaacggaaggagcccccccgtgcggcttgaataaggagcagtccaacctgctaccagataactctctcaaggtctttaattttaattcatcttcaaccagtcattcctccctgaaaagtccgtctcacatggaaaagtatcctcagaaggagaagactaaagaagacctcgattcacggtcaaaccttcatcttccagaaaccaaattttccgagctgtcgaagctcaagaatgatgacatggaaaaggctaatcacatcgagagcgttattaagagcaaccttcccaactgcgcaaactcagacacagacttcatggggcttttcaagtcgtctcgttatgacccctcgatcagctttagcgggatgagtctctccgacaccatgacactaagaggatctgtgcaaaacaaactgaatccccgtcccggcaaggtagttatttacagcgagccagatgtgtccgaaaaatgcatcgaagtgttcagtgacattcaagattgctcaagctggtccctgagtcccgtaattctcataaaggtagtgaggggttgctggatactttatgaacagcctaattttgagggccattccattcctctggaagagggggaactcgaattgagtgggctgtggggaatagaagatatcctggaaaggcatgaggaggctgagtcagataagcccgtggttatcgggagtattcgccacgtcgtccaagactaccgggtctcacatatcgatctgttcaccgaaccagagggactaggaatactgagcagctacttcgatgataccgaagaaatgcaggggttcggagtaatgcagaagacctgctctatgaaagttcactgggggacctggttgatatatgaagaaccaggattccagggagtccccttcatcctagaacccggggagtaccctgacctgtcattttgggacactgaagaggcctatattggcagcatgcggccgctgaagatgggtggtcggaaagtcgaatttccaaccgacccaaaggtagtagtttacgagaaacctttttttgaggggaagtgtgtggaactcgaaacgggaatgtgctccttcgtgatggagggcggcgagacagaagaggctactggcgatgatcacttgccctttacttccgtgggatcgatgaaggtattacgtggaatctgggtggcgtatgaaaaaccaggcttcaccggtcaccaatatctgcttgaagagggggagtatcgagattggaaggcctggggaggatacaatggagagctgcagtccctcagacccatcctaggcgacttctcaaatgcgcatatgattatgtactccgaaaaaaactttggcagtaaagggtcctccattgatgtgctgggtattgtcgctaacttgaaggagactggttatggcgtgaaaactcaaagtatcaacgtcctaagcggtgtctgggtggcttacgaaaaccccgatttcaccggagagcaatatatccttgacaaaggcttctacacgtcttttgaggattggggcggcaaaaattgcaaaatctccagcgtgcagccgatctgcttggactcattcacgggcccccgcagacgcaaccagatccacctattctccgaacctcagtttcagggccatagccaaagcttcgaagaaactacatctcagatcgacgacagcttctcgactaaatcatgccgcgtgtccggtggcagctgggtggtgtatgacggcgagaacttcaccggaaaccaatacgtgttggaggagggtcattatccatgcttgtcagcgatgggatgcccacctggtgccacatttaaaagcctcaggtttatcgatgttgagttctctgaacccactatcatcttgttcgagcgggaagactttaaagggaaaaagattgagctcaacgctgagactgtgaaccttcggtcactggggtttaacacacagatccgatcagtccaggtgatagggggcatttgggtgacttacgagtatgggtcttacagaggccgacagtttctgctctccccagccgaagtgcccaattggtacgagttctccggttgtcggcagattggcagtcttcggccttttgtccagaagagaatctactttaggttgagaaacaaagccacaggtctgttcatgtctaccaatggcaatttggaggacttaaagctgttgcgtattcaggtgatggaagacgtaggcgccgacgaccagatatggatttaccaggagggttgcattaaatgtagaattgccgaagattgctgcttgacaatcgtcgggtccctggtgactagcggcagcaagctcggtctagccctggatcagaacgctgacagccagttctggtcgctgaaatctgatggcaggatttacagtaagttaaagccaaatctggttctagacataaaaggaggaactcaatacgaccaaaaccacattattttaaatacagtttccaaagagaagttcactcaagtctgggaagccatggtattgtatacatag

SEQ ID NO: 280381 - DNA, 1629 bp, Artificial Sequence
  derived and/or modified sequence
atgcaaaaacccaaaacagtggcatgggagaacttgggtcccgaaatgtctgctctaggcactgccttttcacgcgaaggcggacgcaaagttgaatttcccaccgaccctaaagttgttgtttacgaaaagcctttctttgagggaaaatgtgtggaactcgagaccgggatgtgctctttcgtgatggaaggaggtgagacagaggaagcgacaggcgacgaccaccttcccttcacttcagtcggaagcatgaaggtgctgcgggggatctgggttgcttacgagaagccgggcttcacaggccatcagtacctgctcgaagagggggaataccgggactggaaagcctggggcggatataatggcgaattacagagccttcgcccgattctgggagacttcagtaatgcccatatgattatgtatagcgaaaaaaatttcggaagtaagggttcaagtattgacgtgttgggcatcgtggcaaatctgaaggaaacaggttatggcgtgaaaacacagagtattaacgttctgtccggggtgtgggtggcctacgagaatccagattttaccggcgagcaatatattctggataaagggttctatacttctttcgaggattgggggggcaaaaactgcaagatctctagcgtgcaacccatctgtttagattcatttaccggacccaggcgcaggaatcagattcacttgttttccgaaccccaatttcagggacatagtcaatcctttgaagagactacaagccagatagatgactcatttagtaccaaatcatgtcgggtgagcgggggctcttgggttgtctatgatggagagaacttcactggcaatcagtacgtcctggaagaagggcactatccctgcctgtctgctatgggctgccctcctggggcaaccttcaagtccctgagattcattgatgtagagtttagcgaacccactataatcctgtttgaaagggaggattttaaaggaaagaaaatcgaactgaatgcagagactgtcaatttaaggagtttaggtttcaacacacagattcgcagtgttcaggtgattgggggtatatgggtcacctacgagtacggaagttacagggggcggcaattcctcctgtcccctgccgaagtgccaaattggtatgagtttagcggctgccgtcagattgggtccctgaggccattcgttcagaagaggatatatttccgtttaagaaataaggcaactggactgttcatgtctacaaatggcaacctggaagacctcaagttgttaaggatccaggtcatggaagacgtgggagcagacgatcagatctggatttatcaggaggggtgtattaaatgtagaatagctgaggattgttgtcttacaattgttggcagcctggtaactagcgggagtaagcttggcttagctctcgatcagaacgcagacagccagttctggagcctgaagagcgacggtagaatctatagtaagctaaagcccaatctggttctggatatcaaaggcgggacccagtacgatcagaatcatataatattgaataccgtcagcaaggaaaagttcacccaggtgtgggaagctatggtgctgtacacctag

SEQ ID NO: 280382 - DNA, 3993 bp, Artificial Sequence
  derived and/or modified sequence
atgcccctgagccccccagcccagggcgaccctggagagcccagcccctgcaggcctcccaagaagcacaccaccttccacctgtggaggagcaagaagaagcagcagcctgcccccccagactgtggggtgtttgtgccccaccccctgcctgccccagctggggaggcccgggccctggatgtggtggatggcaagtatgtggtgcgggacagccaggagttccccctgcactgtggggagagccagttcttccacaccaccagcgaggccctgggcagcctgctgctggagagcggcatcttcaagaagagccgggcccagcccccagaggacaacagaaggaagcctgtgctgggcaagctgggcaccctcttcaccgctggaagaagaagaaacagcagaaatggcctggagagccccaccaggagcaatgccaagcccctgagccccaaggatgtggtggccagccccaagctgcctgagcgggagagcgagaggagccgcagccagagcagccagctgaagcagacagacaccagcgaggagggcagcccccgggagaacccccgggaggccgagggggagctgcctgagagcggcggccctgctgcccccccagatgctgagctgagcccccgctggagcagcagcgctgctgctgtggccgtgcagcagtgccatgaaaatgacagcccccagctggagcccctggaggccgagggggagcccttcccagatgccaccaccacagccaagcagctgcacagcagccctggcaacagcagccggcaggagaatgctgagaccccagcccggagccctggagaagatgccagccctggagctggccacgagcaggaggccttcctgggcgtgcggggggcccctggcagccccacccaggagaggcctgctgggggcctgggggaggcccccaacggggcccccagcgtgtgtgccgaggagggcagcctgggccccagaaatgcccggagccagccccccaagggggccagtgacctgcctggagagcccccagctgagggcgccgcccacacagccagcagcgcccaggccgactgcacagcccggcccaagggccacgcccacccagccaaggtgctgaccctggacatctacctgagcaagacagaaggagcccaggtggatgagcctgtggtgatcacccccagggctgaggactgtggggactgggatgacatggagaagaggagcagcggccgccgcagcggcagaagaagaggcagccagaagagcacagacagccctggagcagatgctgagctgcctgagagcgctgccagagatgatgctgtgtttgatgatgaggtggccccaaatgctgccagtgacaatgccagcgctgagaagaaggtgaagagcccccgggccgccctggatggaggagtggccagcgctgccagccctgagagcaagcccagccctggcaccaagggccagctgcggggggagagtgacaggagcaagcagcccccaccagccagcagccccaccaagaggaagggccgcagccgggccctggaggccgtgcctgcccccccagccagcggcccccgggccccagccaaggagagcccccccaagagggtgcctgaccccagccctgtgaccaagggcacagctgctgagagcggggaggaggccgcccgggccatcccccgggagctgcctgtgaagagcagcagcctgctgcctgagatcaagccagagcacaagaggggccccctgcccaaccacttcaacggccgggcagagggcggccgcagccgggagctgggccgggctgctggggcccctggggccagtgatgctgatggcctgaagcccaggaaccactttggagtgggccgcagcacagtgaccaccaaggtgaccctgcctgccaagcccaagcacgtggagctgaacctgaagacccccaagaacctggacagcctgggcaatgagcacaaccccttcagccagcctgtgcacaagggcaacacagccaccaagatcagcctgtttgagaacaagaggaccaacagcagccccaggcacacagacatccggggccagaggaacaccccagccagcagcaagacctttgtgggccgggccaagctgaacctggccaagaaggccaaggagatggagcagcctgagaagaaggtgatgcccaacagcccccagaatggagtgctggtgaaggagacagccatcgagaccaaggtgacagtgtctgaggaggagatcctgcctgccacccggggcatgaatggagacagcagcgagaaccaggccctgggcccccagcccaaccaggatgacaaggcagatgtgcagacagatgctggctgcctgtctgagcctgtggccagcgccctgatccctgtgaaggaccacaagctgctggagaaggaggacagcgaggccgctgacagcaagagcctggtgctggagaatgtgacagacacagcccaggacatccccaccaccgtggacaccaaggacctgcccccaacagccatgcccaagccccagcacaccttcagtgacagccagagccctgctgagagcagccctggccccagcctgagcctgagcgccccagcccctggagatgtgcccaaggacacctgtgtgcagagccccatcagcagcttcccctgcacagacctgaaggtgtctgagaaccacaagggctgtgtgctgcctgtgtcccggcagaacaatgagaagatgcccctgctggagctgggcggggagaccaccccacccctgagcacagagaggagccctgaggccgtgggcagcgagtgccccagccgggtgctggtgcaggtgcgcagctttgtgctgcctgtggagagcacccaggatgtgagcagccaggtgattcctgagagcagcgaggtgcgggaggtgcagctgcccacctgccacagcaatgaacctgaggtggtgtctgtggccagctgtgccccaccccaggaggaggtgctgggcaatgagcacagccactgcacagctgagctggccgccaagagcggcccccaggtgattcctccagccagcgagaagaccctgcccatccaggcccagagccagggcagcaggacccccctgatggccgagagcagccccaccaacagccccagcagcggcaaccacctggccaccccccagaggccagaccagacagtgaccaacggccaggacagccctgccagcctgctgaacatctctgctggcagtgatgattctgtgtttgacagcagcagtgacatggagaagttcacagagatcatcaagcagatggattctgctgtgtgcatgcccatgaagaggaagaaggccaggatgcccaacagccctgccccccactttgccatgccacccatccacgaggaccacctggagaaggtgtttgaccccaaggtgttcaccttcggcctgggcaagaagaaggagagccagcctgagatgagccctgccctgcacctgatgcagaacctggacaccaagagcaagctgcggcccaagagggccagcgctgagcagagcgtgctcttcaagagcctgcacaccaacaccaacggcaacagcgagcccctggtgatgcctgagatcaatgacaaggaaaatagagatgtgaccaatggaggcatcaagaggagccggctggagaagagcgccctcttcagcagcctgctgagcagcctgccccaggacaagatcttcagccccagcgtgacctctgtgaacaccatgaccacagccttcagcaccagccagaatggcagcctgagccagagctctgtgtcccagcccaccacagagggcgccccaccctgtggcctgaacaaggagcagagcaacctgctgcctgacaacagcctgaaggtgttcaacttcaacagcagcagcaccagccacagcagcctgaagagccccagccacatgtag

SEQ ID NO: 280383 - DNA, 5172 bp, Artificial Sequence
  derived and/or modified sequence
atggagaagaggagcagcggccgccgcagcggcagaagaagaggcagccagaagagcacagacagccctggagcagatgctgagctgcctgagagcgctgccagagatgatgctgtgtttgatgatgaggtggccccaaatgctgccagtgacaatgccagcgctgagaagaaggtgaagagcccccgggccgccctggatggaggagtggccagcgctgccagccctgagagcaagcccagccctggcaccaagggccagctgcggggggagagtgacaggagcaagcagcccccaccagccagcagccccaccaagaggaagggccgcagccgggccctggaggccgtgcctgcccccccagccagcggcccccgggccccagccaaggagagcccccccaagagggtgcctgaccccagccctgtgaccaagggcacagctgctgagagcggggaggaggccgcccgggccatcccccgggagctgcctgtgaagagcagcagcctgctgcctgagatcaagccagagcacaagaggggccccctgcccaaccacttcaacggccgggcagagggcggccgcagccgggagctgggccgggctgctggggcccctggggccagtgatgctgatggcctgaagcccaggaaccactttggagtgggccgcagcacagtgaccaccaaggtgaccctgcctgccaagcccaagcacgtggagctgaacctgaagacccccaagaacctggacagcctgggcaatgagcacaaccccttcagccagcctgtgcacaagggcaacacagccaccaagatcagcctgtttgagaacaagaggaccaacagcagccccaggcacacagacatccggggccagaggaacaccccagccagcagcaagacctttgtgggccgggccaagctgaacctggccaagaaggccaaggagatggagcagcctgagaagaaggtgatgcccaacagcccccagaatggagtgctggtgaaggagacagccatcgagaccaaggtgacagtgtctgaggaggagatcctgcctgccacccggggcatgaatggagacagcagcgagaaccaggccctgggcccccagcccaaccaggatgacaaggcagatgtgcagacagatgctggctgcctgtctgagcctgtggccagcgccctgatccctgtgaaggaccacaagctgctggagaaggaggacagcgaggccgctgacagcaagagcctggtgctggagaatgtgacagacacagcccaggacatccccaccaccgtggacaccaaggacctgcccccaacagccatgcccaagccccagcacaccttcagtgacagccagagccctgctgagagcagccctggccccagcctgagcctgagcgccccagcccctggagatgtgcccaaggacacctgtgtgcagagccccatcagcagcttcccctgcacagacctgaaggtgtctgagaaccacaagggctgtgtgctgcctgtgtcccggcagaacaatgagaagatgcccctgctggagctgggcggggagaccaccccacccctgagcacagagaggagccctgaggccgtgggcagcgagtgccccagccgggtgctggtgcaggtgcgcagctttgtgctgcctgtggagagcacccaggatgtgagcagccaggtgattcctgagagcagcgaggtgcgggaggtgcagctgcccacctgccacagcaatgaacctgaggtggtgtctgtggccagctgtgccccaccccaggaggaggtgctgggcaatgagcacagccactgcacagctgagctggccgccaagagcggcccccaggtgattcctccagccagcgagaagaccctgcccatccaggcccagagccagggcagcaggacccccctgatggccgagagcagccccaccaacagccccagcagcggcaaccacctggccaccccccagaggccagaccagacagtgaccaacggccaggacagccctgccagcctgctgaacatctctgctggcagtgatgattctgtgtttgacagcagcagtgacatggagaagttcacagagatcatcaagcagatggattctgctgtgtgcatgcccatgaagaggaagaaggccaggatgcccaacagccctgccccccactttgccatgccacccatccacgaggaccacctggagaaggtgtttgaccccaaggtgttcaccttcggcctgggcaagaagaaggagagccagcctgagatgagccctgccctgcacctgatgcagaacctggacaccaagagcaagctgcggcccaagagggccagcgctgagcagagcgtgctcttcaagagcctgcacaccaacaccaacggcaacagcgagcccctggtgatgcctgagatcaatgacaaggaaaatagagatgtgaccaatggaggcatcaagaggagccggctggagaagagcgccctcttcagcagcctgctgagcagcctgccccaggacaagatcttcagccccagcgtgacctctgtgaacaccatgaccacagccttcagcaccagccagaatggcagcctgagccagagctctgtgtcccagcccaccacagagggcgccccaccctgtggcctgaacaaggagcagagcaacctgctgcctgacaacagcctgaaggtgttcaacttcaacagcagcagcaccagccacagcagcctgaagagccccagccacatggagaagtacccccagaaggagaagaccaaggaggacctggacagccgcagcaacctgcacctgcctgagaccaagttcagcgagctgagcaagctgaagaatgatgacatggagaaggccaaccacattgaatctgtcatcaagagcaacctgcccaactgtgccaacagcgacacagacttcatgggcctcttcaagagcagccgctatgaccccagcatctccttcagcggcatgagcctgagtgacaccatgaccctgcggggctctgtgcagaacaagctgaaccccaggcctgggaaggtggtgatctacagcgagccagatgtgtctgagaagtgcatcgaggtgttcagtgacatccaggactgcagctcctggagcctgagccctgtgatcctgatcaaggtggtgcggggctgctggatcctgtatgagcagcccaactttgagggccacagcatccccctggaggagggggagctggagctgagcggcctgtggggcatcgaggacatcctggagagacatgaggaggccgagagtgacaagcctgtggtgattggcagcatcagacatgtggtgcaggactacagagtgagccacatcgacctcttcacagagcctgagggcctgggcatcctgagcagctactttgatgacacagaggagatgcagggcttcggcgtgatgcagaagacctgcagcatgaaggtgcactggggcacctggctgatctatgaggagcccggcttccagggcgtgcccttcatcctggagcctggagagtacccagacctgtccttctgggacacagaggaggcctacatcggctccatgaggcccctgaagatgggcggcaggaaggtggagttccccacagaccccaaggtggtggtgtatgagaagcccttctttgagggcaaatgtgtggagctggagaccggcatgtgcagctttgtgatggagggcggggagacagaggaggccactggagatgaccacctgcccttcacctctgtgggctccatgaaggtgctgcggggcatctgggtggcctatgagaagccaggcttcaccggccaccagtacctgctggaggagggggagtacagagactggaaggcctggggcggctacaatggagagctgcagagcctgcggcccatcctgggggacttcagcaatgcccacatgatcatgtacagcgagaagaactttggcagcaagggcagcagcattgatgtgctgggcatcgtggccaacctgaaggagaccggctacggcgtgaagacccagagcatcaacgtgctgtctggagtgtgggtggcctatgagaacccagacttcaccggggagcagtacatcctggacaagggcttctacaccagctttgaggactggggcggcaagaactgcaagatcagctctgtgcagcccatctgcctggacagcttcaccggccccaggagaagaaaccagatccacctgttcagcgagccccagttccagggccacagccagagctttgaggagaccaccagccagattgatgacagcttcagcaccaagagctgccgggtgtctgggggctcctgggtggtgtatgatggagagaacttcaccggcaaccagtatgtgctggaggagggccactacccctgcctgagcgccatgggctgccccccaggggccaccttcaagagcctgcgcttcattgatgtggagttcagcgagcccaccatcatcctgtttgagcgggaggacttcaagggcaagaagattgagctgaatgctgagaccgtgaacctgcggagcctgggcttcaacacccagatccgctctgtgcaggtgattggaggcatctgggtgacctatgaatatggcagctaccggggccggcagttcctgctgagccctgctgaggtgcccaactggtatgagttcagcggctgccggcagatcggcagcctgcggccctttgtgcagaagaggatctacttccggctgaggaacaaggccaccggcctcttcatgagcaccaacggcaacctggaggacctgaagctgctgcgcatccaggtgatggaggatgtgggcgcagatgaccagatctggatctaccaggagggctgcatcaagtgcagaattgctgaggactgctgcctgaccatcgtgggcagcctggtgaccagcggcagcaagctgggcctggccctggaccagaatgctgacagccagttctggagcctgaagagtgatggccgcatctacagcaagctgaagcccaacctggtgctggacatcaagggcggcacccagtatgaccagaaccacatcatcctgaacacagtgtccaaggagaagttcacccaggtgtgggaggccatggtgctgtacacctag

SEQ ID NO: 280384 - DNA, 1629 bp, Artificial Sequence
  derived and/or modified sequence
atgcagaagcccaagacagtggcctgggagaacctgggccctgagatgtctgccctgggcacagccttcagccgggagggcggcaggaaggtggagttccccacagaccccaaggtggtggtgtatgagaagcccttctttgagggcaaatgtgtggagctggagaccggcatgtgcagctttgtgatggagggcggggagacagaggaggccactggagatgaccacctgcccttcacctctgtgggctccatgaaggtgctgcggggcatctgggtggcctatgagaagccaggcttcaccggccaccagtacctgctggaggagggggagtacagagactggaaggcctggggcggctacaacggggagctgcagagcctgcggcccatcctgggggacttcagcaatgcccacatgatcatgtacagcgagaagaactttggcagcaagggcagcagcattgatgtgctgggcatcgtggccaacctgaaggagaccggctatggagtgaagacccagagcatcaacgtgctgagcggcgtgtgggtggcctatgaaaatccagacttcaccggggagcagtacatcctggacaagggcttctacaccagctttgaggactggggcggcaagaactgcaagatcagctctgtgcagcccatctgcctggacagcttcaccggccccaggagaagaaaccagatccacctgttcagcgagccccagttccagggccacagccagagctttgaggagaccaccagccagattgatgacagcttcagcaccaagagctgccgggtgtctgggggctcctgggtggtgtatgatggagagaacttcaccggcaaccagtatgtgctggaggagggccactacccctgcctgagcgccatgggctgccccccaggggccaccttcaagagcctgcgcttcattgatgtggagttcagcgagcccaccatcatcctgtttgaaagagaggacttcaagggcaagaagattgagctgaatgctgagaccgtgaacctgcggagcctgggcttcaacacccagatccgctctgtgcaggtgattggaggcatctgggtgacctatgaatatggcagctaccggggccggcagttcctgctgagccctgctgaggtgcccaactggtatgagttcagcggctgccggcagatcggcagcctgcggccctttgtgcagaagaggatctacttccggctgaggaacaaggccaccggcctcttcatgagcaccaatggaaacctggaggacctgaagctgctgcgcatccaggtgatggaggatgtgggcgcagatgaccagatctggatctaccaggagggctgcatcaagtgcagaattgctgaggactgctgcctgaccatcgtgggcagcctggtgaccagcggcagcaagctgggcctggccctggaccagaatgctgacagccagttctggagcctgaagagtgatggccgcatctacagcaagctgaagcccaacctggtgctggacatcaagggcggcacccagtatgaccagaaccacatcatcctgaacacagtgtccaaggagaagttcacccaggtgtgggaggccatggtgctgtacacctag

SEQ ID NO: 280385 - DNA, 3993 bp, Artificial Sequence
  derived and/or modified sequence
atgcccctgagcccccccgcccagggcgaccccggcgagcccagcccatgccgtcccccaaaaaagcatactacgtttcacctctggcgaagcaagaaaaagcagcagccagcccctcctgactgtggtgtgtttgtcccacatccacttcctgcccccgcaggcgaggctagggctctggatgttgtggacggtaaatatgtggttcgggactcacaggagttccccttacactgtggtgagagtcaattcttccatactacatccgaggcactagggtctctcctgttggaaagcgggatctttaaaaagtctcgggcccagcccccagaggataaccgacgcaaaccagtcctgggaaagctcggaacactgtttacagccggacggaggagaaatagccggaatggattggaatcacccacccgctctaacgctaagccgttgagtccaaaagatgtggtggcctctccaaaactgccggagagagaatcggagcggtcacggtcccagtcctctcaactgaagcagacagacactagtgaggaggggagcccacgtgaaaatcctcgggaggctgagggcgaactacctgagtcaggtggcccagccgccccaccagatgccgagctcagcccaaggtggtcatcctccgccgccgcagttgccgtccaacagtgccacgagaatgattccccccaactggaacctctggaagccgaaggagaaccttttcctgatgctacgactacagcaaagcagttgcattcctcaccagggaattcctcacgccaggagaatgcagaaacaccggctcgttccccaggggaagacgccagccccggagccgggcatgagcaggaggcgtttcttggagtgcggggagctccgggctctccgacccaggagcgtccggctggcggtctcggtgaggctcccaatggcgccccgtcagtttgcgctgaggaagggtctctcggaccgagaaacgccaggtctcaaccgccaaaaggagcctcagaccttcccggagaacctcccgccgagggggccgcccacacggcctcaagtgcacaggccgactgcacggcaagacctaagggtcatgctcacccggccaaggtgctaactctggacatctatctgagcaagaccgagggagcccaggtcgacgaacccgtggtgataaccccccgcgcagaagattgcggcgactgggacgacatggaaaagcggagctccggtaggaggagcggtagacggcgtgggagccaaaaatcgaccgattcgcccggtgccgatgctgagctgccggagagtgccgcacgcgacgatgccgtgttcgatgacgaggtggcccctaacgcagcctccgacaatgcttcagctgaaaaaaaagttaaaagtcctcgggcagccctcgacgggggtgttgccagtgccgcctccccagagtcaaaaccgagtccagggacaaagggccagctccgcggtgagagcgatcgcagcaaacagcctccacccgcctcgtctcccactaagagaaagggcaggagcagagcactagaagcagttcccgctccacctgcttccggccctcgcgcccctgcaaaagaatcgccacctaagcgtgtgccagatccttctcccgtaactaaagggacagccgccgagtctggcgaagaggccgcacgggcaattccccgtgaactgccggtgaagagttcgtcactactccccgaaattaagcccgaacataagcgcggccctttaccaaatcatttcaatgggcgcgcagaagggggaaggagtcgggaacttggccgagccgccggcgcaccgggagcatccgatgcggatggtctcaaaccacggaatcatttcggcgttggacgcagcactgtgaccactaaggtgaccttgcctgctaagcccaagcacgtggagctgaatctgaaaactccaaagaatttagatagccttggtaacgaacacaatcctttttcacagccggtgcacaagggcaacaccgccactaagattagcctattcgaaaacaaaagaaccaatagttcaccaagacataccgatatcagaggacagcggaacacaccagcctcaagcaaaacattcgtggggagagccaagctcaacctggcaaaaaaggctaaggaaatggagcagcccgaaaagaaggttatgcccaactctccgcagaacggagtcttagtcaaggagactgctatcgaaaccaaggtgactgtgagtgaggaagagattctcccagctacccgggggatgaatggagactcaagtgaaaatcaggccctgggaccgcaacccaatcaggacgacaaagccgatgtgcagactgatgctggatgtctaagtgagcctgtggcaagtgccttgattccagtcaaagatcacaaactgctggaaaaagaagattctgaagccgcagatagcaagtccctggtcctcgaaaatgtcactgacactgctcaagatattcccaccaccgtcgacacaaaagatctgcccccaaccgccatgccaaagccccagcatacattttcagactctcagagcccggccgagtcctcacccgggccatcactgtctctgagtgccccggcgccaggagacgtgcccaaggacacctgtgtccagtcaccaattagttcgttcccttgtaccgatctaaaggtaagcgagaaccataagggttgcgtgttgcccgtgagtagacagaataatgaaaaaatgccccttctcgagttgggtggcgagacaacccctcccctttccacagagcggtctccagaagctgtcggcagcgagtgtcctagccgagtgctcgtgcaggtgagaagttttgtgttgcctgtagaaagcacacaggacgtctcatcccaggtgatcccagagagttcggaagtgagggaagttcagcttcccacctgccactctaatgagcccgaggttgtctcagtcgccagctgcgcaccaccccaggaggaagtgctaggaaacgaacactctcactgcaccgccgagctggccgccaagagtggcccacaagtgattcctccggcgtccgagaagactctacccatccaggcacagtcccagggctccagaactccactaatggccgagagcagtcccacaaactcaccaagctctggaaaccaccttgccacacctcagcgaccagatcagacagtgaccaacggtcaggatagcccagcctcgttgctgaacatttcagcaggttcagatgattctgtgtttgattcatcttcggacatggagaaattcacggagatcatcaagcagatggattccgccgtctgtatgccaatgaagcgcaagaaggctcgaatgcccaattcccctgctccccattttgctatgcctccaatccatgaagatcatctggagaaagtgttcgacccaaaggtattcacgtttgggctgggcaaaaagaaggaaagccagccagaaatgtcccccgcactccacctcatgcagaacctggatacgaaatctaagctgcggcctaagcgagcctccgccgagcagtcagtactgttcaagagtcttcatacaaatacgaacggcaacagtgaacccttagtcatgccagagatcaatgacaaagagaaccgggacgtgaccaatggtggtatcaagcggtcacggttagagaagagtgccctgttcagttctctgctttcttcgctgccacaggataagatcttctccccttcagttacgtcagtgaatacgatgactactgccttttctacatcacagaatggaagcctctcccagagcagtgtttcacagcccaccactgaaggcgcccctccctgcggcttaaataaagagcagtccaacctcctgccagacaattccctgaaagtattcaactttaatagcagcagcacatcccatagctccctcaagtcacccagtcacatgtag

SEQ ID NO: 280386 - DNA, 5172 bp, Artificial Sequence
  derived and/or modified sequence
atggagaagcggagcagcggccggcggagcggccggcggcggggctcccaaaagagtactgatagccccggtgccgatgcagagctccccgaaagcgcggccagggatgacgcagtatttgatgatgaagtggcccccaacgctgcttctgataacgcgagcgctgaaaagaaagtgaaatcaccaagggctgccttggacggtggcgttgcatccgccgcatcaccagaatctaagccctcacctgggacaaagggccagctgaggggagaatcggataggagtaaacaacctccccctgcatcttcgcccaccaagcggaagggcagatcaagagcgctggaggctgttccagccccacctgcgagtggcccgagagcgcctgccaaggaaagcccacccaagcgggtgccagacccgtccccggtaaccaagggaacagctgcagaaagcggagaggaggccgcccgagccattccacgcgaactgcccgtaaaatcaagtagtctactcccggaaatcaagccagagcataaacgagggcccctcccaaatcactttaatgggagggctgaaggcggacgctccagggaattaggaagagcagccggcgccccaggcgccagcgacgctgacgggttaaaaccaagaaatcatttcggcgtaggtaggagtactgttactacaaaagttactttgccagcgaagccaaagcacgtagaactgaacctaaagacccctaaaaatctcgacagtctcgggaatgagcataatccgttctcacagcccgtgcacaagggaaatacagcgacaaaaatttctctctttgagaacaaacgcactaattcatccccccgccatacagatatccgcggccagagaaatacccccgcgagctcaaagacttttgtgggcagggccaaactcaatctcgcgaagaaagctaaggaaatggagcaacccgagaagaaggtgatgcccaattccccacaaaacggcgtgcttgtgaaagagaccgcaatcgaaactaaagttaccgtcagtgaggaggagatacttcctgctacccggggcatgaatggggatagcagtgagaaccaagcccttgggccacagccaaatcaagatgataaagccgacgtgcagactgatgcggggtgtcttagcgaacctgtcgccagtgcccttattcccgtgaaagatcacaagttgctggaaaaggaggattcagaggccgccgactcaaaatcgttggttctagaaaacgttacagatactgctcaggacatccctactacagttgacacaaaggatctgccacccaccgccatgccaaagccacagcataccttcagtgactcccaaagcccagccgagagttcacctgggcctagcctgtccctaagcgcaccagccccaggagacgtccccaaggacacctgcgttcagagcccaatatcctcattcccttgcactgatctgaaagtgtccgagaatcataaaggctgtgtacttccagtgtctcgccaaaacaacgaaaaaatgccactcttggagctggggggagaaaccacgccccccctctcaactgagcgttctcccgaggcggttggctctgagtgccctagcagagtgctcgtccaggtgcgctcattcgtcctcccagtggagtccacacaggacgtgagcagccaggtgatcccagaatcatctgaggtccgtgaggtccagctgcccacctgccacagcaatgaaccagaggtggtgtcagttgccagctgtgctcctcctcaggaggaggtactgggcaacgaacacagccactgcaccgcagaactggctgccaagagcgggccacaggtaatcccacccgcctccgaaaagactttgccaattcaggctcaatctcaaggaagtaggacccccctcatggccgaaagcagccctaccaattctccatcctccgggaatcacttggcgacccctcagcggcctgatcagaccgtcaccaatggtcaggattcgcccgcttccctcctcaatatttctgctggtagtgacgatagcgtgtttgacagttcttccgacatggagaaattcactgagattattaagcaaatggattctgcggtctgcatgccaatgaagagaaagaaagcccggatgccgaattcccccgcaccccacttcgcgatgccaccgatccacgaggatcacttggagaaggtgttcgatcctaaagttttcacattcggccttggaaagaaaaaagagagccagcccgaaatgtcacccgctctccatctgatgcaaaacttagacacaaagagtaagttgcgtccgaagcgtgcctcagccgaacagagcgtcctttttaaatccttacatacgaacaccaacggcaactccgaaccacttgtcatgcccgaaatcaacgataaggaaaatcgcgacgtaaccaacggcggaatcaaacgatcaagactggagaaatcagctctcttctcttcgctactgtcaagcctgccccaggataaaatattttccccatctgtgacctctgtcaatacaatgaccacggcctttagtacatctcagaatggttctctttctcaatcctctgtcagccagcctacaaccgagggggcgcctccatgcggactcaataaggaacagagtaacctcctgccggacaactctctgaaggtctttaactttaatagctcttcgacgagccattcctcactgaaatcgccatcccacatggagaaataccctcagaaggagaaaaccaaagaggacctggactctagatctaatctgcacctgccggagacaaagtttagtgagctttcgaagttgaaaaacgacgatatggagaaggccaatcacatcgagagcgtgatcaagtccaacctgccaaactgtgctaatagcgataccgatttcatggggctcttcaaaagctccagatatgatccctccatatctttttctgggatgagcctgtctgatacaatgacgctgcgtgggagcgtacagaacaagctgaaccctcggccaggcaaggtggtgatttacagcgagccagacgtctccgagaagtgtattgaggtgttcagcgacattcaagattgttcgagctggtctctatcccctgtgatactgatcaaggttgtaaggggatgctggattttgtatgagcagcctaacttcgaggggcattccatcccacttgaggagggtgagttggagttgagcggcctgtggggaattgaagatattttagagcgacatgaggaggcagagagcgataagccagttgtgatagggagcatccgtcatgttgttcaggactaccgcgtttcacatatagacttgtttactgaacctgagggcttgggcatactgagttcctacttcgatgacaccgaagagatgcagggctttggagttatgcaaaagacttgttctatgaaagtgcactggggcacctggctgatatatgaagagcccgggtttcagggcgtccctttcattttggaacctggggagtacccagacctctcattttgggacacagaggaggcatatatcggttccatgcggcctcttaagatggggggccgtaaagtggaattccctacagacccaaaagtcgttgtttatgagaaacctttcttcgaggggaaatgcgtggagcttgaaactgggatgtgctcatttgttatggaaggcggggaaactgaagaagccactggtgacgaccatctcccctttacttccgtaggtagcatgaaagtgctaaggggcatctgggttgcatatgagaagcccggattcacaggacatcaatacctgttggaggaaggggagtacagggactggaaagcatggggtggctacaatggagagctgcagtccttaagacccatcctcggcgacttcagtaacgcacatatgataatgtattccgagaagaattttggatctaaggggtcctctatcgatgtactggggatcgtggccaacctgaaggagacggggtacggcgtgaaaactcagtctattaacgtgctgagtggggtttgggtggcatacgaaaacccagacttcacgggagagcaatatattcttgataaggggttttacacgtcttttgaagattggggtggaaagaactgtaagatatcctccgtccaaccaatttgtctagatagtttcactggtcctcgaagaagaaatcagatccacctgtttagcgagccccagtttcagggccattcccagagctttgaagagacaacatcccaaattgacgactctttctccaccaaatcctgtagagtttccgggggttcatgggtagtttacgacggagagaacttcactggtaaccagtatgtgttagaagaagggcattacccctgcctgtccgccatgggatgtcctccaggggctacatttaagtctctacgattcatagatgtagaattcagcgagcctaccattatcctcttcgaaagggaagatttcaaaggcaagaaaatcgaactgaatgctgagaccgttaatttgcgttcgctgggcttcaacacacagatccggtcagttcaggtgataggtggcatttgggtgacctacgagtacggatcttacagaggcagacagtttttgctctctccggccgaggtccccaattggtacgaattttcaggatgtagacaaatcggatctctccgtccatttgtgcagaagaggatttactttcgactgcggaataaagccacggggttgtttatgtcaaccaatgggaatcttgaggatctgaagctcctccgaatacaggtcatggaggatgtgggggccgatgaccagatctggatttaccaggagggatgtataaagtgccgcatcgccgaagattgttgcctgactattgtgggatcattggtaacctccggaagcaagttgggcctggcattggaccaaaatgctgactcacagttctggagccttaaaagcgacggccgtatctattccaagctgaaacctaaccttgttcttgacattaaagggggaacacagtatgatcagaaccacatcatcttaaacacagtcagtaaagagaagtttacgcaggtttgggaggctatggtattatacacatag

SEQ ID NO: 280387 - DNA, 1629 bp, Artificial Sequence
  derived and/or modified sequence
atgcagaagcccaagaccgtggcctgggagaacctgggccccgagatgtcagcactcggcactgcattttctagggaaggcgggcggaaggtggagtttccaacggacccaaaggttgtagtgtatgagaagcccttcttcgaaggcaaatgcgtcgaattagagacaggcatgtgtagttttgttatggagggcggcgagaccgaggaggctacaggcgatgaccacttgccctttacatctgttggcagcatgaaagttctacggggaatctgggttgcatatgagaaacctggctttacagggcaccagtacctgcttgaggagggggagtatagggactggaaagcatgggggggatacaacggggaactccagtctcttagacctattctcggggacttcagcaacgcgcatatgatcatgtattccgagaagaattttggttccaaagggtcctcaatcgacgtgctgggcattgtcgccaatttgaaagaaactggctatggcgtaaagacccaatcaattaacgtcctttccggggtgtgggtagcgtatgagaatccagactttaccggtgaacaatacatactggacaagggcttctacacctcatttgaggattggggaggaaagaattgcaagatctccagcgtgcagcctatttgtttagacagctttaccggacctcgacggcgaaaccagatccacctattttccgaaccccagtttcagggtcacagccagtcttttgaagagacaacctcacagatcgacgactcattttctacaaagtcctgtcgagtgtccggcggaagctgggtggtctacgatggtgaaaattttaccggtaaccagtatgtgctggaggaaggccattatccctgccttagcgccatgggctgtcccccaggcgccacctttaagtctttgagatttatcgacgtggagttctccgagcctaccattattctcttcgaacgggaagacttcaaaggcaagaagatcgagctgaatgctgagaccgtaaacctcaggtctttggggttcaatacgcaaatccggagtgttcaggtaattggaggaatttgggtaacatacgaatacggttcctacagaggacggcagttcctgctcagtcccgctgaggtacctaactggtacgaattctccggctgtagacagattgggagcctgcgccccttcgtccagaaacgcatctatttccgactgcgaaataaagccacaggattatttatgagcaccaacgggaaccttgaagacctgaagttgttacgcatccaagtgatggaggatgtaggcgccgacgaccagatctggatttatcaagagggatgcattaaatgtcggattgccgaggattgctgcctcacgatcgtaggaagtctggtgacatcaggcagcaagttggggctggccttggatcagaacgcggattctcagttttggtctctaaagagtgatggtagaatctattctaagcttaaaccaaacctcgtgcttgacattaagggtggtacacagtacgaccagaatcacatcatcctaaataccgtttcaaaggaaaagttcacacaagtgtgggaagcaatggtgttgtatacctag

SEQ ID NO: 280388 - DNA, 3993 bp, Artificial Sequence
  derived and/or modified sequence
atgccgctttcgcctcccgctcagggcgaccccggtgagcctagtccgtgccggcctcccaagaagcacaccaccttccacctgtggcggtccaaaaaaaaacagcagccggctcccccagactgtggggtttttgtgccgcaccctttacccgctcccgctggcgaagccagggccctggatgtcgtggatggtaagtacgtggtccgcgactctcaggagttccccttgcactgcggcgaatcacagttcttccataccaccagcgaggccctggggagccttcttctagagagtggaattttcaaaaagtcgagggctcagccgccagaagacaaccgcagaaagcccgtgctcggcaagctgggaaccctatttaccgcaggacgcagacggaattcaaggaatggcctcgaaagtcccacaagatctaacgctaagccactgtcccccaaggacgttgtagcttctccaaaactgcctgaacgggaatcggagcgaagtcggagccaatcaagtcaattaaaacagactgatacaagtgaggagggctcacctagagaaaacccaagggaggcagaaggggagctgcccgagtctggagggcctgctgccccacctgatgctgagcttagccctaggtggtcatctagcgccgcagcagtggctgttcagcagtgccatgaaaatgacagcccacagcttgaaccccttgaagccgaaggagaaccgttccccgatgcaactacaacggcgaagcagttgcattcctctccgggaaactcctctagacaggaaaatgcggagacacccgctaggtcccctggagaagacgcttcgcctggtgcaggtcatgaacaggaggcattcctaggagtgcgaggtgcgccaggcagtccgactcaggagcgccctgccggtggactcggagaagcgcctaatggtgccccaagcgtgtgcgccgaggaaggctcactgggacctcggaatgcccgatcccagccacctaaaggggcttccgatctgcccggtgaaccacccgctgagggggcagcccacactgcatcctctgcgcaggccgactgcacagccaggcccaaggggcacgcccatcctgccaaagtactcacattagacatctacctgagtaaaactgaaggagcgcaagtcgacgagccagtagtgataacacctagggctgaagactgtggcgactgggatgacatggagaagaggagtagcgggcgacggtcaggccgacgaagagggtcgcaaaagagcactgattctccaggcgcagacgccgagttgcccgagagcgctgctcgggatgacgccgtgttcgacgatgaagtggcccctaatgctgcttctgataacgctagtgccgagaaaaaagtcaagagccccagagctgcactggatgggggtgtcgcaagcgccgcttctccagaaagcaaaccttcgcccggtacgaaaggccagctaaggggtgagtcagatcgttccaagcagccgcctccagcttcgtcacccacgaagcggaagggccgaagtagagcgctcgaagctgtgcccgctccacccgcatccggacctcgtgccccagctaaagagagccccccaaagcgggtacccgacccgagtcccgttacaaagggaaccgcagctgagagtggggaggaagctgcaagagctatccctcgagaattacccgtcaagtcctccagcttgttgccagagattaagcctgaacataaacggggacccttacccaatcacttcaatgggagagccgaaggcggaagatctcgggaactaggaagagctgctggcgctcctggcgcttcagatgcagacggcctgaagcccagaaatcatttcggggtgggcaggagcacggttactactaaggtcaccctacccgcaaagcctaagcacgttgagcttaatctgaaaacccctaagaacctagattcactgggtaacgagcacaacccgtttagccaaccagtccacaagggaaacacagctacaaagatttctttgttcgagaataagcggactaattcgtctcctaggcatactgacatcagagggcagcggaacacccctgcgagtagcaaaactttcgttggcagggccaagctgaacctggccaagaaggctaaggagatggagcaacctgagaaaaaggtgatgccaaattctccacagaatggtgtgctagttaaagagaccgcgatcgagaccaaggtaaccgtgtctgaggaggaaattctgcccgctaccagaggaatgaacggagactcctctgaaaatcaggcattgggcccacaaccgaaccaagacgacaaggccgatgtgcaaactgatgctgggtgtctgtctgaacctgtcgcctctgccctgatcccagtcaaggaccacaaactcctcgaaaaagaggactccgaggctgccgattccaagtccttagtgcttgaaaacgtgacagacactgcccaagacatacccaccactgtggacacgaaggatctcccccctactgccatgccaaaaccacaacacaccttcagtgactcacagagccctgccgagtcatctccagggccttctcttagtttatccgctccagcacccggtgacgtcccaaaggatacgtgcgtccagtctccaatttcttctttcccatgcactgatctgaaggtgtccgagaatcacaaggggtgcgtgctgccggtctccagacaaaataatgaaaagatgcccctgcttgaactcgggggagaaaccactcctcccctgtcaacagagagatcacccgaggctgtgggctcagaatgcccatcaagggtgctcgttcaggtcagatctttcgtactgcccgtagaatctacacaggacgtctcaagccaggtcattcccgagtcttccgaggtgcgagaagttcaactgcctacatgccattctaacgaacccgaggtggtgtcagtggccagttgcgcccctcctcaggaagaggtactgggaaacgaacactcccattgcaccgcggagcttgccgcaaaatcagggcctcaggtgatcccaccggcatctgagaaaacattaccgatccaggcgcagagccaggggtccagaaccccactgatggccgagtcatctcctactaactcacctagtagcggcaatcatctagcgacacctcagaggccagaccagacagtaactaatggacaggactcccccgcatcactgctgaacatctccgcaggaagcgatgattccgtcttcgactcttcatctgatatggagaagtttaccgagatcatcaagcagatggactcagctgtttgtatgcctatgaagcgtaagaaagcacgcatgccgaatagtcctgcccctcattttgcaatgccccctatccatgaagatcatttggagaaagtgtttgatccgaaggtattcaccttcggactgggcaaaaagaaagagtctcagccggaaatgtcacccgcactacacctcatgcagaatctagacacaaagagtaaacttcggcctaagagggcatccgcggaacagtccgtccttttcaagtcactacatacaaatactaacggaaatagtgagccactcgtaatgccagaaatcaatgataaggagaaccgagacgtgacaaacgggggaattaagagaagccggctcgagaaatccgcattgttcagtagcctgttatctagcctcccgcaggataaaatattctccccatctgtgacatccgtgaataccatgaccaccgctttctccacatctcagaatggctctcttagccagtcgtcagtttctcaacccaccactgaaggcgcacccccttgcgggctgaataaagagcagtccaatctactgcccgacaactccttgaaggtattcaacttcaactcaagcagcactagccactcgtcactgaaatccccaagccatatgtag

SEQ ID NO: 280389 - DNA, 5171 bp, Artificial Sequence
  derived and/or modified sequence
atggaaaagcgatcctccggaaggaggtctggcagaagacgcggtagtcagaaatcaactgatagcccgggtgcggacgcggagcttccagaatcagctgctagggacgacgctgtgttcgatgacgaagtggccccaaacgccgctagtgacaatgccagtgcggaaaaaaaagttaaaagtcctcgcgctgcactggatggaggggtggctagtgccgcttccccagagtcaaaacccagtcccggtacaaaaggccaactgagaggcgaatctgacagatcgaagcaacctccccctgcctcctctcctactaagcgcaaaggcaggagtcgcgctctggaagcagtgccagcaccgccagcttcgggtccccgagctccagctaaggaatctccgcctaaaagagtgccagatccctctcctgtgacaaagggaacggccgctgaaagcggggaggaagcggcaagggcgatacctagagagctgccggttaaatcttcatctcttttacctgagataaaaccggagcacaagcgagggcctctgcctaaccattttaacgggagggctgaagggggaagaagtcgcgagttagggagggcagcgggtgccccaggtgccagtgatgctgacgggctcaaacctagaaaccattttggagtgggacgatccaccgtaaccactaaggtgaccctgcctgccaagcctaaacatgtcgaattgaacctgaaaacacccaagaacctcgattctttaggcaatgagcacaatcctttttcgcagccggtccacaaaggcaacacggccacaaaaatctctttgttcgagaacaaacgcaccaattcgagtccgcgacatacagacattcggggacagcgaaacacaccagcctccagtaagacatttgtcggcagggctaagctgaatcttgcaaaaaaagccaaagagatggagcagcctgagaaaaaggtgatgccaaattctcctcagaacggggtgctcgttaaagaaaccgccattgaaaccaaagtcaccgtttccgaagaagagattctcccagcgacaagaggtatgaatggggatagttctgaaaaccaggccctcgggcctcaacccaaccaggacgataaggccgacgtgcagactgatgccggttgtttatctgaacccgtcgcctcagcgctgatccctgtgaaagaccacaagttgctagaaaaggaggactccgaggccgctgattcaaaatccctcgtactcgagaacgttaccgatactgcacaggacatccctactacggtggacaccaaagaccttccacctaccgctatgccgaagccgcaacacactttctctgacagtcagtcccccgctgaatcttctcccggtccttcactgtctctaagtgctcctgcacccggtgacgtccccaaagatacctgcgtgcaatcacctatctcatcgtttccgtgcactgatttaaaagtctcagagaatcataagggctgtgtcctgccagtgagtcgacagaacaacgaaaaaatgcctctacttgagctgggaggggagacaactcccccactttccaccgagcgcagtcctgaggccgttgggagcgagtgtccatccagagttctcgtccaggttaggtcattcgttctgccagtggagagtacacaggatgtgtcatcacaggttattcccgaaagctctgaggttcgcgaagtccagctaccaacttgccattcaaatgaacctgaagtcgtgtctgtcgcatcttgcgctcctcctcaggaagaggtcctgggaaacgaacacagccattgtactgcggagttagccgcaaagtccggacctcaggtgatcccacccgcatctgaaaaaacacttccgatccaggcacagtcccagggttccagaacgcccctaatggccgagagctctccaaccaactcacctagctctggcaatcaccttgcgacaccacagcgacctgatcagaccgtgaccaacggccaggacagccccgctagcttacttaacatcagtgcagggtccgacgacagcgtgttcgactcaagctccgatatggaaaagttcacagaaatcatcaagcagatggactcggccgtctgcatgcctatgaagcggaaaaaagccagaatgccgaattcccctgcgcctcatttcgccatgccgcctatccacgaggatcacctagaaaaggtgtttgatccgaaggttttcacattcggcttaggaaagaaaaaggaaagccagcctgaaatgtctcccgctctccacctcatgcaaaatctggacaccaaaagcaagctccgacctaaaagagcctctgccgagcagagcgtgctgttcaagagtttgcatactaacaccaacggaaacagcgagccactcgtcatgcccgaaattaacgataaagaaaaccgggacgtgaccaatgggggtattaagcggtctagactcgaaaaatcggctctgttttcaagccttctctccagtctgccccaggacaaaatctttagcccctccgtcaccagcgtcaataccatgactacagctttcagcactagccaaaatggaagcctgtcccaaagcagcgtctctcagcccacaacagaaggagcacctccttgtgggttgaacaaagagcagtctaatttgctgcccgataattcactcaaggtgtttaactttaactcctctagcaccagccactctagcctgaagagcccctcccacatggagaagtatccgcagaaggaaaaaacaaaggaggacttggactctcggagcaatctgcatctgcctgagacaaaatttagcgaattatctaagctgaagaacgacgatatggagaaggccaatcatatagagagcgtcatcaaatcaaatctcccaaactgcgcaaattccgacacagattttatgggcctgtttaaaagtagtagatacgatcccagcattagcttttcaggcatgtcactgagtgacacgatgaccctaagaggctccgttcagaataaactcaatcctcgcccaggcaaggtggtcatctactcagagccggacgtgagcgaaaagtgtattgaggtgtttagcgacatccaggactgtagctcctggtccctgtcgcctgtgatccttattaaggtggtgaggggctgctggattctgtacgagcagcccaactttgaggggcactccattcctctggaggagggcgaactagaactgtctgggctttggggaatcgaggatatcctcgaaaggcatgaagaggccgaatcagataagcctgtcgttattggctcgatccgtcatgtcgtccaggactatcgggtgagtcacatcgacctttttacggagccagaaggcctgggcatcctctcctcatatttcgacgacactgaagagatgcaaggcttcggtgtcatgcagaaaacatgctccatgaaagttcattggggaacctggcttatttatgaggagcccggttttcaaggggtcccattcatcttggagccaggggagtatcctgatctgtcattctgggatactgaagaagcttacatcggtagtatgcgcccactaaagatgggaggaaggaaagtggagtttcccaccgaccctaaagtggtggtgtatgaaaagcccttctttgagggcaagtgtgttgaattggaaaccggaatgtgctcattcgtgatggaaggtggggaaacagaggaggctacaggcgatgaccacctcccatttacttccgtgggttcaatgaaggttctccggggaatatgggttgcctatgaaaagcctggatttacaggacaccaatacctgctggaggagggggagtatagggactggaaggcttggggtggatacaatggggagctccagagtttgcgcccaattctcggcgatttcagcaatgcacatatgatcatgtattctgagaagaactttggttctaaagggtcttccatcgacgtcctggggatagtggccaatctgaaagaaacgggatatggagtgaaaacccaaagcatcaatgtgctgtccggagtgtgggtcgcctacgagaacccagacttcaccggagagcagtatatcctcgacaaggggttctacacctccttcgaggactgggggggaaagaattgcaaaattagttctgtccaacctatttgcctcgacagttttaccgggccacgtcggcgtaaccagatccacctgttttccgagccacaattccaggggcattcccaaagttttgaggagactaccagccagatcgacgattcattttcaacaaagagttgccgagtcagcggcggtagctgggttgtctacgacggagagaacttcactgggaaccagtacgtgcttgaggagggacattatccctgcctgtccgctatgggttgccctcccggagctacgttcaagtctctgaggtttattgacgttgaatttagcgagcccaccatcatcctctttgagagggaggattttaaaggaaaaaaaatagaactcaacgcagaaacggttaatctgcggtctctcggctttaatacccaaatccggagcgtccaggttatcgggggaatatgggtcacctatgagtatggctcatacagggggagacagttcctgctgtcgccagccgaagttcctaattggtacgagttcagcggttgtagacagattggctctctcagaccatttgtgcaaaagagaatctattttcgcctgcggaacaaggcaacagggctgttcatgtctactaacggaaacctggaggatctgaagctcctgagaattcaggtcatggaagatgtcggagcagacgaccagatttggatttatcaggaaggctgtattaagtgtaggatcgccgaagactgttgcctcaccattgtgggctctttggtgactagcggttctaagctcggtctagcccttgaccaaaacgctgacagccaattctggtccctcaaaagcgacgggaggatctactctaaactaaaacctaacctcgtcttagatataaagggcggtactcaatacgatcagaaccatattatcctcaatacagtatcaaaggaaaagtttacccaagtatgggaggccatggtcttgtacactta

SEQ ID NO: 280390 - DNA, 1629 bp, Artificial Sequence
  derived and/or modified sequence
atgcagaaacctaaaacagtcgcctgggagaacctcggcccagaaatgagcgctcttgggaccgccttctcaagggaaggtggcaggaaagtcgaatttcctaccgaccctaaagtggtcgtgtacgagaaaccgttctttgaagggaaatgtgttgagctcgaaaccgggatgtgctcatttgtcatggagggaggggagacagaggaagcaactggtgatgaccacttgccattcactagtgtggggtccatgaaagttctgaggggcatatgggtagcttatgagaagccaggcttcacaggacatcagtatttgctggaggagggcgagtatcgcgactggaaggcctggggcggatataatggggagctccagtccctgagaccgatcctgggagactttagtaatgcacatatgattatgtacagcgagaaaaactttgggagtaaggggtcctccatcgacgttcttgggatcgttgcaaaccttaaagagacagggtacggagtgaagacccaaagtataaacgtcctctccggagtttgggttgcttatgagaatcctgacttcactggagagcaatacattctagataaggggttttacacctcatttgaagattgggggggtaaaaactgcaagatctcgtctgttcagcccatctgtcttgactcatttacggggccacgtcggcgtaaccagatacatctcttcagcgaaccacagttccaggggcattcccaaagtttcgaagaaactacctctcagatagacgattccttctctactaagtcatgccgtgtttctgggggttcttgggtagtgtacgacggcgaaaatttcacaggaaaccagtacgtgctggaagaaggacactacccttgtctgtcagccatgggatgtccccctggggcaactttcaaatccctcagatttattgacgtcgaatttagtgagccaaccattatcctgttcgaaagggaagactttaaaggaaaaaaaattgagctgaacgcagaaactgttaatctgagaagtctcggatttaatacacagattcggagtgtgcaggtcatcggcggtatttgggtgacctacgagtatgggtcctacaggggaagacagtttctgctgtctcccgcagaggtgcccaactggtacgagttcagcggatgtcggcagatcggaagtctgaggccgtttgtccagaaacggatctactttagattacgcaacaaagctacaggactcttcatgtccactaacggaaacctcgaggatctgaaattgctccggatccaagtgatggaggatgtaggcgcagatgaccagatttggatttaccaggaggggtgcataaaatgccgaatagctgaagattgttgcctgacaatcgtaggcagcctcgttacatctggctctaagcttggtcttgcgctggatcagaacgccgattcccaattctggtcattaaagtcagacgggagaatctacagcaagcttaagcccaatctggtgctcgacattaaagggggaacacaatacgaccaaaatcatataattctcaatacagtctctaaggaaaagttcactcaggtgtgggaagcaatggtgttgtacacctag

SEQ ID NO: 280391 - DNA, 8290 bp, Artificial Sequence
  derived and/or modified sequence
atgccgctgtccccgccagcccagggcgaccccggggagcccagcccgtgcaggccccctaagaagcacaccaccttccacctctggcgctccaaaaagaagcagcagccggcgccgcctgactgtggggtgttcgttccgcacccgctcccggcgcctgccggagaggccagagctttggatgtagtcgatggaaaatatgtggttcgagactcccaggaatttccactgcactgtggggaatcccagttcttccacaccaccagtgaggcgcttggttccttacttctagagtctggaatatttaaaaagtccagagcacaacctccagaagacaacagaaggaagccagttttggggaaacttggcactctattcactgcaggaaggagaagaaacagtagaaacgggttagagagtcccaccagatcaaatgccaaaccactctctcccaaagatgtggtagcctctcctaagctcccagagagagagagtgagaggagcagatctcagagcagccaactgaagcaaacggacacaagcgaggagggctccccgcgggagaatccccgagaggcagagggcgagctccccgagagcggtggccccgcagccccccctgacgccgagctgtcacctcgctggagcagcagtgcagcggctgtggctgtgcagcagtgccatgaaaatgattcaccccaattagaacctctggaggcagagggagagcctttcccagatgccaccaccactgccaagcagctgcattcctcgccgggaaattcctccaggcaagagaacgcagagacgcccgcccgcagtccgggggaggacgcttcaccaggtgctggccacgaacaggaggctttcctgggtgtgaggggtgcgccagggtcgcccacccaggagcggcccgcgggaggactaggcgaggcccctaacggagcccccagtgtgtgtgccgaagaaggctccctggggccccgcaacgcccgcagccagccccccaagggcgcgtctgatttgccaggtgagcctccggccgagggcgcagcgcacacggccagctccgcgcaggcagactgcacagcccgccccaagggtcacgcccaccctgctaaggtgctaactttggacatctacttgagtaagactgagggggcacaagtggacgagccggtcgtgattactcccagagcggaagattgcggtgactgggacgacatggagaagaggtccagcggccgtaggtcggggaggcggagggggtcgcagaaatccaccgactcccccggcgcggacgccgagctccctgagagcgctgccagggacgacgcggtgttcgacgacgaggtggcgccaaacgcggccagcgataacgcctcggcggaaaagaaagtgaaatctccgcgggcagccctcgacgggggcgttgcctccgctgcgagcccagagtccaagcccagccccggtaccaaagggcagctccgaggggagtcggaccggagcaaacagccacccccggcttcgtcccccacgaagaggaagggcaggagccgtgccctcgaggccgtgcccgccccgcccgccagcggcccccgggctcccgccaaggagtccccacccaagagggtgcccgatcccagcccagtcaccaagggcactgcggccgagagcggggaggaggcggcgcgggccatcccccgcgagctcccggtcaagagcagctcgctgctgccggagatcaagcccgagcacaagaggggcccgctccccaaccacttcaacggccgggcagagggaggtcgaagcagagagctgggcagagcggccggagcgcctggagcttctgacgccgacggcttgaagcccaggaaccatttcggcgtgggcaggtcgacagtgaccactaaagtgaccctccctgccaagcccaaacatgtggaactaaatcttaaaacccctaagaatcttgacagtttgggaaatgagcacaatccatttagccagccagttcacaaaggcaacactgccaccaaaatctccttatttgaaaacaaacggacaaacagtagcccaagacacactgacattcgaggccaaaggaatactcctgcctctagtaaaacgtttgttgggagggcaaagctgaatttagccaaaaaagccaaagaaatggagcaacctgaaaagaaagtaatgccaaacagtccccagaatggtgtgctggttaaggaaactgctatagaaaccaaagttaccgtctcggaagaagagattctgccagcaaccagaggaatgaatggagactcttctgagaatcaagctcttggtcctcagcctaaccaagatgataaagcagatgtacaaacagatgctggctgcctttcagaaccagtggcttctgctctgattcctgtcaaggatcataagctcttagagaaggaggactcagaggctgcagacagcaaaagccttgtacttgaaaatgtaaccgatacagcacaagacatccccaccactgtggataccaaagatttacctccaacggccatgccaaagccacagcatacattttctgactcacagtcccctgctgagtcatctcctgggccttctctttcactgtctgcacccgctcctggggatgttcccaaagacacatgtgttcaatcacccataagcagtttcccatgcactgatctaaaagtgtcagaaaaccataaaggatgtgttttgcctgtgtctcgtcagaacaatgagaaaatgccacttttagaacttggaggagaaacaacccctcctttgtccacagagcgtagtccagaagctgtgggaagtgagtgtccatccagagtcctcgtccaggtcaggtccttcgtgctccccgtggagagcacccaggatgtgagctcccaggtcatcccagagagctctgaagttagagaagtgcagttgccaacttgtcacagtaatgaacctgaagtggtttccgttgcaagttgtgctcccccacaagaggaagtactgggcaatgaacactctcattgcacagcagagctcgcggcaaaatctggcccacaagtcataccgccagcatcagagaaaactctgcctattcaggctcaaagtcagggcagcagaacacccctgatggctgaatccagtcccaccaactctcccagcagcggaaatcacttagccactcctcaaaggccagatcagactgttacaaatggccaggatagccctgccagccttttgaacatttctgctggtagtgatgatagtgtatttgattcttcttctgatatggaaaaattcactgaaattataaaacagatggatagcgcagtttgtatgcccatgaaaagaaagaaggccaggatgccaaactctcctgctcctcactttgccatgcctcctattcacgaagaccatttagaaaaggtgtttgatcccaaagtgtttacctttggtttggggaagaagaaggaaagtcagccagaaatgtcaccggctttacatttgatgcagaaccttgacacaaaatccaaactgagacccaaacgtgcatctgctgaacagagcgtcctcttcaagtccctgcacaccaacactaatgggaacagtgagcctctggtgatgccggaaatcaatgacaaagagaacagggacgtcacaaatggtggcattaagagatcgagactagaaaaaagtgcacttttctcaagcttgttatcttctttaccacaagacaaaatcttttctccttctgtgacatcagtcaacactatgaccacggctttcagtacttctcagaacggttccctatctcagtcttcagtgtcacagcccacgactgagggtgccccgccctgtggtttgaacaaagaacagtcaaatcttctgcccgacaactccttaaaggtcttcaatttcaactcgtcaagtacatcacactccagtttgaaaagtccaagccacatggaaaaatacccgcaaaaagagaaaaccaaagaagatctggattcacgaagcaacctacacttgccagaaactaaattttctgaattgtcaaaactgaagaatgatgatatggaaaaggctaatcatattgaaagtgttattaaatcaaacttgccaaactgtgcaaacagtgacaccgacttcatgggtcttttcaaatcaagccggtatgacccaagcatttctttttctggaatgtcattatcagacacaatgacacttagaggaagtgtccaaaataaactcaatccccgacctggaaaggtagtgatatatagtgaacccgacgtctctgagaagtgcattgaagttttcagtgacattcaggattgcagttcttggagcctctctccagtgatactcataaaagttgttagaggatgttggattttgtatgagcaaccaaattttgaagggcactccatccccttagaagaaggagaattggaactctctggtctctggggtatagaagacattttggaaaggcacgaagaagcagagtctgataagccagtggtgattggttccatcagacatgtggttcaggattacagagttagtcacattgacttatttactgaaccagaagggttaggaatcctaagttcctactttgatgatactgaagaaatgcagggatttggtgtaatgcagaagacttgttccatgaaagtacattggggcacgtggctgatttatgaagaacctggatttcagggtgttcctttcatcctggaacctggtgaataccctgacttgtccttctgggatacagaagaagcgtacattggatccatgcggcctctgaaaatgggtggccgtaaagttgaattccctacagatccaaaggtagttgtttatgaaaagcctttctttgaaggaaaatgtgtggaactagaaacaggaatgtgtagttttgtcatggagggaggtgaaacagaagaggcgactggagacgatcatttgccgtttacgtcagtggggtctatgaaagttctaagaggcatttgggttgcatatgagaaacctggatttaccggtcatcagtatttgctagaagaaggagaatacagggactggaaagcctggggaggttacaatggagagcttcagtctttacgacctatattaggtgatttttcaaatgctcacatgataatgtacagtgaaaaaaactttggatccaaaggttccagtattgatgtattgggaattgttgctaatttaaaggagactggatatggagtgaagacacagtctattaatgtactgagtggagtatgggtagcctatgaaaatcctgacttcacaggagaacagtatatactggataaaggattttataccagttttgaggactggggaggcaaaaattgtaagatctcttctgttcaacctatatgtttggattctttcactggcccaaggagacgaaatcagattcacttgttttcagaaccacagtttcaaggtcacagtcaaagttttgaagaaacaacaagtcaaattgatgattcattttctaccaagtcttgcagagtttcaggaggcagctgggttgtatatgatggagaaaatttcactggtaatcaatacgtgttggaagaaggccattatccttgtctgtctgcaatgggatgcccgcctggagcaactttcaagtctcttcgttttatagatgttgaattttctgaaccaacaattattctctttgaaagagaagacttcaaaggaaaaaagattgaacttaatgcagaaactgtcaatctccgatccctgggattcaacacacaaatacgctctgttcaggttattggtggcatatgggttacttatgaatatggcagttacagagggcgacagttcctattgtcacctgcagaagtacctaattggtatgaattcagtggctgtcgccaaataggttctctacgaccttttgttcagaagcgaatttatttcagacttcgaaacaaagcaacagggttattcatgtcaaccaatggaaacttagaggatctgaagcttctgaggatacaggtcatggaggatgtcggggccgatgatcagatttggatctatcaagaaggatgtatcaaatgcaggatagcagaagactgctgcctgacgattgtgggcagcctggtaacatctggctccaagctaggcctggccctggaccagaatgctgacagccagttctggagcttgaagtccgatggcaggatttacagcaagttgaagccaaatttagttttagacattaaagggggcacacagtatgatcaaaatcacattatcctcaacactgtcagcaaagagaagtttacacaagtgtgggaagccatggtcctatatacctgaacaaagaaggaagaagaatcttctggaggtccttccagccaccttatttcttaaaaaggacaatgctgatggaagaccagactggaaagtggatcgactcctccttcattgattctaaattcaaccttaaatcatgctgccatgactcagagaacttactcatcgtttcaaaagactatcatagctttaaaccaataatttgtcctcctttcatttcttgcctttcatttttggtagctgcttaaacaggttgcctaattagcagcttttgggtgattttgtaaaatgttatatcaagatttcaagactgtgtacattttaaattatttccaaagatagtgacaggagagaactggaacaaatttaccaactttgtggacctacaaagcccttacactttaaagggtaagacaaaggcttaagtttgaaaggtagagaactgtttagcatctgagaagaaatactttattaggcctgtaattttggttcttggccttaaacactttctggaacctttaaatatgctgcatagcacaatgggaaagccttaggtattcacacatttaaggaactctaaacaaaatactattttcctttagttcatattaaaaattaatacattttaaaaatttaatgtcaaagtctggtaacatttgttagtaggatttgagttattattttttgagacaggatctcaggctggagtgcagtggcacaatcacggctcactgcagcctctacctccccaggctcaggtgatcctcccacctcagcctcccaagtagctgggactataggcacacatcaccaagcccagccaaattttgttttttttttgtagagatggggtttcatcacgttgcccaggctgatctcgaacctctgggctcaagcaattcactcgcctcggcctcccaaaatgctgggattacaggcctgagccactgcgcccagccaggatttgaattattttaactcatccatgggctgccctagaatgtcacaaatgagggttgtttaatgcctttcttatagctgctactggaacactattatgacctaatttatgagccatccttactcatctacaagtgctgaagcaatgttacatacttttttgctaaactcagattttttagcctaatttcttgtcctcctatccacctgcatccacacatggcctgcatggggctgccttccctgcagtgttctgcagccatgcttcagggtatagctgttggtggacagcctcaggtcttgggggcactatagccactaaacgaggtgtgaaaggctcaagaggatgaccagcaattaattatccccagaaagtgaaggaaaagagacctttagggatgttgctggtcaagtcttgatttgaccggagtcaaatcaatcttcaagcaatcttggaatcctcaactgcagtaagcatttcaaaatgcaaacaaactgcttaacaactgacaagacaccagcccatacgctgctcttccaacagtgggttctagctttgaacaaaagtgctaaacatttccttgaatatattcttcctctttttgtcctcatcactcaatactggtgctcttgtcacaggtagaacagcttgtttcttttccatctattcaagtgtgtttctaattctaaaatgctgatcttctctggagtctatggtaggcaattatggtcactggaatagtttgtcttgttttaaaatattattggtgcatgtacaacagcatccaacatatctgtcttgttcctagatatatagctctgattttaggccttttgtgcataccattacaatatggtggggtaagacattctacagtagcctgtgctgaactgatctcttaaataaacttgcttctggttaactatgttgatgaaa

SEQ ID NO: 280392 - DNA, 7544 bp, Artificial Sequence
  derived and/or modified sequence
agatgccaccaccactgccaagcagctgcattcctcgccgggaaattcctccaggcaagagaacgcagagacgcccgcccgcagtccgggggaggacgcttcaccaggtgctggccacgaacaggaggctttcctgggtgtgaggggtgcgccagggtcgcccacccaggagcggcccgcgggaggactaggcgaggcccctaacggagcccccagtgtgtgtgccgaagaaggctccctggggccccgcaacgcccgcagccagccccccaagggcgcgtctgatttgccaggtgagcctccggccgagggcgcagcgcacacggccagctccgcgcaggcagactgcacagcccgccccaagggtcacgcccaccctgctaaggtgctaactttggacatctacttgagtaagactgagggggcacaagtggacgagccggtcgtgattactcccagagcggaagattgcggtgactgggacgacatggagaagaggtccagcggccgtaggtcggggaggcggagggggtcgcagaaatccaccgactcccccggcgcggacgccgagctccctgagagcgctgccagggacgacgcggtgttcgacgacgaggtggcgccaaacgcggccagcgataacgcctcggcggaaaagaaagtgaaatctccgcgggcagccctcgacgggggcgttgcctccgctgcgagcccagagtccaagcccagccccggtaccaaagggcagctccgaggggagtcggaccggagcaaacagccacccccggcttcgtcccccacgaagaggaagggcaggagccgtgccctcgaggccgtgcccgccccgcccgccagcggcccccgggctcccgccaaggagtccccacccaagagggtgcccgatcccagcccagtcaccaagggcactgcggccgagagcggggaggaggcggcgcgggccatcccccgcgagctcccggtcaagagcagctcgctgctgccggagatcaagcccgagcacaagaggggcccgctccccaaccacttcaacggccgggcagagggaggtcgaagcagagagctgggcagagcggccggagcgcctggagcttctgacgccgacggcttgaagcccaggaaccatttcggcgtgggcaggtcgacagtgaccactaaagtgaccctccctgccaagcccaaacatgtggaactaaatcttaaaacccctaagaatcttgacagtttgggaaatgagcacaatccatttagccagccagttcacaaaggcaacactgccaccaaaatctccttatttgaaaacaaacggacaaacagtagcccaagacacactgacattcgaggccaaaggaatactcctgcctctagtaaaacgtttgttgggagggcaaagctgaatttagccaaaaaagccaaagaaatggagcaacctgaaaagaaagtaatgccaaacagtccccagaatggtgtgctggttaaggaaactgctatagaaaccaaagttaccgtctcggaagaagagattctgccagcaaccagaggaatgaatggagactcttctgagaatcaagctcttggtcctcagcctaaccaagatgataaagcagatgtacaaacagatgctggctgcctttcagaaccagtggcttctgctctgattcctgtcaaggatcataagctcttagagaaggaggactcagaggctgcagacagcaaaagccttgtacttgaaaatgtaaccgatacagcacaagacatccccaccactgtggataccaaagatttacctccaacggccatgccaaagccacagcatacattttctgactcacagtcccctgctgagtcatctcctgggccttctctttcactgtctgcacccgctcctggggatgttcccaaagacacatgtgttcaatcacccataagcagtttcccatgcactgatctaaaagtgtcagaaaaccataaaggatgtgttttgcctgtgtctcgtcagaacaatgagaaaatgccacttttagaacttggaggagaaacaacccctcctttgtccacagagcgtagtccagaagctgtgggaagtgagtgtccatccagagtcctcgtccaggtcaggtccttcgtgctccccgtggagagcacccaggatgtgagctcccaggtcatcccagagagctctgaagttagagaagtgcagttgccaacttgtcacagtaatgaacctgaagtggtttccgttgcaagttgtgctcccccacaagaggaagtactgggcaatgaacactctcattgcacagcagagctcgcggcaaaatctggcccacaagtcataccgccagcatcagagaaaactctgcctattcaggctcaaagtcagggcagcagaacacccctgatggctgaatccagtcccaccaactctcccagcagcggaaatcacttagccactcctcaaaggccagatcagactgttacaaatggccaggatagccctgccagccttttgaacatttctgctggtagtgatgatagtgtatttgattcttcttctgatatggaaaaattcactgaaattataaaacagatggatagcgcagtttgtatgcccatgaaaagaaagaaggccaggatgccaaactctcctgctcctcactttgccatgcctcctattcacgaagaccatttagaaaaggtgtttgatcccaaagtgtttacctttggtttggggaagaagaaggaaagtcagccagaaatgtcaccggctttacatttgatgcagaaccttgacacaaaatccaaactgagacccaaacgtgcatctgctgaacagagcgtcctcttcaagtccctgcacaccaacactaatgggaacagtgagcctctggtgatgccggaaatcaatgacaaagagaacagggacgtcacaaatggtggcattaagagatcgagactagaaaaaagtgcacttttctcaagcttgttatcttctttaccacaagacaaaatcttttctccttctgtgacatcagtcaacactatgaccacggctttcagtacttctcagaacggttccctatctcagtcttcagtgtcacagcccacgactgagggtgccccgccctgtggtttgaacaaagaacagtcaaatcttctgcccgacaactccttaaaggtcttcaatttcaactcgtcaagtacatcacactccagtttgaaaagtccaagccacatggaaaaatacccgcaaaaagagaaaaccaaagaagatctggattcacgaagcaacctacacttgccagaaactaaattttctgaattgtcaaaactgaagaatgatgatatggaaaaggctaatcatattgaaagtgttattaaatcaaacttgccaaactgtgcaaacagtgacaccgacttcatgggtcttttcaaatcaagccggtatgacccaagcatttctttttctggaatgtcattatcagacacaatgacacttagaggaagtgtccaaaataaactcaatccccgacctggaaaggtagtgatatatagtgaacccgacgtctctgagaagtgcattgaagttttcagtgacattcaggattgcagttcttggagcctctctccagtgatactcataaaagttgttagaggatgttggattttgtatgagcaaccaaattttgaagggcactccatccccttagaagaaggagaattggaactctctggtctctggggtatagaagacattttggaaaggcacgaagaagcagagtctgataagccagtggtgattggttccatcagacatgtggttcaggattacagagttagtcacattgacttatttactgaaccagaagggttaggaatcctaagttcctactttgatgatactgaagaaatgcagggatttggtgtaatgcagaagacttgttccatgaaagtacattggggcacgtggctgatttatgaagaacctggatttcagggtgttcctttcatcctggaacctggtgaataccctgacttgtccttctgggatacagaagaagcgtacattggatccatgcggcctctgaaaatgggtggccgtaaagttgaattccctacagatccaaaggtagttgtttatgaaaagcctttctttgaaggaaaatgtgtggaactagaaacaggaatgtgtagttttgtcatggagggaggtgaaacagaagaggcgactggagacgatcatttgccgtttacgtcagtggggtctatgaaagttctaagaggcatttgggttgcatatgagaaacctggatttaccggtcatcagtatttgctagaagaaggagaatacagggactggaaagcctggggaggttacaatggagagcttcagtctttacgacctatattaggtgatttttcaaatgctcacatgataatgtacagtgaaaaaaactttggatccaaaggttccagtattgatgtattgggaattgttgctaatttaaaggagactggatatggagtgaagacacagtctattaatgtactgagtggagtatgggtagcctatgaaaatcctgacttcacaggagaacagtatatactggataaaggattttataccagttttgaggactggggaggcaaaaattgtaagatctcttctgttcaacctatatgtttggattctttcactggcccaaggagacgaaatcagattcacttgttttcagaaccacagtttcaaggtcacagtcaaagttttgaagaaacaacaagtcaaattgatgattcattttctaccaagtcttgcagagtttcaggaggcagctgggttgtatatgatggagaaaatttcactggtaatcaatacgtgttggaagaaggccattatccttgtctgtctgcaatgggatgcccgcctggagcaactttcaagtctcttcgttttatagatgttgaattttctgaaccaacaattattctctttgaaagagaagacttcaaaggaaaaaagattgaacttaatgcagaaactgtcaatctccgatccctgggattcaacacacaaatacgctctgttcaggttattggtggcatatgggttacttatgaatatggcagttacagagggcgacagttcctattgtcacctgcagaagtacctaattggtatgaattcagtggctgtcgccaaataggttctctacgaccttttgttcagaagcgaatttatttcagacttcgaaacaaagcaacagggttattcatgtcaaccaatggaaacttagaggatctgaagcttctgaggatacaggtcatggaggatgtcggggccgatgatcagatttggatctatcaagaaggatgtatcaaatgcaggatagcagaagactgctgcctgacgattgtgggcagcctggtaacatctggctccaagctaggcctggccctggaccagaatgctgacagccagttctggagcttgaagtccgatggcaggatttacagcaagttgaagccaaatttagttttagacattaaagggggcacacagtatgatcaaaatcacattatcctcaacactgtcagcaaagagaagtttacacaagtgtgggaagccatggtcctatatacctgaacaaagaaggaagaagaatcttctggaggtccttccagccaccttatttcttaaaaaggacaatgctgatggaagaccagactggaaagtggatcgactcctccttcattgattctaaattcaaccttaaatcatgctgccatgactcagagaacttactcatcgtttcaaaagactatcatagctttaaaccaataatttgtcctcctttcatttcttgcctttcatttttggtagctgcttaaacaggttgcctaattagcagcttttgggtgattttgtaaaatgttatatcaagatttcaagactgtgtacattttaaattatttccaaagatagtgacaggagagaactggaacaaatttaccaactttgtggacctacaaagcccttacactttaaagggtaagacaaaggcttaagtttgaaaggtagagaactgtttagcatctgagaagaaatactttattaggcctgtaattttggttcttggccttaaacactttctggaacctttaaatatgctgcatagcacaatgggaaagccttaggtattcacacatttaaggaactctaaacaaaatactattttcctttagttcatattaaaaattaatacattttaaaaatttaatgtcaaagtctggtaacatttgttagtaggatttgagttattattttttgagacaggatctcaggctggagtgcagtggcacaatcacggctcactgcagcctctacctccccaggctcaggtgatcctcccacctcagcctcccaagtagctgggactataggcacacatcaccaagcccagccaaattttgttttttttttgtagagatggggtttcatcacgttgcccaggctgatctcgaacctctgggctcaagcaattcactcgcctcggcctcccaaaatgctgggattacaggcctgagccactgcgcccagccaggatttgaattattttaactcatccatgggctgccctagaatgtcacaaatgagggttgtttaatgcctttcttatagctgctactggaacactattatgacctaatttatgagccatccttactcatctacaagtgctgaagcaatgttacatacttttttgctaaactcagattttttagcctaatttcttgtcctcctatccacctgcatccacacatggcctgcatggggctgccttccctgcagtgttctgcagccatgcttcagggtatagctgttggtggacagcctcaggtcttgggggcactatagccactaaacgaggtgtgaaaggctcaagaggatgaccagcaattaattatccccagaaagtgaaggaaaagagacctttagggatgttgctggtcaagtcttgatttgaccggagtcaaatcaatcttcaagcaatcttggaatcctcaactgcagtaagcatttcaaaatgcaaacaaactgcttaacaactgacaagacaccagcccatacgctgctcttccaacagtgggttctagctttgaacaaaagtgctaaacatttccttgaatatattcttcctctttttgtcctcatcactcaatactggtgctcttgtcacaggtagaacagcttgtttcttttccatctattcaagtgtgtttctaattctaaaatgctgatcttctctggagtctatggtaggcaattatggtcactggaatagtttgtcttgttttaaaatattattggtgcatgtacaacagcatccaacatatctgtcttgttcctagatatatagctctgattttaggccttttgtgcataccattacaatatggtggggtaagacattctacagtagcctgtgctgaactgatctcttaaataaacttgcttctggttaactatg

SEQ ID NO: 280393 - DNA, 2355 bp, Artificial Sequence
  derived and/or modified sequence
tggtagagacggcaaccccgggcctgtgcccagctgaaggatgaactgagggcaggatcgttaaatgcagaagccgaagacagtggcctgggagaatctgggtccagagatgtcagctcttggaactgctttttcaagagaaggtggccgtaaagttgaattccctacagatccaaaggtagttgtttatgaaaagcctttctttgaaggaaaatgtgtggaactagaaacaggaatgtgtagttttgtcatggagggaggtgaaacagaagaggcgactggagacgatcatttgccgtttacgtcagtggggtctatgaaagttctaagaggcatttgggttgcatatgagaaacctggatttaccggtcatcagtatttgctagaagaaggagaatacagggactggaaagcctggggaggttacaatggagagcttcagtctttacgacctatattaggtgatttttcaaatgctcacatgataatgtacagtgaaaaaaactttggatccaaaggttccagtattgatgtattgggaattgttgctaatttaaaggagactggatatggagtgaagacacagtctattaatgtactgagtggagtatgggtagcctatgaaaatcctgacttcacaggagaacagtatatactggataaaggattttataccagttttgaggactggggaggcaaaaattgtaagatctcttctgttcaacctatatgtttggattctttcactggcccaaggagacgaaatcagattcacttgttttcagaaccacagtttcaaggtcacagtcaaagttttgaagaaacaacaagtcaaattgatgattcattttctaccaagtcttgcagagtttcaggaggcagctgggttgtatatgatggagaaaatttcactggtaatcaatacgtgttggaagaaggccattatccttgtctgtctgcaatgggatgcccgcctggagcaactttcaagtctcttcgttttatagatgttgaattttctgaaccaacaattattctctttgaaagagaagacttcaaaggaaaaaagattgaacttaatgcagaaactgtcaatctccgatccctgggattcaacacacaaatacgctctgttcaggttattggtggcatatgggttacttatgaatatggcagttacagagggcgacagttcctattgtcacctgcagaagtacctaattggtatgaattcagtggctgtcgccaaataggttctctacgaccttttgttcagaagcgaatttatttcagacttcgaaacaaagcaacagggttattcatgtcaaccaatggaaacttagaggatctgaagcttctgaggatacaggtcatggaggatgtcggggccgatgatcagatttggatctatcaagaaggatgtatcaaatgcaggatagcagaagactgctgcctgacgattgtgggcagcctggtaacatctggctccaagctaggcctggccctggaccagaatgctgacagccagttctggagcttgaagtccgatggcaggatttacagcaagttgaagccaaatttagttttagacattaaagggggcacacagtatgatcaaaatcacattatcctcaacactgtcagcaaagagaagtttacacaagtgtgggaagccatggtcctatatacctgaacaaagaaggaagaagaatcttctggaggtccttccagccaccttatttcttaaaaaggacaatgctgatggaagaccagactggaaagtggatcgactcctccttcattgattctaaattcaaccttaaatcatgctgccatgactcagagaacttactcatcgtttcaaaagactatcatagctttaaaccaataatttgtcctcctttcatttcttgcctttcatttttggtagctgcttaaacaggttgcctaattagcagcttttgggtgattttgtaaaatgttatatcaagatttcaagactgtgtacattttaaattatttccaaagatagtgacaggagagaactggaacaaatttaccaactttgtggacctacaaagcccttacactttaaagggtaagacaaaggcttaagtttgaaaggtagagaactgtttagcatctgagaagaaatactttattaggcctgtaattttggttcttggccttaaacactttctggaacctttaaatatgctgcatagcacaatgggaaagccttaggtattcacacatttaaggaactctaaacaaaatactattttcctttagttcatattaaaaattaatacattttaaaaatttaatgtcaaagtctggtaacatttgttagta

SEQ ID NO: 280394 - DNA, 3993 bp, Artificial Sequence
  derived and/or modified sequence
atgcccctgagcccccccgcccagggcgaccccggcgagcccagcccctgcagaccccccaagaagcacaccaccttccacctgtggagaagcaagaagaagcagcagcccgccccccccgactgcggcgtgttcgtgccccaccccctgcccgcccccgccggcgaggccagagccctggacgtggtggacggcaagtacgtggtgagagacagccaggagttccccctgcactgcggcgagagccagttcttccacaccaccagcgaggccctgggcagcctgctgctggagagcggcatcttcaagaagagcagagcccagccccccgaggacaacagaagaaagcccgtgctgggcaagctgggcaccctgttcaccgccggcagaagaagaaacagcagaaacggcctggagagccccaccagaagcaacgccaagcccctgagccccaaggacgtggtggccagccccaagctgcccgagagagagagcgagagaagcagaagccagagcagccagctgaagcagaccgacaccagcgaggagggcagccccagagagaaccccagagaggccgagggcgagctgcccgagagcggcggccccgccgccccccccgacgccgagctgagccccagatggagcagcagcgccgccgccgtggccgtgcagcagtgccacgagaacgacagcccccagctggagcccctggaggccgagggcgagcccttccccgacgccaccaccaccgccaagcagctgcacagcagccccggcaacagcagcagacaggagaacgccgagacccccgccagaagccccggcgaggacgccagccccggcgccggccacgagcaggaggccttcctgggcgtgagaggcgcccccggcagccccacccaggagagacccgccggcggcctgggcgaggcccccaacggcgcccccagcgtgtgcgccgaggagggcagcctgggccccagaaacgccagaagccagccccccaagggcgccagcgacctgcccggcgagccccccgccgagggcgccgcccacaccgccagcagcgcccaggccgactgcaccgccagacccaagggccacgcccaccccgccaaggtgctgaccctggacatctacctgagcaagaccgagggcgcccaggtggacgagcccgtggtgatcacccccagagccgaggactgcggcgactgggacgacatggagaagagaagcagcggcagaagaagcggcagaagaagaggcagccagaagagcaccgacagccccggcgccgacgccgagctgcccgagagcgccgccagagacgacgccgtgttcgacgacgaggtggcccccaacgccgccagcgacaacgccagcgccgagaagaaggtgaagagccccagagccgccctggacggcggcgtggccagcgccgccagccccgagagcaagcccagccccggcaccaagggccagctgagaggcgagagcgacagaagcaagcagcccccccccgccagcagccccaccaagagaaagggcagaagcagagccctggaggccgtgcccgccccccccgccagcggccccagagcccccgccaaggagagcccccccaagagagtgcccgaccccagccccgtgaccaagggcaccgccgccgagagcggcgaggaggccgccagagccatccccagagagctgcccgtgaagagcagcagcctgctgcccgagatcaagcccgagcacaagagaggccccctgcccaaccacttcaacggcagagccgagggcggcagaagcagagagctgggcagagccgccggcgcccccggcgccagcgacgccgacggcctgaagcccagaaaccacttcggcgtgggcagaagcaccgtgaccaccaaggtgaccctgcccgccaagcccaagcacgtggagctgaacctgaagacccccaagaacctggacagcctgggcaacgagcacaaccccttcagccagcccgtgcacaagggcaacaccgccaccaagatcagcctgttcgagaacaagagaaccaacagcagccccagacacaccgacatcagaggccagagaaacacccccgccagcagcaagaccttcgtgggcagagccaagctgaacctggccaagaaggccaaggagatggagcagcccgagaagaaggtgatgcccaacagcccccagaacggcgtgctggtgaaggagaccgccatcgagaccaaggtgaccgtgagcgaggaggagatcctgcccgccaccagaggcatgaacggcgacagcagcgagaaccaggccctgggcccccagcccaaccaggacgacaaggccgacgtgcagaccgacgccggctgcctgagcgagcccgtggccagcgccctgatccccgtgaaggaccacaagctgctggagaaggaggacagcgaggccgccgacagcaagagcctggtgctggagaacgtgaccgacaccgcccaggacatccccaccaccgtggacaccaaggacctgccccccaccgccatgcccaagccccagcacaccttcagcgacagccagagccccgccgagagcagccccggccccagcctgagcctgagcgcccccgcccccggcgacgtgcccaaggacacctgcgtgcagagccccatcagcagcttcccctgcaccgacctgaaggtgagcgagaaccacaagggctgcgtgctgcccgtgagcagacagaacaacgagaagatgcccctgctggagctgggcggcgagaccaccccccccctgagcaccgagagaagccccgaggccgtgggcagcgagtgccccagcagagtgctggtgcaggtgagaagcttcgtgctgcccgtggagagcacccaggacgtgagcagccaggtgatccccgagagcagcgaggtgagagaggtgcagctgcccacctgccacagcaacgagcccgaggtggtgagcgtggccagctgcgcccccccccaggaggaggtgctgggcaacgagcacagccactgcaccgccgagctggccgccaagagcggcccccaggtgatcccccccgccagcgagaagaccctgcccatccaggcccagagccagggcagcagaacccccctgatggccgagagcagccccaccaacagccccagcagcggcaaccacctggccaccccccagagacccgaccagaccgtgaccaacggccaggacagccccgccagcctgctgaacatcagcgccggcagcgacgacagcgtgttcgacagcagcagcgacatggagaagttcaccgagatcatcaagcagatggacagcgccgtgtgcatgcccatgaagagaaagaaggccagaatgcccaacagccccgccccccacttcgccatgccccccatccacgaggaccacctggagaaggtgttcgaccccaaggtgttcaccttcggcctgggcaagaagaaggagagccagcccgagatgagccccgccctgcacctgatgcagaacctggacaccaagagcaagctgagacccaagagagccagcgccgagcagagcgtgctgttcaagagcctgcacaccaacaccaacggcaacagcgagcccctggtgatgcccgagatcaacgacaaggagaacagagacgtgaccaacggcggcatcaagagaagcagactggagaagagcgccctgttcagcagcctgctgagcagcctgccccaggacaagatcttcagccccagcgtgaccagcgtgaacaccatgaccaccgccttcagcaccagccagaacggcagcctgagccagagcagcgtgagccagcccaccaccgagggcgcccccccctgcggcctgaacaaggagcagagcaacctgctgcccgacaacagcctgaaggtgttcaacttcaacagcagcagcaccagccacagcagcctgaagagccccagccacatgtag

SEQ ID NO: 280395 - DNA, 5172 bp, Artificial Sequence
  derived and/or modified sequence
atggagaagagaagcagcggcagaagaagcggcagaagaagaggcagccagaagagcaccgacagccccggcgccgacgccgagctgcccgagagcgccgccagagacgacgccgtgttcgacgacgaggtggcccccaacgccgccagcgacaacgccagcgccgagaagaaggtgaagagccccagagccgccctggacggcggcgtggccagcgccgccagccccgagagcaagcccagccccggcaccaagggccagctgagaggcgagagcgacagaagcaagcagcccccccccgccagcagccccaccaagagaaagggcagaagcagagccctggaggccgtgcccgccccccccgccagcggccccagagcccccgccaaggagagcccccccaagagagtgcccgaccccagccccgtgaccaagggcaccgccgccgagagcggcgaggaggccgccagagccatccccagagagctgcccgtgaagagcagcagcctgctgcccgagatcaagcccgagcacaagagaggccccctgcccaaccacttcaacggcagagccgagggcggcagaagcagagagctgggcagagccgccggcgcccccggcgccagcgacgccgacggcctgaagcccagaaaccacttcggcgtgggcagaagcaccgtgaccaccaaggtgaccctgcccgccaagcccaagcacgtggagctgaacctgaagacccccaagaacctggacagcctgggcaacgagcacaaccccttcagccagcccgtgcacaagggcaacaccgccaccaagatcagcctgttcgagaacaagagaaccaacagcagccccagacacaccgacatcagaggccagagaaacacccccgccagcagcaagaccttcgtgggcagagccaagctgaacctggccaagaaggccaaggagatggagcagcccgagaagaaggtgatgcccaacagcccccagaacggcgtgctggtgaaggagaccgccatcgagaccaaggtgaccgtgagcgaggaggagatcctgcccgccaccagaggcatgaacggcgacagcagcgagaaccaggccctgggcccccagcccaaccaggacgacaaggccgacgtgcagaccgacgccggctgcctgagcgagcccgtggccagcgccctgatccccgtgaaggaccacaagctgctggagaaggaggacagcgaggccgccgacagcaagagcctggtgctggagaacgtgaccgacaccgcccaggacatccccaccaccgtggacaccaaggacctgccccccaccgccatgcccaagccccagcacaccttcagcgacagccagagccccgccgagagcagccccggccccagcctgagcctgagcgcccccgcccccggcgacgtgcccaaggacacctgcgtgcagagccccatcagcagcttcccctgcaccgacctgaaggtgagcgagaaccacaagggctgcgtgctgcccgtgagcagacagaacaacgagaagatgcccctgctggagctgggcggcgagaccaccccccccctgagcaccgagagaagccccgaggccgtgggcagcgagtgccccagcagagtgctggtgcaggtgagaagcttcgtgctgcccgtggagagcacccaggacgtgagcagccaggtgatccccgagagcagcgaggtgagagaggtgcagctgcccacctgccacagcaacgagcccgaggtggtgagcgtggccagctgcgcccccccccaggaggaggtgctgggcaacgagcacagccactgcaccgccgagctggccgccaagagcggcccccaggtgatcccccccgccagcgagaagaccctgcccatccaggcccagagccagggcagcagaacccccctgatggccgagagcagccccaccaacagccccagcagcggcaaccacctggccaccccccagagacccgaccagaccgtgaccaacggccaggacagccccgccagcctgctgaacatcagcgccggcagcgacgacagcgtgttcgacagcagcagcgacatggagaagttcaccgagatcatcaagcagatggacagcgccgtgtgcatgcccatgaagagaaagaaggccagaatgcccaacagccccgccccccacttcgccatgccccccatccacgaggaccacctggagaaggtgttcgaccccaaggtgttcaccttcggcctgggcaagaagaaggagagccagcccgagatgagccccgccctgcacctgatgcagaacctggacaccaagagcaagctgagacccaagagagccagcgccgagcagagcgtgctgttcaagagcctgcacaccaacaccaacggcaacagcgagcccctggtgatgcccgagatcaacgacaaggagaacagagacgtgaccaacggcggcatcaagagaagcagactggagaagagcgccctgttcagcagcctgctgagcagcctgccccaggacaagatcttcagccccagcgtgaccagcgtgaacaccatgaccaccgccttcagcaccagccagaacggcagcctgagccagagcagcgtgagccagcccaccaccgagggcgcccccccctgcggcctgaacaaggagcagagcaacctgctgcccgacaacagcctgaaggtgttcaacttcaacagcagcagcaccagccacagcagcctgaagagccccagccacatggagaagtacccccagaaggagaagaccaaggaggacctggacagcagaagcaacctgcacctgcccgagaccaagttcagcgagctgagcaagctgaagaacgacgacatggagaaggccaaccacatcgagagcgtgatcaagagcaacctgcccaactgcgccaacagcgacaccgacttcatgggcctgttcaagagcagcagatacgaccccagcatcagcttcagcggcatgagcctgagcgacaccatgaccctgagaggcagcgtgcagaacaagctgaaccccagacccggcaaggtggtgatctacagcgagcccgacgtgagcgagaagtgcatcgaggtgttcagcgacatccaggactgcagcagctggagcctgagccccgtgatcctgatcaaggtggtgagaggctgctggatcctgtacgagcagcccaacttcgagggccacagcatccccctggaggagggcgagctggagctgagcggcctgtggggcatcgaggacatcctggagagacacgaggaggccgagagcgacaagcccgtggtgatcggcagcatcagacacgtggtgcaggactacagagtgagccacatcgacctgttcaccgagcccgagggcctgggcatcctgagcagctacttcgacgacaccgaggagatgcagggcttcggcgtgatgcagaagacctgcagcatgaaggtgcactggggcacctggctgatctacgaggagcccggcttccagggcgtgcccttcatcctggagcccggcgagtaccccgacctgagcttctgggacaccgaggaggcctacatcggcagcatgagacccctgaagatgggcggcagaaaggtggagttccccaccgaccccaaggtggtggtgtacgagaagcccttcttcgagggcaagtgcgtggagctggagaccggcatgtgcagcttcgtgatggagggcggcgagaccgaggaggccaccggcgacgaccacctgcccttcaccagcgtgggcagcatgaaggtgctgagaggcatctgggtggcctacgagaagcccggcttcaccggccaccagtacctgctggaggagggcgagtacagagactggaaggcctggggcggctacaacggcgagctgcagagcctgagacccatcctgggcgacttcagcaacgcccacatgatcatgtacagcgagaagaacttcggcagcaagggcagcagcatcgacgtgctgggcatcgtggccaacctgaaggagaccggctacggcgtgaagacccagagcatcaacgtgctgagcggcgtgtgggtggcctacgagaaccccgacttcaccggcgagcagtacatcctggacaagggcttctacaccagcttcgaggactggggcggcaagaactgcaagatcagcagcgtgcagcccatctgcctggacagcttcaccggccccagaagaagaaaccagatccacctgttcagcgagccccagttccagggccacagccagagcttcgaggagaccaccagccagatcgacgacagcttcagcaccaagagctgcagagtgagcggcggcagctgggtggtgtacgacggcgagaacttcaccggcaaccagtacgtgctggaggagggccactacccctgcctgagcgccatgggctgcccccccggcgccaccttcaagagcctgagattcatcgacgtggagttcagcgagcccaccatcatcctgttcgagagagaggacttcaagggcaagaagatcgagctgaacgccgagaccgtgaacctgagaagcctgggcttcaacacccagatcagaagcgtgcaggtgatcggcggcatctgggtgacctacgagtacggcagctacagaggcagacagttcctgctgagccccgccgaggtgcccaactggtacgagttcagcggctgcagacagatcggcagcctgagacccttcgtgcagaagagaatctacttcagactgagaaacaaggccaccggcctgttcatgagcaccaacggcaacctggaggacctgaagctgctgagaatccaggtgatggaggacgtgggcgccgacgaccagatctggatctaccaggagggctgcatcaagtgcagaatcgccgaggactgctgcctgaccatcgtgggcagcctggtgaccagcggcagcaagctgggcctggccctggaccagaacgccgacagccagttctggagcctgaagagcgacggcagaatctacagcaagctgaagcccaacctggtgctggacatcaagggcggcacccagtacgaccagaaccacatcatcctgaacaccgtgagcaaggagaagttcacccaggtgtgggaggccatggtgctgtacacctag

SEQ ID NO: 280396 - DNA, 1629 bp, Artificial Sequence
  derived and/or modified sequence
atgcagaagcccaagaccgtggcctgggagaacctgggccccgagatgagcgccctgggcaccgccttcagcagagagggcggcagaaaggtggagttccccaccgaccccaaggtggtggtgtacgagaagcccttcttcgagggcaagtgcgtggagctggagaccggcatgtgcagcttcgtgatggagggcggcgagaccgaggaggccaccggcgacgaccacctgcccttcaccagcgtgggcagcatgaaggtgctgagaggcatctgggtggcctacgagaagcccggcttcaccggccaccagtacctgctggaggagggcgagtacagagactggaaggcctggggcggctacaacggcgagctgcagagcctgagacccatcctgggcgacttcagcaacgcccacatgatcatgtacagcgagaagaacttcggcagcaagggcagcagcatcgacgtgctgggcatcgtggccaacctgaaggagaccggctacggcgtgaagacccagagcatcaacgtgctgagcggcgtgtgggtggcctacgagaaccccgacttcaccggcgagcagtacatcctggacaagggcttctacaccagcttcgaggactggggcggcaagaactgcaagatcagcagcgtgcagcccatctgcctggacagcttcaccggccccagaagaagaaaccagatccacctgttcagcgagccccagttccagggccacagccagagcttcgaggagaccaccagccagatcgacgacagcttcagcaccaagagctgcagagtgagcggcggcagctgggtggtgtacgacggcgagaacttcaccggcaaccagtacgtgctggaggagggccactacccctgcctgagcgccatgggctgcccccccggcgccaccttcaagagcctgagattcatcgacgtggagttcagcgagcccaccatcatcctgttcgagagagaggacttcaagggcaagaagatcgagctgaacgccgagaccgtgaacctgagaagcctgggcttcaacacccagatcagaagcgtgcaggtgatcggcggcatctgggtgacctacgagtacggcagctacagaggcagacagttcctgctgagccccgccgaggtgcccaactggtacgagttcagcggctgcagacagatcggcagcctgagacccttcgtgcagaagagaatctacttcagactgagaaacaaggccaccggcctgttcatgagcaccaacggcaacctggaggacctgaagctgctgagaatccaggtgatggaggacgtgggcgccgacgaccagatctggatctaccaggagggctgcatcaagtgcagaatcgccgaggactgctgcctgaccatcgtgggcagcctggtgaccagcggcagcaagctgggcctggccctggaccagaacgccgacagccagttctggagcctgaagagcgacggcagaatctacagcaagctgaagcccaacctggtgctggacatcaagggcggcacccagtacgaccagaaccacatcatcctgaacaccgtgagcaaggagaagttcacccaggtgtgggaggccatggtgctgtacacctag

SEQ ID NO: 280397 - protein, 166 aa, Artificial Sequence
  derived and/or modified sequence
MVEAFCATWKLTNSQNFDEYMKALGVGFATRQVGNVTKPTVIISQEGDKVVIRTLSTFKNTEISFQLGEEFDETTADDRNCKSVVSLDGDKLVHIQKWDGKETNFVREIKDGKMVMVSNDNSPFFLVFFSSPHTSHLLPSSSLLLPFFLLPSFFNNTSLARFFNYM

SEQ ID NO: 280398 - DNA, 2086 bp, Artificial Sequence
  derived and/or modified sequence
ccccgctcctgtctctaaagaggggaaagggcaaggatggtggaggctttctgtgctacctggaagctgaccaacagtcagaactttgatgagtacatgaaggctctaggcgtgggctttgccactaggcaggtgggaaatgtgaccaaaccaacggtaattatcagtcaagaaggagacaaagtggtcatcaggactctcagcacattcaagaacacggagattagtttccagctgggagaagagtttgatgaaaccactgcagatgatagaaactgtaagtctgttgttagcctggatggagacaaacttgttcacatacagaaatgggatggcaaagaaacaaattttgtaagagaaattaaggatggcaaaatggttatggtaagtaatgacaattctccattcttccttgtttttttctcctctccgcacacctctcacctccttccttcttcttccctcctccttccattcttcctccttccttccttctttaataatacatcactggcaaggttctttaactatatgtaaaacaggggaaacaaaaagatcccagttaattttcttcttcagctcaacttctttgattgtagaaaaagagaaaaattcatgtgtagttaaaaaaataaaagttgccattgatttgcctaaaactgtgtcaaaagattttttgtaggataactatggatgtctctcaaataaaatttaatataaagcccataatcactgaaatatataaagataattgctattataagagaatctcagacagatgactttatagctcctgtaataagagatctttaaacagtttatattttaatttataaagttacacaagttctgggcagataatttagaatataacagaaaagtataacaaaaaaattaaaatcccctctgatttctcatcagtgataacccttttttttttttttttttgagataaagtcttgctgtgtcacccagactggagtgcagggggtgcattcttggctcactgcaacctctgcttcatgggctcaagcgattctacaacctcagcctcctaagtagctgggaccacaggtgcaagccaccaacgccgggctaatttttttgtatttttgtagagatgggatttcgccatgttgcccaggctggcctacagctcttgagctcaaagtgatgctcccgcctgctgcctcggcctcccagagtgctgggattacaggcctgagccaaggctcccagcccccaaagagaaccattttgatgttacttctttccagtttttttctcgaatgcataatatgccttttaaacatatatattcaatactaggtagacatgaaaaatatttttttcaatcagcctcttcttacttactaggaattatctgtaaaagaggatttattagtgtcctaaggctgccacaacaaagtaccacaaacttggtggcttaaaacaacagaaatgaattttctcagttctgaaagctggacgcctgagatcaaggcgaccctagtgttgccatccttctgcgggccccctcccttgcttcttcctacttcccggatggctcctggcaatcattgaggttgttgggcttacagttgttattactctgatccatttctgactccatctttacaagactttttcctctgtttttgtcctaaattgatcaaatataaaataattaacaaataatttatctaatgatggagtagtatcacaaactaggagaaatattatgccttcaccaagccttcctcagacactttttgtgtgacctgcaatggtatattgatgatactgacataggtgggtaggctcattcaattttggaggagggtgtgagaatgctttacatagtccttgtacgatgacagcagagaaagttttgttgtttaagaatggggactcatgtttccttctccccttgactactgcaatcagcactgttctgcattgagatattcatgtttctgtggagatggaggtggggagcagagggacagttttcctttcatgttaaaggatatttgctcacatttttttggcaacaatcaataaaagaaaggactcatttctaaaa

SEQ ID NO: 280399 - DNA, 501 bp, Artificial Sequence
  derived and/or modified sequence
atggtagaggccttctgcgccacctggaagctaaccaattcccaaaacttcgacgagtacatgaaggcgttgggggtgggctttgcaactaggcaggtgggcaacgtaactaaaccgactgtaataatatctcaggaaggcgacaaggtggttattaggaccctgtcaaccttcaagaatactgagatctccttccaactgggcgaggagtttgatgagaccaccgccgacgacaggaattgtaagtccgtcgtctcccttgatggcgacaagctcgtccacatccagaagtgggatggaaaggaaaccaattttgtccgcgagattaaagacggaaaaatggtgatggtgtctaacgacaacagtcccttcttcttagtcttcttctcctcaccgcatactagccatctcctgccaagtagctcacttctgctgccctttttcttgctaccgtcatttttcaacaacaccagtctggccaggttttttaattacatgtag

SEQ ID NO: 280400 - DNA, 501 bp, Artificial Sequence
  derived and/or modified sequence
atggtggaggccttctgtgccacctggaagctgaccaacagccagaactttgatgagtacatgaaggccctgggcgtgggctttgccacccggcaggtgggcaatgtgaccaagcccaccgtcatcatcagccaggagggggacaaggtggtgatccgcaccctgagcaccttcaagaacacagagatctccttccagctgggggaggagtttgatgagaccacagcagatgacaggaactgcaagtctgtggtgtccctggatggagacaagctggtgcacatccagaagtgggatggcaaggagaccaactttgtgcgggagatcaaggatggcaagatggtgatggtgtccaatgacaacagccccttcttcctggtgttcttcagcagcccccacaccagccacctgctgcccagcagcagcctgctgctgcccttcttcctgctgcccagcttcttcaacaacaccagcctggcccgcttcttcaactacatgtag

SEQ ID NO: 280401 - DNA, 501 bp, Artificial Sequence
  derived and/or modified sequence
atggtggaggccttctgcgccacctggaagctgaccaacagccagaactttgatgagtatatgaaggccttgggcgtcggattcgccacacgacaggttgggaatgtgactaaaccaaccgtcataatcagccaggaaggagataaagtcgttattcgtaccctgagcacctttaagaacacagagattagctttcaactgggcgaagaatttgacgagacgacagccgatgataggaattgcaagagcgtcgtgtctttggatggcgacaagctggtgcatattcaaaagtgggatggtaaggagactaattttgtgagggaaattaaagatgggaaaatggtaatggtgagcaatgacaactcccccttcttcttggtgttcttcagcagccctcacacgagccatttgctgccatccagttcactgctcctcccattttttctgttaccttcatttttcaataatacttctctggcccgcttttttaattatatgtag

SEQ ID NO: 280402 - DNA, 501 bp, Artificial Sequence
  derived and/or modified sequence
atggtggaggccttttgcgctacttggaagctcaccaacagtcagaactttgatgagtacatgaaagccctgggggtgggtttcgccacccgccaggtgggtaacgtgacaaagcccacggtgataattagccaagaaggagacaaagtggttattcggaccctgtctacattcaaaaataccgagatttcgttccagctgggggaggagtttgacgagactactgccgacgacagaaactgtaaatctgtggtctctcttgatggcgataagctcgtccatattcagaagtgggatggcaaagagacaaactttgtcagagaaatcaaagacggaaaaatggtgatggtgtcgaacgacaatagtccattctttcttgtttttttctcttccccccataccagtcacttactaccgagttcatccttgttgctgccattcttcctccttccaagctttttcaacaataccagcttggccagatttttcaattacatgtag

SEQ ID NO: 280403 - DNA, 501 bp, Artificial Sequence
  derived and/or modified sequence
atggtggaggccttctgcgccacctggaagctgaccaacagccagaacttcgacgagtacatgaaggccctgggcgtgggcttcgccaccagacaggtgggcaacgtgaccaagcccaccgtgatcatcagccaggagggcgacaaggtggtgatcagaaccctgagcaccttcaagaacaccgagatcagcttccagctgggcgaggagttcgacgagaccaccgccgacgacagaaactgcaagagcgtggtgagcctggacggcgacaagctggtgcacatccagaagtgggacggcaaggagaccaacttcgtgagagagatcaaggacggcaagatggtgatggtgagcaacgacaacagccccttcttcctggtgttcttcagcagcccccacaccagccacctgctgcccagcagcagcctgctgctgcccttcttcctgctgcccagcttcttcaacaacaccagcctggccagattcttcaactacatgtag

SEQ ID NO: 280404 - protein, 453 aa, Artificial Sequence
  derived and/or modified sequence
MRVQNEGTGKSSWWIINPDGGKSGKAPRRRAVSMDNSNKYTKSRGRAAKKKAALQTAPESADDSPSQLSKWPGSPTSRSSDELDAWTDFRSRTNSNASTVSGRLSPIMASTELDEVQDDDAPLSPMLYSSSASLSPSVSKPCTVELPRLTDMAGTMNLNDGLTENLMDDLLDNITLPPSQPSPTGGLMQRSSSFPYTTKGSGLGSPTSSFNSTVFGPSSLNSLRQSPMQTIQENKPATFSSMSHYGNQTLQDLLTSDSLSHSDVMMTQSDPLMSQASTAVSAQNSRRNVMLRNDPMMSFAAQPNQGSLVNQNLLHHQHQTQGALGGSRALSNSVSNMGLSESSSLGSAKHQQQSPVSQSMQTLSDSLSGSSLYSTSANLPVMGHEKFPSDLDLDMFNGSLECDMESIIRSELMDADGLDFNFDSLISTQNVVGLNVGNFTGAKQASSQSWVPG

SEQ ID NO: 280405 - DNA, 1619 bp, Artificial Sequence
  derived and/or modified sequence
gatgtctctgaagaaaccaatgccttcttcagatccttatgggaaatttaggggacttttggattacacagtgttgccttttgctgattctaagatagagccttccaattaactccatccggcacaacctgtcactgcatagtcgattcatgcgggtccagaatgagggaactggcaagagctcttggtggatcatcaaccctgatggggggaagagcggaaaagccccccggcggcgggctgtctccatggacaatagcaacaagtataccaagagccgtggccgcgcagccaagaagaaggcagccctgcagacagcccccgaatcagctgacgacagtccctcccagctctccaagtggcctggcagccccacgtcacgcagcagtgatgagctggatgcgtggacggacttccgttcacgcaccaattctaacgccagcacagtcagtggccgcctgtcgcccatcatggcaagcacagagttggatgaagtccaggacgatgatgcgcctctctcgcccatgctctacagcagctcagccagcctgtcaccttcagtaagcaagccgtgcacggtggaactgccacggctgactgatatggcaggcaccatgaatctgaatgatgggctgactgaaaacctcatggacgacctgctggataacatcacgctcccgccatcccagccatcgcccactgggggactcatgcagcggagctctagcttcccgtataccaccaagggctcgggcctgggctccccaaccagctcctttaacagcacggtgttcggaccttcatctctgaactccctacgccagtctcccatgcagaccatccaagagaacaagccagctaccttctcttccatgtcacactatggtaaccagacactccaggacctgctcacttcggactcacttagccacagcgatgtcatgatgacacagtcggaccccttgatgtctcaggccagcaccgctgtgtctgcccagaattcccgccggaacgtgatgcttcgcaatgatccgatgatgtcctttgctgcccagcctaaccagggaagtttggtcaatcagaacttgctccaccaccagcaccaaacccagggcgctcttggtggcagccgtgccttgtcgaattctgtcagcaacatgggcttgagtgagtccagcagccttgggtcagccaaacaccagcagcagtctcctgtcagccagtctatgcaaaccctctcggactctctctcaggctcctccttgtactcaactagtgcaaacctgcccgtcatgggccatgagaagttccccagcgacttggacctggacatgtcaatgggagcttggaatgtgacatggagtccattatccgtagtgaactcatggatgctgatgggttggattttaactttgattccctcatctccacacagaatgttgttggtttgaacgtggggaacttcactggtgctaagcaggcctcatctcagagctgggtgccaggctgaaggatcactgaggaaggggaagtgggcaaagcagaccctcaaactgacacaagacctacagagaaaaccctttgccaaatctgctctcagcaagtggacagtgataccg

SEQ ID NO: 280406 - protein, 378 aa, Artificial Sequence
  derived and/or modified sequence
MDFVFNPLWKYLCLLAGKCIVLLVRPKLKPANILVMGEGPERGRVKIADMGFARLFNSPLKPLADLDPVVVTFWYRAPELLLGARHYTKAIDIWAIGCIFAELLTSEPIFHCRQEDIKTSNPFHHDQLDRIFSVMGFPADKDWEDIRKMPEYPTLQKDFRRTTYANSSLIKYMEKHKVKPDSKVFLLLQKLLTMDPTKRITSEQALQDPYFQEDPLPTLDVFAGCQIPYPKREFLNEDDPEEKGDKNQQQQQNQHQQPTAPPQQAAAPPQAPPPQQNSTQTNGTAGGAGAGVGGTGAGLQHSQDSSLNQVPPNKKPRLGPSGANSGGPVMPSDYQHSSSRLNYQSSVQGSSQSQSTLGYSSSSQQSSQYHPSHQAHRY

SEQ ID NO: 280407 - DNA, 1137 bp, Artificial Sequence
  derived and/or modified sequence
atggacttcgtgttcaaccccctgtggaagtacctgtgcctgctggccggcaagtgcatcgtgctgctggtgagacccaagctgaagcccgccaacatcctggtgatgggcgagggccccgagagaggcagagtgaagatcgccgacatgggcttcgccagactgttcaacagccccctgaagcccctggccgacctggaccccgtggtggtgaccttctggtacagagcccccgagctgctgctgggcgccagacactacaccaaggccatcgacatctgggccatcggctgcatcttcgccgagctgctgaccagcgagcccatcttccactgcagacaggaggacatcaagaccagcaaccccttccaccacgaccagctggacagaatcttcagcgtgatgggcttccccgccgacaaggactgggaggacatcagaaagatgcccgagtaccccaccctgcagaaggacttcagaagaaccacctacgccaacagcagcctgatcaagtacatggagaagcacaaggtgaagcccgacagcaaggtgttcctgctgctgcagaagctgctgaccatggaccccaccaagagaatcaccagcgagcaggccctgcaggacccctacttccaggaggaccccctgcccaccctggacgtgttcgccggctgccagatcccctaccccaagagagagttcctgaacgaggacgaccccgaggagaagggcgacaagaaccagcagcagcagcagaaccagcaccagcagcccaccgcccccccccagcaggccgccgcccccccccaggccccccccccccagcagaacagcacccagaccaacggcaccgccggcggcgccggcgccggcgtgggcggcaccggcgccggcctgcagcacagccaggacagcagcctgaaccaggtgccccccaacaagaagcccagactgggccccagcggcgccaacagcggcggccccgtgatgcccagcgactaccagcacagcagcagcagactgaactaccagagcagcgtgcagggcagcagccagagccagagcaccctgggctacagcagcagcagccagcagagcagccagtaccaccccagccaccaggcccacagatactag

SEQ ID NO: 280408 - DNA, 1448 bp, Artificial Sequence
  derived and/or modified sequence
agcttttatggttcttacctttaggtggacctcttttaaatagcatggattttgtttttaatccactatggaaatacctgtgtcttttagctggaaaatgtattgttttactcgtcaggcctaagttgaaaccagcaaatatcctagtaatgggagaaggtcctgagagggggagagtcaaaatagctgacatgggttttgccagattattcaattctcctctaaagccactagcagatttggatccagtagttgtgacattttggtatcgggctccagaacttttgcttggtgcaaggcattatacaaaggccattgatatatgggcaataggttgtatatttgctgaattgttgacttcggaacctatttttcactgtcgtcaggaagatataaaaacaagcaatccctttcatcatgatcaactggatcggatatttagtgtcatggggtttcctgcagataaagactgggaagatattagaaagatgccagaatatcccacacttcaaaaagactttagaagaacaacgtatgccaacagtagcctcataaagtacatggagaaacacaaggtcaagcctgacagcaaagtgttcctcttgcttcagaaactcctgaccatggatccaaccaagagaattacctcggagcaagctctgcaggatccctattttcaggaggaccctttgccaacattagatgtatttgccggctgccagattccataccccaaacgagaattccttaatgaagatgatcctgaagaaaaaggtgacaagaatcagcaacagcagcagaaccagcatcagcagcccacagcccctccacagcaggcagcagcccctccacaggcgcccccaccacagcagaacagcacccagaccaacgggaccgcaggtggggctggggccggggtcgggggcaccggagcagggttgcagcacagccaggactccagcctgaaccaggtgcctccaaacaagaagccacggctagggccttcaggcgcaaactcaggtggacctgtgatgccctcggattatcagcactccagttctcgcctgaattaccaaagcagcgttcagggatcctctcagtcccagagcacacttggctactcttcctcgtctcagcagagctcacagtaccacccatctcaccaggcccaccggtactgaccagctcccgttgggccaggccagcccagcccagagcacaggctccagcaatatgtctgcattgaaaagaaccaaaaaaatgcaaactatgatgccatttaaaactcatacacatgggaggaaaaccttatatactgagcattgtgcaggactgatagctcttctttattgacttaaagaagattcttgtgaagtttccccagcaccccttccctgcatgtgttccattgtgacttctctgataaagcgtctgatctaatcccagca

SEQ ID NO: 280409 - DNA, 1137 bp, Artificial Sequence
  derived and/or modified sequence
atggattttgtgtttaatcctctgtggaaatacttatgccttctggccggcaagtgtattgtgctccttgtgaggccaaaactgaagccagcaaatattcttgtgatgggagaaggccctgagcgcgggcgtgttaaaatagccgatatggggtttgcccggttatttaactcccctctcaaacccttagccgatctcgaccccgtggtcgtgacgttctggtaccgtgctccagagctcttgctgggcgctaggcactacacaaaggccatagatatatgggccatcggatgtattttcgccgaattgctgacctcggaaccaatctttcactgcagacaggaggacattaagacgtccaatcccttccaccacgatcagctcgatcgtattttttctgttatggggtttcccgctgacaaggactgggaagacatccgaaaaatgcccgagtaccctactctccagaaagactttcggaggaccacatacgctaactctagtctgattaaatacatggagaaacataaagtcaagcctgactcaaaagtgtttctcctccttcagaagctgttaaccatggatccaacaaagcgaatcactagcgagcaggcattgcaggacccatactttcaggaagatcctcttccaaccctggatgtttttgcggggtgccagattccgtaccctaaaagagagtttctaaatgaggatgaccctgaggaaaagggggataagaaccagcaacagcagcagaaccagcatcagcaaccaacagcacccccccaacaagcagcggcgccaccacaagccccgcccccgcagcagaatagcacacaaactaatggcactgctggaggagcaggggctggagtgggaggaactggcgccggcctccaacactcacaggactccagtctgaaccaagtacctcctaataagaaacccagactggggccctccggtgctaactcaggaggcccagtgatgccaagcgactatcagcattcctcctctcgcctgaattaccaatcttctgtgcagggaagctcacagtctcagagtacccttggctactcctcctcctctcagcagtcatcgcaatatcatccatctcaccaagctcatcgctattag

SEQ ID NO: 280410 - DNA, 1137 bp, Artificial Sequence
  derived and/or modified sequence
atggactttgtgttcaaccccctgtggaagtacctgtgcctgctggccggcaagtgcatcgtgctgctggtgcggcccaagctgaagccagccaacatcctggtgatgggagagggccctgagcggggccgggtgaagattgctgacatgggctttgcccggctcttcaacagccccctgaagcccctggccgacctggaccctgtggtggtgaccttctggtaccgggcccctgagctgctgctgggcgcccggcactacaccaaggccatcgacatctgggccatcggctgcatctttgctgagctgctgaccagcgagcccatcttccactgccggcaggaggacatcaagaccagcaaccccttccaccacgaccagctggaccgcatcttctctgtgatgggcttccctgctgacaaggactgggaggacatcaggaagatgcctgagtaccccaccctgcagaaggacttccggaggaccacctacgccaacagcagcctcatcaagtacatggagaagcacaaggtgaagccagacagcaaggtgttcctgctgctgcagaagctgctgaccatggaccccaccaagaggatcaccagcgagcaggccctgcaggacccctacttccaggaggaccccctgcccaccctggatgtgtttgctggctgccagatcccctaccccaagcgggagttcctgaatgaagatgatcctgaggagaagggggacaagaaccagcagcagcagcagaaccagcaccagcagcccacagccccaccccagcaggccgccgccccaccccaggcccccccaccccagcagaacagcacccagaccaacggcacagctggaggagctggggccggcgtgggcggcactggagctggcctgcagcacagccaggacagcagcctgaaccaggtgccccccaacaagaagccccggctgggccccagcggggccaacagcggcggccctgtgatgcccagcgactaccagcacagcagcagccggctgaactaccagagctctgtgcagggcagcagccagagccagagcaccctgggctacagcagcagcagccagcagagcagccagtaccaccccagccaccaggcccaccgctactag

SEQ ID NO: 280411 - DNA, 1137 bp, Artificial Sequence
  derived and/or modified sequence
atggacttcgtgttcaaccccctgtggaagtacctgtgcctgctggccgggaagtgtatcgtcctgctggtccgccctaagctcaaacccgcaaatattcttgtgatgggggaaggacccgagaggggccgggttaagatagctgatatgggcttcgctcgccttttcaactctcctcttaaaccgctggctgatctcgaccccgttgtggttacattctggtaccgggcccccgagttattattgggcgcgagacattacaccaaggctatcgatatctgggccatcggctgcattttcgccgagctcctgacatctgaacctatttttcactgcaggcaagaagatatcaagacaagtaatcctttccaccacgatcagcttgaccgaatattctcagtaatgggattccctgctgacaaagactgggaagacattcgaaagatgcctgaatacccaacattgcaaaaggattttagaaggaccacatatgccaactcttcattgatcaaatatatggaaaaacacaaggtgaaacctgattccaaggtatttcttctgcttcagaagctcctgactatggaccccacgaagcggataaccagcgaacaagcattacaggatccttactttcaggaggaccccttacccaccctggacgtgttcgccggctgccaaattccctacccaaagcgcgagtttctgaatgaggacgacccagaggagaagggggacaagaaccagcagcagcagcagaatcagcaccagcaacccaccgcacctcctcagcaagctgctgcacccccccaggctccaccgccccaacagaactctacacagactaatgggaccgcgggaggagcaggtgctggtgtgggggggaccggcgctggtttacagcatagccaggatagttcactgaatcaggtcccacctaacaaaaagccaaggctcggaccttcaggggccaattctggggggccagtcatgccgagcgactaccagcatagcagctcccggcttaactatcagtcatctgtgcagggtagtagtcagtctcaatcgactcttggctattccagctctagtcagcaatccagccagtatcacccctctcaccaggcacacaggtactag

SEQ ID NO: 280412 - DNA, 1137 bp, Artificial Sequence
  derived and/or modified sequence
atggactttgtcttcaaccctctctggaagtatttgtgtctcttagctgggaagtgtatcgtgttactggttcgccctaagttgaagcctgctaatatcctggtgatgggcgaaggacccgagagaggccgtgttaaaatcgcagatatgggttttgccaggctgtttaatagtcctctgaaacccctggccgacttggacccggtcgtcgtaaccttctggtacagagctcccgagctcctgttgggcgctcgccactacacaaaagcgattgacatatgggctatcggctgcatatttgcagaactgcttacatcggagcctatcttccactgtcgacaggaggacattaaaacctccaaccccttccatcacgaccaactggatcggatcttctctgtcatggggtttcctgccgacaaagactgggaggacattaggaagatgccagagtatcccaccctccagaaggacttccggcgaacgacttacgccaatagcagtctaatcaaatacatggaaaagcataaggtcaaacccgattcaaaagtatttctcctgttgcaaaagttgctcactatggatcctactaagcgcataacaagcgagcaggccctgcaggatccgtattttcaggaagatccccttccaaccctggacgtgttcgccggatgccagatcccatacccaaagagggagttcctgaatgaagatgatcctgaggagaagggcgataagaatcagcagcaacagcaaaaccagcaccaacagcctactgccccaccccaacaggctgctgcgcctcctcaggctccacctccacagcagaatagtacacagaccaacgggacagccggtggggctggcgcaggagtggggggtacgggagccggtctacaacattcgcaggattcatcccttaatcaagtccctcccaataaaaagccccgtctaggccctagtggagcaaactctggcggacccgtgatgcctagcgattaccagcattcatccagccgcttgaattatcagtcatccgtgcaaggaagcagtcagagtcagtccactctgggctacagttcctcaagtcagcaaagtagccagtatcaccctagccaccaggcacatcggtactag

SEQ ID NO: 280413 - protein, 696 aa, Artificial Sequence
  derived and/or modified sequence
MPKPSREQSDDETEESVKFKRLHKLVNSTRRVRKKLIRVEEMKKPSTEGGEEHVFENSPVLDERSALYSGVHKKPLFFDGSPEKPPEDDSDSLTTSPSSSSLDTWGAGRKLVKTFSKGESRGLIKPPKKMGTFFSYPEEEKAQKVSRSLTEGEMKKGLGSLSHGRTCSFGGFDLTNRSLHVGSNNSDPMGKEGDFVYKEVIKSPTASRISLGKKVKSVKETMRKRMSKKYSSSVSEQDSGLDGMPGSPPPSQPDPEHLDKPKLKAGGSVESLRSSLSGQSSMSGQTVSTTDSSTSNRESVKSEDGDDEEPPYRGPFCGRARVHTDFTPSPYDTDSLKLKKGDIIDIISKPPMGTWMGLLNNKVGTFKFIYVDVLSEDEEKPKRPTRRRRKGRPPQPKSVEDLLDRINLKEHMPTFLFNGYEDLDTFKLLEEEDLDELNIRDPEHRAVLLTAVELLQEYDSNSDQSGSQEKLLVDSQGLSGCSPRDSGCYESSENLENGKTRKASLLSAKSSTEPSLKSFSRNQLGNYPTLPLMKSGDALKQGQEEGRLGGGLAPDTSKSCDPPGVTGLNKNRRSLPVSICRSCETLEGPQTVDTWPRSHSLDDLQVEPGAEQDVPTEVTEPPPQIVPEVPQKTTASSTKAQPLEQDSAVDNALLLTQSKRFSEPQKLTTKKLEGSIAASGRGLSPPQCLPRNYDAQ

SEQ ID NO: 280414 - DNA, 2091 bp, Artificial Sequence
  derived and/or modified sequence
atgcccaagcccagcagagagcagagcgacgacgagaccgaggagagcgtgaagttcaagagactgcacaagctggtgaacagcaccagaagagtgagaaagaagctgatcagagtggaggagatgaagaagcccagcaccgagggcggcgaggagcacgtgttcgagaacagccccgtgctggacgagagaagcgccctgtacagcggcgtgcacaagaagcccctgttcttcgacggcagccccgagaagccccccgaggacgacagcgacagcctgaccaccagccccagcagcagcagcctggacacctggggcgccggcagaaagctggtgaagaccttcagcaagggcgagagcagaggcctgatcaagccccccaagaagatgggcaccttcttcagctaccccgaggaggagaaggcccagaaggtgagcagaagcctgaccgagggcgagatgaagaagggcctgggcagcctgagccacggcagaacctgcagcttcggcggcttcgacctgaccaacagaagcctgcacgtgggcagcaacaacagcgaccccatgggcaaggagggcgacttcgtgtacaaggaggtgatcaagagccccaccgccagcagaatcagcctgggcaagaaggtgaagagcgtgaaggagaccatgagaaagagaatgagcaagaagtacagcagcagcgtgagcgagcaggacagcggcctggacggcatgcccggcagccccccccccagccagcccgaccccgagcacctggacaagcccaagctgaaggccggcggcagcgtggagagcctgagaagcagcctgagcggccagagcagcatgagcggccagaccgtgagcaccaccgacagcagcaccagcaacagagagagcgtgaagagcgaggacggcgacgacgaggagcccccctacagaggccccttctgcggcagagccagagtgcacaccgacttcacccccagcccctacgacaccgacagcctgaagctgaagaagggcgacatcatcgacatcatcagcaagccccccatgggcacctggatgggcctgctgaacaacaaggtgggcaccttcaagttcatctacgtggacgtgctgagcgaggacgaggagaagcccaagagacccaccagaagaagaagaaagggcagacccccccagcccaagagcgtggaggacctgctggacagaatcaacctgaaggagcacatgcccaccttcctgttcaacggctacgaggacctggacaccttcaagctgctggaggaggaggacctggacgagctgaacatcagagaccccgagcacagagccgtgctgctgaccgccgtggagctgctgcaggagtacgacagcaacagcgaccagagcggcagccaggagaagctgctggtggacagccagggcctgagcggctgcagccccagagacagcggctgctacgagagcagcgagaacctggagaacggcaagaccagaaaggccagcctgctgagcgccaagagcagcaccgagcccagcctgaagagcttcagcagaaaccagctgggcaactaccccaccctgcccctgatgaagagcggcgacgccctgaagcagggccaggaggagggcagactgggcggcggcctggcccccgacaccagcaagagctgcgacccccccggcgtgaccggcctgaacaagaacagaagaagcctgcccgtgagcatctgcagaagctgcgagaccctggagggcccccagaccgtggacacctggcccagaagccacagcctggacgacctgcaggtggagcccggcgccgagcaggacgtgcccaccgaggtgaccgagccccccccccagatcgtgcccgaggtgccccagaagaccaccgccagcagcaccaaggcccagcccctggagcaggacagcgccgtggacaacgccctgctgctgacccagagcaagagattcagcgagccccagaagctgaccaccaagaagctggagggcagcatcgccgccagcggcagaggcctgagccccccccagtgcctgcccagaaactacgacgcccagtag

SEQ ID NO: 280415 - DNA, 2091 bp, Artificial Sequence
  derived and/or modified sequence
atgccgaagcctagtagagagcaatccgatgatgagacggaagagagcgtgaaattcaagcgattgcacaagctggttaacagtacccgccgggtcagaaaaaagcttattagagtggaggagatgaagaaaccctccacggagggcggtgaggaacacgtctttgaaaacagccccgtgctggatgagagatctgctttgtattctggcgtgcacaagaaacccctgtttttcgatggatcacctgaaaagccgccagaggatgattcagactctcttaccacatctcctagtagctcatctctggatacctggggggctggaaggaaacttgttaagacattcagcaagggcgagtccagaggcctgatcaagcccccgaagaagatgggaactttcttcagctaccctgaggaagagaaggctcagaaggtcagtcgcagcctcaccgagggggagatgaaaaagggattaggctctctctcacatggtaggacttgctcattcggcggctttgacctcactaatcggtcactccatgtagggtctaataacagtgatccaatgggaaaagagggcgactttgtatacaaggaagtgattaaaagccccacagccagtaggataagcttagggaagaaggtgaaatccgtgaaggagactatgaggaagcggatgtccaagaagtattcaagtagtgtgtccgagcaggacagtggcctggacggcatgcccggctcaccgcctccttcacagccagacccagagcacctggataagccgaaactcaaagctgggggttccgtcgaaagcctcaggagtagcttatctggccaaagtagcatgtcggggcagaccgtcagtaccacagattctagtactagcaacagggaatcagtgaaaagcgaagatggcgacgacgaagagcccccatatagggggccattttgtgggcgggcacgcgtgcacactgattttacgcctagcccatatgatactgactcactcaagctgaaaaagggagacataatcgacataatatctaaaccaccaatggggacctggatgggccttctgaataataaggtcggtacgttcaaattcatatacgtggatgtcctcagcgaggacgaggagaagccaaagcgacccaccaggaggaggaggaagggtagacctccgcaaccgaaatcggtcgaagacctgctcgaccgaatcaatctgaaggaacacatgcctacgttcttgtttaacggctatgaagatctggatacgttcaagcttctcgaggaggaagacctggatgagctgaacattagggatcctgaacacagggctgtgctgctcaccgccgtcgaactacttcaggagtatgatagtaattccgaccaatctggctcacaagaaaagcttcttgttgactcccaggggctgagcgggtgtagcccacgagacagcggctgctatgaatcttcagaaaatctggagaatgggaaaactagaaaagcctccctgctctctgccaagtcctccaccgagccgagcctaaaaagttttagccggaatcagctgggtaactatcctactttgcccctaatgaaatcgggggatgccttgaagcagggacaggaagaggggcggttgggcgggggcctcgctccagacacatctaagtcctgtgatccccccggtgttacagggctcaacaaaaaccggagatcgttgccagtctccatctgtcgctcctgcgagaccctggagggtccacaaaccgtggatacttggcccagatctcactcactggatgatcttcaagttgaacccggggccgagcaggacgtgcccacagaggtaaccgagccaccaccccagattgttcccgaagttccgcagaaaaccactgcctcctctaccaaggcccagcccctcgagcaggacagcgctgtggataacgccctactcctcactcagtccaagcgtttctccgagccccaaaaactaactactaaaaaactcgaggggtccattgccgcttcaggccgcggcttgtcccctccacagtgtctgcccaggaattacgatgcacagtag

SEQ ID NO: 280416 - DNA, 2091 bp, Artificial Sequence
  derived and/or modified sequence
atgcccaagcccagccgggagcagagtgatgatgaaacagaggagagcgtgaagttcaagaggctgcacaagctggtgaacagcacccggcgggtgaggaagaagctgatccgggtggaggagatgaagaagcccagcacagaaggaggagaggagcacgtgtttgagaacagccctgtgctggatgagaggtctgccctgtacagcggcgtgcacaagaagcccctcttctttgatggcagccctgagaagcccccagaagatgacagcgacagcctgaccaccagccccagcagcagcagcctggacacctggggcgccggcaggaagctggtgaagaccttcagcaaaggagagagccggggcctcatcaagccacccaagaagatgggcaccttcttctcctacccagaggaggagaaggcccagaaggtgagccgcagcctgacagaaggagagatgaagaagggcctgggcagcctgagccacggccgcacctgcagctttggaggctttgacctgaccaacagaagcctgcacgtgggcagcaacaacagcgaccccatgggcaaggagggggactttgtgtacaaggaggtgatcaagagccccacagccagccgcatcagcctgggcaagaaggtgaagtctgtgaaggagaccatgaggaagaggatgagcaagaagtacagcagctctgtgtctgagcaggacagcggcctggatggcatgcctggcagccccccacccagccagcctgaccctgagcacctggacaagcccaagctgaaggccggcggctctgtggagagcctgcggagcagcctgagcggccagagctccatgagcggccagacagtgtccaccacagacagcagcaccagcaaccgggagagcgtgaagtcagaagatggagatgatgaggagcccccctaccggggccccttctgtggccgggcccgggtgcacacagacttcacccccagcccctatgacacagacagcctgaagctgaagaagggggacatcatcgacatcatcagcaagccacccatgggcacctggatgggcctgctgaacaacaaggtgggcaccttcaagttcatctacgtggatgtgctgtctgaagatgaggagaagcccaagaggcccaccaggagaagaaggaagggccggcccccccagcccaagtctgtggaggacctgctggaccgcatcaacctgaaggagcacatgcccaccttcctgttcaacggctatgaggacctggacaccttcaagctgctggaggaggaggacctggatgagctgaacatccgggaccctgagcacagagctgtgctgctgacagctgtggagctgctgcaggagtatgacagcaacagcgaccagagcggcagccaggagaagctgctggtggacagccagggcctgagcggctgcagcccccgggacagcggctgctatgagagcagcgagaacctggagaatggcaagaccaggaaggccagcctgctgagcgccaagagcagcacagagcccagcctgaagagcttcagcaggaaccagctgggcaactaccccaccctgcccctgatgaagtctggagatgccctgaagcagggccaggaggagggccgcctgggcggcggcctggccccagacaccagcaagagctgtgaccccccaggagtgacaggcctgaacaagaacagaagaagcctgcctgtgtccatctgccgcagctgtgagaccctggagggcccccagacagtggacacctggcccaggagccacagcctggatgacctgcaggtggagcccggggctgagcaggatgtgcccacagaggtgacagagcccccaccccagatcgtgcctgaggtgccccagaagaccacagccagcagcaccaaggcccagcccctggagcaggacagcgctgtggacaatgccctgctgctgacccagagcaagcgcttcagcgagccccagaagctgaccaccaagaagctggagggcagcattgctgccagcggccggggcctgagccccccccagtgcctgcccagaaattatgatgcccagtag

SEQ ID NO: 280417 - DNA, 2091 bp, Artificial Sequence
  derived and/or modified sequence
atgcccaagcccagccgggagcagagcgacgacgagaccgaggagagcgtgaaatttaagcgactccataagctggtgaactctacacgtcgcgtccggaagaagctgatccgcgtcgaggagatgaaaaagcccagtaccgagggaggggaggaacacgtgtttgagaactcccctgtgctggatgagagatcagctttgtatagcggagtgcataagaaacccctatttttcgatggctcgccggaaaagcctcccgaggacgactctgattcactgaccacctctcctagtagctcatcactagacacctggggcgcaggcaggaaactcgttaagaccttctcaaaaggggagtctcggggtcttatcaagccgcccaagaaaatgggcacgtttttctcttaccctgaggaagaaaaggcccagaaggtgagcagatctttaaccgagggcgagatgaaaaaggggctaggaagtctgtcccacggtcgcacctgctcatttggaggattcgacctgaccaacaggagcctacacgtcggcagtaacaatagtgaccctatgggaaaagagggggactttgtgtacaaggaagtcattaaatcccctactgcgtccaggatatctcttggcaagaaagttaaatcggtgaaggagaccatgcgcaaacggatgtccaaaaaatatagtagctccgtgtcagagcaggactcaggattggatggcatgcccggttcgcccccgccaagccagccggatcctgaacacttggataagcccaagctgaaggccggaggatccgtggagagcctccgctcaagcctctctggccagtcctccatgtccggccaaactgtgagcaccaccgactctagtacatccaatcgagaatctgtgaaaagcgaggacggagatgacgaagagcccccttacaggggtcctttttgcggaagggcccgtgttcatacagacttcacaccttcaccttatgatacagactccctgaaactgaaaaagggtgacatcatagatattatcagtaaaccccccatgggcacatggatgggcttgcttaacaacaaggttgggaccttcaaatttatctacgtagatgtcctatcggaggatgaagaaaagcccaaaagaccaaccaggcggaggcgaaagggccgccctccacaaccaaaaagtgtcgaggatctgctggatagaattaacctcaaagagcacatgcccacttttctatttaacggttatgaagacctggacaccttcaagctgctggaagaggaagatttagatgagctgaatataagagaccctgagcatagagctgtgctgctgacagctgtagagttactgcaggaatacgacagcaactccgatcagagcgggtcacaagagaagcttctggttgacagccaggggcttagcggatgctctccccgggattcaggatgttacgagtcatcagaaaacttagaaaacggcaagacacggaaggcatccctgctctccgctaaaagctcaaccgagccatctctcaagagcttcagccgaaatcagcttggaaactaccctaccctgccactgatgaagagcggcgatgcacttaagcagggccaagaggaagggagattaggcggcgggttggctcctgatacaagtaaatcctgtgatccccccggtgtcactggcctgaacaagaatcgccggtccttgcctgtttcaatctgcaggagctgtgagaccctagagggtccacagacagtcgatacctggcccaggtcacattcactggatgatctgcaggtggagccgggggccgaacaggatgtcccgacggaagtgaccgagccgcctccccagatcgtgcccgaagttcctcaaaaaacaacagcgtctagtaccaaggcacagcctctggaacaggactctgctgtggacaatgccctgctgctcacacaaagtaaacgcttctcagaacctcaaaaacttacaactaagaaactggagggttcaattgctgcatccggcaggggcctgtccccaccccaatgtctccctcgaaactacgatgcccaatag

SEQ ID NO: 280418 - DNA, 2091 bp, Artificial Sequence
  derived and/or modified sequence
atgccaaagccttcccgcgagcagagcgatgacgagacggaggaatccgtcaaatttaaacgtctccacaagcttgtgaattctacgaggcgggtgaggaaaaagctgataagagtagaagaaatgaagaaaccttcaacggagggaggggaggaacacgtgttcgaaaacagccccgtgctggacgagcggagcgctctttactcgggtgttcacaagaaaccactattttttgatggaagccctgagaagcccccagaagacgatagtgacagcctaactactagcccatcgagcagcagtctagatacctggggagctgggaggaagctggtgaagactttctctaagggggaatcccgcggattgatcaagccccctaagaaaatgggtactttcttttcatacccggaggaggagaaggctcagaaggtaagcagatcattgacagagggcgagatgaagaagggcctgggatcactgtctcacggcagaacttgcagctttggcggattcgacctgacaaatagatcactgcatgtagggagtaacaacagcgatcccatgggaaaagagggcgacttcgtgtataaagaggtgatcaagtcgcctaccgcttctaggatctccctcgggaaaaaggttaagtccgttaaagaaacgatgcggaagcgaatgagtaagaagtacagctcttctgtcagcgaacaagacagtggtttggacggcatgcccggatccccaccaccttcccagcctgacccagagcatttggacaaacccaagttgaaggctggcggtagcgttgaaagcttgagaagtagcctgagtggccagtccagcatgagtggccagaccgtgtccaccactgatagcagtaccagcaaccgggaatccgtgaagtctgaggatggcgatgacgaggaacctccttaccgcggtcctttttgtggtagggctcgcgtgcacacagattttactccatccccgtacgatactgatagtctgaagctgaagaaaggggacattatagatatcatatctaagccacctatggggacttggatgggcctgctgaacaacaaggttggcaccttcaagtttatctacgttgacgtgttaagcgaagacgaggagaaaccgaagcggccaaccagacggcgtaggaagggacggcctccgcagccaaagtcagttgaagacttgctggatcgcatcaatcttaaagagcacatgcccacgttcctcttcaatgggtatgaggatctcgacaccttcaaacttctcgaggaagaagatctcgatgagctcaatattcgagatccagagcatagagcagtcttgttgacggccgtggaattattgcaggaatacgacagtaacagcgatcaatcgggttcacaggagaagctgcttgtggacagccaggggctgagcggctgctccccaagagacagcggctgctacgaatcctcagagaatttagagaacggtaagacccggaaggccagcttgttgtctgccaagagcagcactgaaccttcgctgaaaagcttctctagaaatcagctgggcaactatcccacactacccttgatgaagtcaggtgacgctctgaagcagggtcaggaagaaggcagacttggaggaggattggctcccgacacatccaagagttgtgatccacctggagtcaccggcttgaacaaaaatcgaaggtcattgcctgtgtccatatgtagaagctgcgagacactggaaggcccacaaacggtagatacctggccgaggtctcactcactcgacgacctgcaggtcgagcccggagcagaacaagatgttccaacagaagtgactgaaccaccgcctcaaatcgtgccagaggtcccacaaaagaccactgcaagctcaacaaaggcccaacccctggaacaggactctgcagtcgacaatgctctcctcctgacccagtcaaaacgattctccgagccacagaagctgacgacaaaaaaactggaaggctctatagcagcttccggcagaggcctgtcacctcctcaatgtctcccgaggaattacgatgctcagtag

SEQ ID NO: 280419 - DNA, 2520 bp, Artificial Sequence
  derived and/or modified sequence
gagattgcggagtttgatgctacaagagtgaagacgctctccgagtggggaggggggtgggaggtacaggacgtcttcagaattaccccttaggcttgctaaatgccgaagccgtcaagagaacaatcggatgatgagactgaggagtcggtgaagtttaagaggttacacaagctggtaaactccactcgcagagtcagaaagaaactaattagggtggaagaaatgaaaaaacccagcactgaaggtggggaggagcacgtgtttgagaattcgccggtcctggatgaacggtccgccctctactctggcgtgcacaagaagccccttttctttgatggctctcctgagaaacctcccgaagatgactcagactctctcaccacgtctccatcctccagcagcctggacacctggggggctggccggaagttggtcaaaaccttcagcaaaggagagagccggggcctgattaagccccccaagaagatggggacattcttctcctacccagaagaagaaaaggcccagaaagtgtcccgctccctcaccgagggggagatgaagaagggtctcgggtccctaagccacgggagaacctgcagttttggaggatttgacttgacgaatcgctctctgcacgttggcagtaataattctgacccaatgggtaaagaaggagactttgtgtacaaagaagtcatcaaatcacctactgcctctcgcatctctcttgggaaaaaggtgaaatcagtgaaagagacgatgagaaagagaatgtctaaaaaatacagcagctctgtctctgagcaggactcgggccttgatggaatgcctggctcccctccgccttcacagcccgaccccgaacacttggacaagcccaagctcaaggccgggggttctgtagaaagtcttcgcagttctctcagtgggcagagctccatgagcggtcaaacagtgagcaccactgattcctcaaccagcaaccgggaaagcgtcaagtcggaagatggggatgacgaagagccgccttaccgaggcccgttctgcgggcgtgccagggtgcacaccgacttcacccccagtccctatgacacagactcactcaagctcaagaaaggagatatcatcgatataatcagcaagccacccatggggacctggatgggcctgctgaacaacaaagtcggcacgttcaagttcatctacgtggacgtgctcagtgaagacgaggagaaacccaaacgccccaccaggaggcgtcggaaaggacgaccaccccagcccaagtctgtggaggatctcctggatcggattaacctaaaagagcacatgcccactttcctgttcaatggatatgaagatttggacacctttaagctgctggaggaggaagacttggatgagttaaatatcagggacccggaacacagagctgttctcttgacagcagtggagctgttacaagagtatgacagtaacagcgaccagtcaggatcccaggagaagctgctcgttgacagccagggcctgagtggatgctcaccccgagactcaggatgctacgaaagcagtgagaacctggaaaacggcaagactcggaaagctagcctcctatctgccaagtcatccaccgagcccagcttgaagtcttttagcagaaaccagttgggcaattacccaacattgcctttaatgaaatcaggggatgcactgaagcagggacaggaggagggcaggctgggtggtggccttgccccagacacgtccaagagctgtgacccacctggtgtgactggtttgaataaaaaccgaagaagcctcccagtttccatctgccggagctgtgagaccctggagggcccccagactgtggacacttggccccgatcccattccctggatgaccttcaagtggagcctggtgctgagcaagacgtgcctaccgaggtgacagaaccgccccctcagattgtacctgaagtgccacagaagacgaccgcctcttccacgaaggcccagcccctggagcaagactctgctgtcgacaatgcattgctactgacccaaagcaagagattttctgaacctcagaaattgacaactaagaaactggagggctcaatcgcagcctctggtcgcggcctgtcaccccctcagtgtttgcccagaaactatgatgctcagcctcctggagctaaacacggtttagcaaggacgcctctggagggccacagaaaaggacacgagtttgaaggaacacaccatcccctgggcaccaaagaaggggtagatgctgagcagagaatgcagcccaaaattccatcacagcctccacctgttcctgccaaaaagagcagagaacgccttgctaacggactccaccctgttcccatgggccccagtggggccctccccagtcccgatgcgccatgcctgccagtgaaaaggggcagccccgccagccccaccagccctagcgactgtcccccagcactggctcccaggcctctctca

SEQ ID NO: 280420 - protein, 485 aa, Artificial Sequence
  derived and/or modified sequence
MGCVQCKDKEATKLTEERDGSLNQSSGYRYGTDPTPQHYPSFGVTSIPNYNNFHAAGGQGLTVFGGVNSSSHTGTLRTRGGTGVTLFVALYDYEARTEEWYFGKLGRKDAERQLLSFGNPRGTFLIRESETTKGAYSLSIRDWDDMKGDHVKHYKIRKLDNGGYYITTRAQFETLQQLVQHYSEKADGLCFNLTVIASSCTPQTSGLAKDAWEVARRSLCLEKKLGQGCFAEVWLGTWNGNTKVAIKTLKPGTMSPESFLEEAQIMKKLKHDKLVQLYAVVSEEPIYIVTEYMNKGSLLDFLKDGEGRALKLPNLVDMAAQVAAGMAYIERMNYIHRDLRSANILVGNGLICKIADFGLARLIEDNEYTARQGAKFPIKWTAPEAALYGRFTIKSDVWSFGILLTELVTKGRVPYPGMNNREVLEQVERGYRMPCPQDCPISLHELMIHCWKKDPEERPTFEYLQSFLEDYFTATEPQYQPGENL

SEQ ID NO: 280421 - protein, 534 aa, Artificial Sequence
  derived and/or modified sequence
MGCVQCKDKEATKLTEERDGSLNQSSGYRYGTDPTPQHYPSFGVTSIPNYNNFHAAGGQGLTVFGGVNSSSHTGTLRTRGGTGVTLFVALYDYEARTEDDLSFHKGEKFQILNSSEGDWWEARSLTTGETGYIPSNYVAPVDSIQAEEWYFGKLGRKDAERQLLSFGNPRGTFLIRESETTKGAYSLSIRDWDDMKGDHVKHYKIRKLDNGGYYITTRAQFETLQQLVQHYSEKADGLCFNLTVIASSCTPQTSGLAKDAWEVARRSLCLEKKLGQGCFAEVWLGTWNGNTKVAIKTLKPGTMSPESFLEEAQIMKKLKHDKLVQLYAVVSEEPIYIVTEYMNKGSLLDFLKDGEGRALKLPNLVDMAAQVAAGMAYIERMNYIHRDLRSANILVGNGLICKIADFGLARLIEDNEYTARQGAKFPIKWTAPEAALYGRFTIKSDVWSFGILLTELVTKGRVPYPGMNNREVLEQVERGYRMPCPQDCPISLHELMIHCWKKDPEERPTFEYLQSFLEDYFTATEPQYQPGENL

SEQ ID NO: 280422 - protein, 232 aa, Artificial Sequence
  derived and/or modified sequence
MGCVQCKDKEATKLTEERDGSLNQSSGYRYGTDPTPQHYPSFGVTSIPNYNNFHAAGGQGLTVFGGVNSSSHTGTLRTRGGTGVTLFVALYDYEARTEDDLSFHKGEKFQILNSSEGDWWEARSLTTGETGYIPSNYVAPVDSIQAEEWYFGKLGRKDAERQLLSFGNPRGTFLIRESETTKGAYSLSIRDWDDMKGDHVKHYKIRKLDNGGYYITTRAQFETLQQLVQHYS

SEQ ID NO: 280423 - protein, 175 aa, Artificial Sequence
  derived and/or modified sequence
MGCVQCKDKEATKLTEERDGSLNQSSGYRYGTDPTPQHYPSFGVTSIPNYNNFHAAGGQGLTVFGGVNSSSHTGTLRTRGGTGVTLFVALYDYEARTEDDLSFHKGEKFQILNSSEGDWWEARSLTTGETGYIPSNYVAPVDSIQAEEWYFGKLGRKDAERQLLSFGNPRGTFLI

SEQ ID NO: 280424 - protein, 153 aa, Artificial Sequence
  derived and/or modified sequence
MGCVQCKDKEATKLTEERDGSLNQSSGYRYGTDPTPQHYPSFGVTSIPNYNNFHAAGGQGLTVFGGVNSSSHTGTLRTRGGTGVTLFVALYDYEARTEDDLSFHKGEKFQILNSSEGDWWEARSLTTGETGYIPSNYVAPVDSIQAEEWYFGK

SEQ ID NO: 280425 - protein, 145 aa, Artificial Sequence
  derived and/or modified sequence
MGCVQCKDKEATKLTEERDGSLNQSSGYRYGTDPTPQHYPSFGVTSIPNYNNFHAAGGQGLTVFGGVNSSSHTGTLRTRGGTGVTLFVALYDYEARTEDDLSFHKGEKFQILNSSEGDWWEARSLTTGETGYIPSNYVAPVDSIQ

SEQ ID NO: 280426 - protein, 485 aa, Artificial Sequence
  derived and/or modified sequence
MGCVQCKDKEATKLTEERDGSLNQSSGYRYGTDPTPQHYPSFGVTSIPNYNNFHAAGGQGLTVFGGVNSSSHTGTLRTRGGTGVTLFVALYDYEAQAEEWYFGKLGRKDAERQLLSFGNPRGTFLIRESETTKGAYSLSIRDWDDMKGDHVKHYKIRKLDNGGYYITTRAQFETLQQLVQHYSEKADGLCFNLTVIASSCTPQTSGLAKDAWEVARRSLCLEKKLGQGCFAEVWLGTWNGNTKVAIKTLKPGTMSPESFLEEAQIMKKLKHDKLVQLYAVVSEEPIYIVTEYMNKGSLLDFLKDGEGRALKLPNLVDMAAQVAAGMAYIERMNYIHRDLRSANILVGNGLICKIADFGLARLIEDNEYTARQGAKFPIKWTAPEAALYGRFTIKSDVWSFGILLTELVTKGRVPYPGMNNREVLEQVERGYRMPCPQDCPISLHELMIHCWKKDPEERPTFEYLQSFLEDYFTATEPQYQPGENL

SEQ ID NO: 280427 - DNA, 2482 bp, Artificial Sequence
  derived and/or modified sequence
gccgcgctggtggcggcggcgcgtcgttgcagttgcgccatctgtcaggagcggagccggcgaggagggggctgccgcgggcgaggaggaggggtcgccgcgagccgaaggccttcgagacccgcccgccgcccggcggcgagagtagaggcgaggttgttgtgcgagcggcgcgtcctctcccgcccgggcgcgccgcgcttctcccagcgcaccgaggaccgcccgggcgcacacaaagccgccgcccgcgccgcaccgcccggcggccgccgcccgcgccagggagggattcggccgccgggccggggacaccccggcgccgccccctcggtgctctcggaaggcccaccggctcccgggcccgccggggaccccccggagccgcctcggccgcgccggaggagggcggggagaggaccatgtgagtgggctccggagcctcagcgccgcgcagtttttttgaagaagcaggatgctgatctaaacgtggaaaaagaccagtcctgcctctgttgtagaagacatgtggtgtatataaagtttgtgatcgttggcggacattttggaatttagataatgggctgtgtgcaatgtaaggataaagaagcaacaaaactgacggaggagagggacggcagcctgaaccagagctctgggtaccgctatggcacagaccccacccctcagcactaccccagcttcggtgtgacctccatccccaactacaacaacttccacgcagccgggggccaaggactcaccgtctttggaggtgtgaactcttcgtctcatacggggaccttgcgtacgagaggaggaacaggagtgacactctttgtggccctttatgactatgaagcacggacagaagagtggtactttggaaaacttggccgaaaagatgctgagcgacagctattgtcctttggaaacccaagaggtacctttcttatccgcgagagtgaaaccaccaaaggtgcctattcactttctatccgtgattgggatgatatgaaaggagaccatgtcaaacattataaaattcgcaaacttgacaatggtggatactacattaccacccgggcccagtttgaaacacttcagcagcttgtacaacattactcagagaaagctgatggtttgtgttttaacttaactgtgattgcatcgagttgtaccccacaaacttctggattggctaaagatgcttgggaagttgcacgtcgttcgttgtgtctggagaagaagctgggtcaggggtgtttcgctgaagtgtggcttggtacctggaatggaaacacaaaagtagccataaagactcttaaaccaggcacaatgtcccccgaatcattccttgaggaagcgcagatcatgaagaagctgaagcacgacaagctggtccagctctatgcagtggtgtctgaggagcccatctacatcgtcaccgagtatatgaacaaaggaagtttactggatttcttaaaagatggagaaggaagagctctgaaattaccaaatcttgtggacatggcagcacaggtggctgcaggaatggcttacatcgagcgcatgaattatatccatagagatctgcgatcagcaaacattctagtggggaatggactcatatgcaagattgctgacttcggattggcccgattgatagaagacaatgagtacacagcaagacaaggtgcaaagttccccatcaagtggacggcccccgaggcagccctgtacgggaggttcacaatcaagtctgacgtgtggtcttttggaatcttactcacagagctggtcaccaaaggaagagtgccatacccaggcatgaacaaccgggaggtgctggagcaggtggagcgaggctacaggatgccctgcccgcaggactgccccatctctctgcatgagctcatgatccactgctggaaaaaggaccctgaagaacgccccacttttgagtacttgcagagcttcctggaagactactttaccgcgacagagccccagtaccaacctggtgaaaacctgtaaggcccgggtctgcggagagaggccttgtcccagaggctgccccacccctccccattagctttcaattccgtagccagctgctccccagcagcggaaccgcccaggatcagattgcatgtgactctgaagctgacgaacttccatggccctcattaatgacacttgtccccaaatccgaacctcctctgtgaagcattcgagacagaaccttgttatttctcagactttggaaaatgcattgtatcgatgttatgtaaaaggccaaacctctgttcagtgtaaatagttactccagtgccaacaatcctagtgctttccttttttaaaaatgcaaatcctatgtgattttaactctgtcttcacctgattcaactaaaaaaaaaaaagtattattttccaaaagtggcctctttgtctaaaacaataaaattttttttcatgtttt

SEQ ID NO: 280428 - DNA, 2573 bp, Artificial Sequence
  derived and/or modified sequence
cgagcagccgcgctggtggcggcggcgcgtcgttgcagttgcgccatctgtcaggagcggagccggcgaggagggggctgccgcgggcgaggaggaggggtcgccgcgagccgaaggccttcgagacccgcccgccgcccggcggcgagagtagaggcgaggttgttgtgcgagcggcgcgtcctctcccgcccgggcgcgccgcgcttctcccagcgcaccgaggaccgcccgggcgcacacaaagccgccgcccgcgccgcaccgcccggcggccgccgcccgcgccagggagggattcggccgccgggccggggacaccccggcgccgccccctcggtgctctcggaaggcccaccggctcccgggcccgccggggaccccccggagccgcctcggccgcgccggaggagggcggggagaggaccatgtgagtgggctccggagcctcagcgccgcgcagtttttttgaagaagcaggatgctgatctaaacgtggaaaaagaatttagataatgggctgtgtgcaatgtaaggataaagaagcaacaaaactgacggaggagagggacggcagcctgaaccagagctctgggtaccgctatggcacagaccccacccctcagcactaccccagcttcggtgtgacctccatccccaactacaacaacttccacgcagccgggggccaaggactcaccgtctttggaggtgtgaactcttcgtctcatacggggaccttgcgtacgagaggaggaacaggagtgacactctttgtggccctttatgactatgaagcacggacagaagatgacctgagttttcacaaaggagaaaaatttcaaatattgaacagctcggaaggagattggtgggaagcccgctccttgacaactggagagacaggttacattcccagcaattatgtggctccagttgactctatccaggcagaagagtggtactttggaaaacttggccgaaaagatgctgagcgacagctattgtcctttggaaacccaagaggtacctttcttatccgcgagagtgaaaccaccaaaggtgcctattcactttctatccgtgattgggatgatatgaaaggagaccatgtcaaacattataaaattcgcaaacttgacaatggtggatactacattaccacccgggcccagtttgaaacacttcagcagcttgtacaacattactcagagaaagctgatggtttgtgttttaacttaactgtgattgcatcgagttgtaccccacaaacttctggattggctaaagatgcttgggaagttgcacgtcgttcgttgtgtctggagaagaagctgggtcaggggtgtttcgctgaagtgtggcttggtacctggaatggaaacacaaaagtagccataaagactcttaaaccaggcacaatgtcccccgaatcattccttgaggaagcgcagatcatgaagaagctgaagcacgacaagctggtccagctctatgcagtggtgtctgaggagcccatctacatcgtcaccgagtatatgaacaaaggaagtttactggatttcttaaaagatggagaaggaagagctctgaaattaccaaatcttgtggacatggcagcacaggtggctgcaggaatggcttacatcgagcgcatgaattatatccatagagatctgcgatcagcaaacattctagtggggaatggactcatatgcaagattgctgacttcggattggcccgattgatagaagacaatgagtacacagcaagacaaggtgcaaagttccccatcaagtggacggcccccgaggcagccctgtacgggaggttcacaatcaagtctgacgtgtggtcttttggaatcttactcacagagctggtcaccaaaggaagagtgccatacccaggcatgaacaaccgggaggtgctggagcaggtggagcgaggctacaggatgccctgcccgcaggactgccccatctctctgcatgagctcatgatccactgctggaaaaaggaccctgaagaacgccccacttttgagtacttgcagagcttcctggaagactactttaccgcgacagagccccagtaccaacctggtgaaaacctgtaaggcccgggtctgcggagagaggccttgtcccagaggctgccccacccctccccattagctttcaattccgtagccagctgctccccagcagcggaaccgcccaggatcagattgcatgtgactctgaagctgacgaacttccatggccctcattaatgacacttgtccccaaatccgaacctcctctgtgaagcattcgagacagaaccttgttatttctcagactttggaaaatgcattgtatcgatgttatgtaaaaggccaaacctctgttcagtgtaaatagttactccagtgccaacaatcctagtgctttccttttttaaaaatgcaaatcctatgtgattttaactctgtcttcacctgattcaactaaaaaaaaaaaagtattattttccaaaagtggcctctttgtctaaaacaataaaattttttttcatgttttaacaaaaa

SEQ ID NO: 280429 - DNA, 3234 bp, Artificial Sequence
  derived and/or modified sequence
cccgggcccgccggggaccccccggagccgcctcggccgcgccggaggagggcggggagaggaccatgtgagtgggctccggagcctcagcgccgcgcagtttttttgaagaagcaggatgctgatctaaacgtggaaaaagaccagtcctgcctctgttgtagaagacatgtggtgtatataaagtttgtgatcgttggcggacattttggaatttagataatgggctgtgtgcaatgtaaggataaagaagcaacaaaactgacggaggagagggacggcagcctgaaccagagctctgggtaccgctatggcacagaccccacccctcagcactaccccagcttcggtgtgacctccatccccaactacaacaacttccacgcagccgggggccaaggactcaccgtctttggaggtgtgaactcttcgtctcatacggggaccttgcgtacgagaggaggaacaggagtgacactctttgtggccctttatgactatgaagcacggacagaagatgacctgagttttcacaaaggagaaaaatttcaaatattgaacagctcggaaggagattggtgggaagcccgctccttgacaactggagagacaggttacattcccagcaattatgtggctccagttgactctatccaggcagaagagtggtactttggaaaacttggccgaaaagatgctgagcgacagctattgtcctttggaaacccaagaggtacctttcttatccgcgagagtgaaaccaccaaaggtgcctattcactttctatccgtgattgggatgatatgaaaggagaccatgtcaaacattataaaattcgcaaacttgacaatggtggatactacattaccacccgggcccagtttgaaacacttcagcagcttgtacaacattactcagagaaagctgatggtttgtgttttaacttaactgtgattgcatcgagttgtaccccacaaacttctggattggctaaagatgcttgggaagttgcacgtcgttcgttgtgtctggagaagaagctgggtcaggggtgtttcgctgaagtgtggcttggtacctggaatggaaacacaaaagtagccataaagactcttaaaccaggcacaatgtcccccgaatcattccttgaggaagcgcagatcatgaagaagctgaagcacgacaagctggtccagctctatgcagtggtgtctgaggagcccatctacatcgtcaccgagtatatgaacaaaggaagtttactggatttcttaaaagatggagaaggaagagctctgaaattaccaaatcttgtggacatggcagcacaggtggctgcaggaatggcttacatcgagcgcatgaattatatccatagagatctgcgatcagcaaacattctagtggggaatggactcatatgcaagattgctgacttcggattggcccgattgatagaagacaatgagtacacagcaagacaaggtgcaaagttccccatcaagtggacggcccccgaggcagccctgtacgggaggttcacaatcaagtctgacgtgtggtcttttggaatcttactcacagagctggtcaccaaaggaagagtgccatacccaggcatgaacaaccgggaggtgctggagcaggtggagcgaggctacaggatgccctgcccgcaggactgccccatctctctgcatgagctcatgatccactgctggaaaaaggaccctgaagaacgccccacttttgagtacttgcagagcttcctggaagactactttaccgcgacagagccccagtaccaacctggtgaaaacctgtaaggcccgggtctgcggagagaggccttgtcccagaggctgccccacccctccccattagctttcaattccgtagccagctgctccccagcagcggaaccgcccaggatcagattgcatgtgactctgaagctgacgaacttccatggccctcattaatgacacttgtccccaaatccgaacctcctctgtgaagcattcgagacagaaccttgttatttctcagactttggaaaatgcattgtatcgatgttatgtaaaaggccaaacctctgttcagtgtaaatagttactccagtgccaacaatcctagtgctttccttttttaaaaatgcaaatcctatgtgattttaactctgtcttcacctgattcaactaaaaaaaaaaaagtattattttccaaaagtggcctctttgtctaaaacaataaaattttttttcatgttttaacaaaaaccaatcaggacaggtgtttgtttttgttttcttttttataaatatgaatatatataatatatatgtccctgtacatatacaatgtgggtgctaatgtggagactgtggccggcctgagccaccaagctgcgggacccagagggaggattttactgcaagtcagcatcaaagcaccggtgttattctgaaaacaccagtggcctcatttttggcttttgcaaagcatgaattttttcatttggattgcactttcctggttcatgactgtacctgtaggtggttgttactttgactcttttcaggaaccaccccccaagctgaatttacaagttctgttagcactatttgcttcaacttactgcgatttgttctcaaaacttaaaaataagcaagcaaatggctgatactaccaagagaactggaagatggataccacacaaacttcttgtataaaaatatgaatgctgaaatgtttcagacatttttaatttaataaacctgtaaccacatttaagtgatctaaaacccatagcattgtagtcatggcaacccgctaaactttctcatgcaactaaaatttctgggggaaatgagggtgggggttgtacatttcccattgtaaaataagtgttttaaatgtcctgtactgctaacgaatgactttctatatgtccaggagttctccagtggaataactatgcactactttacatttcatggggatgcacaaaaacaaaaaagtattacatttttagttgctgtttgtaccaaccttaaattacatatgtttaacaacaacaaatcaaaaatcctatttctattgagtttttaatactgactagcaactctgaagtcttaattccttttttgttatgatttatttgtgagtttacatttttaaattgtttaactttcttaatttagtaattaaaaagagagcattttacatttgaa

SEQ ID NO: 280430 - DNA, 2061 bp, Artificial Sequence
  derived and/or modified sequence
gaatttagataatgggctgtgtgcaatgtaaggataaagaagcaacaaaactgacggaggagagggacggcagcctgaaccagagctctgggtaccgctatggcacagaccccacccctcagcactaccccagcttcggtgtgacctccatccccaactacaacaacttccacgcagccgggggccaaggactcaccgtctttggaggtgtgaactcttcgtctcatacggggaccttgcgtacgagaggaggaacaggagtgacactctttgtggccctttatgactatgaagcacggacagaagatgacctgagttttcacaaaggagaaaaatttcaaatattgaacagctcggaaggagattggtgggaagcccgctccttgacaactggagagacaggttacattcccagcaattatgtggctccagttgactctatccaggcagaagagtggtactttggaaaacttggccgaaaagatgctgagcgacagctattgtcctttggaaacccaagaggtacctttcttatccgcgagagtgaaaccaccaaaggtgcctattcactttctatccgtgattgggatgatatgaaaggagaccatgtcaaacattataaaattcgcaaacttgacaatggtggatactacattaccacccgggcccagtttgaaacacttcagcagcttgtacaacattactcagagaaagctgatggtttgtgttttaacttaactgtgattgcatcgagttgtaccccacaaacttctggattggctaaagatgcttgggaagttgcacgtcgttcgttgtgtctggagaagaagctgggtcaggggtgtttcgctgaagtgtggcttggtacctggaatggaaacacaaaagtagccataaagactcttaaaccaggcacaatgtcccccgaatcattccttgaggaagcgcagatcatgaagaagctgaagcacgacaagctggtccagctctatgcagtggtgtctgaggagcccatctacatcgtcaccgagtatatgaacaaaggaagtttactggatttcttaaaagatggagaaggaagagctctgaaattaccaaatcttgtggacatggcagcacaggtggctgcaggaatggcttacatcgagcgcatgaattatatccatagagatctgcgatcagcaaacattctagtggggaatggactcatatgcaagattgctgacttcggattggcccgattgatagaagacaatgagtacacagcaagacaaggtgcaaagttccccatcaagtggacggcccccgaggcagccctgtacgggaggttcacaatcaagtctgacgtgtggtcttttggaatcttactcacagagctggtcaccaaaggaagagtgccatacccaggcatgaacaaccgggaggtgctggagcaggtggagcgaggctacaggatgccctgcccgcaggactgccccatctctctgcatgagctcatgatccactgctggaaaaaggaccctgaagaacgccccacttttgagtacttgcagagcttcctggaagactactttaccgcgacagagccccagtaccaacctggtgaaaacctgtaaggcccgggtctgcggagagaggccttgtcccagaggctgccccacccctccccattagctttcaattccgtagccagctgctccccagcagcggaaccgcccaggatcagattgcatgtgactctgaagctgacgaacttccatggccctcattaatgacacttgtccccaaatccgaacctcctctgtgaagcattcgagacagaaccttgttatttctcagactttggaaaatgcattgtatcgatgttatgtaaaaggccaaacctctgttcagtgtaaatagttactccagtgccaacaatcctagtgctttccttttttaaaaatgcaaatcctatgtgattttaactctgtcttcacctgattcaactaaaaaaaaaaaagtattattttccaaaagtggcctctttgtctaaaacaataaaattttttttcatgtttt

SEQ ID NO: 280431 - DNA, 2172 bp, Artificial Sequence
  derived and/or modified sequence
aacaaaagtgtctgagaaagccagagtgtgaccacgcggtttctatgctccaagggatttatttcagtggtaggtggagcagctctgtggagcacatggctaatgataatggattgactgaccagaagcaggagaggacctagcagaagccggaggtcaagctgccccaagactgggggacagcctgggtgaagactctggacctcatgaccatgtatattccagagggggatctaaagagccccagaaattcacaaaggaccagtcctgcctctgttgtagaagacatgtggtgtatataaagtttgtgatcgttggcggacattttggaatttagataatgggctgtgtgcaatgtaaggataaagaagcaacaaaactgacggaggagagggacggcagcctgaaccagagctctgggtaccgctatggcacagaccccacccctcagcactaccccagcttcggtgtgacctccatccccaactacaacaacttccacgcagccgggggccaaggactcaccgtctttggaggtgtgaactcttcgtctcatacggggaccttgcgtacgagaggaggaacaggagtgacactctttgtggccctttatgactatgaagcacaggcagaagagtggtactttggaaaacttggccgaaaagatgctgagcgacagctattgtcctttggaaacccaagaggtacctttcttatccgcgagagtgaaaccaccaaaggtgcctattcactttctatccgtgattgggatgatatgaaaggagaccatgtcaaacattataaaattcgcaaacttgacaatggtggatactacattaccacccgggcccagtttgaaacacttcagcagcttgtacaacattactcagagaaagctgatggtttgtgttttaacttaactgtgattgcatcgagttgtaccccacaaacttctggattggctaaagatgcttgggaagttgcacgtcgttcgttgtgtctggagaagaagctgggtcaggggtgtttcgctgaagtgtggcttggtacctggaatggaaacacaaaagtagccataaagactcttaaaccaggcacaatgtcccccgaatcattccttgaggaagcgcagatcatgaagaagctgaagcacgacaagctggtccagctctatgcagtggtgtctgaggagcccatctacatcgtcaccgagtatatgaacaaaggaagtttactggatttcttaaaagatggagaaggaagagctctgaaattaccaaatcttgtggacatggcagcacaggtggctgcaggaatggcttacatcgagcgcatgaattatatccatagagatctgcgatcagcaaacattctagtggggaatggactcatatgcaagattgctgacttcggattggcccgattgatagaagacaatgagtacacagcaagacaaggtgcaaagttccccatcaagtggacggcccccgaggcagccctgtacgggaggttcacaatcaagtctgacgtgtggtcttttggaatcttactcacagagctggtcaccaaaggaagagtgccatacccaggcatgaacaaccgggaggtgctggagcaggtggagcgaggctacaggatgccctgcccgcaggactgccccatctctctgcatgagctcatgatccactgctggaaaaaggaccctgaagaacgccccacttttgagtacttgcagagcttcctggaagactactttaccgcgacagagccccagtaccaacctggtgaaaacctgtaaggcccgggtctgcggagagaggccttgtcccagaggctgccccacccctccccattagctttcaattccgtagccagctgctccccagcagcggaaccgcccaggatcagattgcatgtgactctgaagctgacgaacttccatggccctcattaatgacacttgtccccaaatccgaacctcctctgtgaagcattcgagacagaaccttgttatttctcagactttggaaaatgcattgtatcgatgttatgtaaaaggccaaacctctgttcagtgtaaatagttactccagtgccaacaatcctagtgctttccttttttaaaaatgcaaatcctatgtgattttaactctgtcttcacctgattcaact

SEQ ID NO: 280432 - DNA, 1458 bp, Artificial Sequence
  derived and/or modified sequence
atgggctgcgtgcagtgtaaagataaagaggccaccaagctaacggaggagcgtgacggaagcctgaaccagtcatctggatacaggtacggaaccgatcctacaccgcagcattaccctagtttcggcgtgaccagtatccccaactacaataattttcacgcagcgggaggtcaaggcctgaccgtttttggcggtgtgaactcctcttcccacacaggtactctgagaacgaggggtgggaccggggtcactttgttcgtggccctctatgattacgaggcacggaccgaggaatggtatttcggcaagctcgggaggaaagatgcggagcgacaactgctgtcgtttggaaacccacgtggcacattcctgattcgcgaatccgaaaccacaaagggggcatacagtctgagtattcgagattgggacgacatgaagggcgatcacgtgaagcattataagatccgcaaacttgacaacgggggctactacatcaccacaagagcacagttcgagaccttacagcagctggtccaacattacagtgaaaaagccgacgggctctgcttcaacctaactgtgatcgcgtcttcctgtacgccccagaccagcgggcttgccaaggatgcatgggaggtcgcccgacgcagcctgtgcctcgagaaaaaactcggacaaggctgctttgctgaggtgtggctcgggacttggaatggaaatacaaaagttgccatcaagacgctaaagcccggcactatgtcacctgagtcctttctagaggaggctcagatcatgaaaaagttaaaacacgacaaactggtccagctctacgctgttgtgtccgaggaacctatatatattgttacagagtatatgaacaaaggctcgctcttagattttttaaaggacggagaagggcgggcattaaaactccccaacctcgtcgacatggccgcccaggttgctgcaggtatggcttatattgagaggatgaattatattcatagggacctgcgttccgctaacatcctggtcggcaacggactcatttgcaagatcgccgactttggcctagccaggctcatcgaggacaacgaatatactgcgagacagggcgcaaagtttccaatcaaatggacagctcctgaagccgctctctacggacggttcacgattaaatcagatgtgtggtctttcgggattctcctgacagaactggtaacgaaaggcagagtgccttaccccggaatgaacaatcgggaggtcttggagcaggtcgagcggggctataggatgccttgtccccaagactgccccatatccctacatgagctgatgattcattgttggaagaaagacccagaagaaaggcccacattcgagtacctccagagcttcctggaggactactttaccgcgaccgaaccgcagtaccagcctggggaaaatttgtag

SEQ ID NO: 280433 - DNA, 1605 bp, Artificial Sequence
  derived and/or modified sequence
atgggttgcgtgcaatgcaaggataaagaggctaccaagctgactgaggagcgggacggatccctaaaccagagctccggctatagatatggtacggacccaacccctcagcactatcccagcttcggagtgacctctattcctaattacaataactttcatgctgcaggggggcaaggtctcaccgtcttcggaggcgtgaattccagctcccatacagggactctgcggactcggggcggaacaggcgtcacactgtttgttgcactgtatgattatgaggcaagaacggaagacgacttgagctttcataagggtgagaaatttcaaatcctgaattcatctgaaggcgattggtgggaggctaggtccttgaccacgggtgaaactggatacattccctcaaactatgtggccccagtagattcaatacaggccgaggaatggtatttcggaaaactggggcggaaggacgcggaacgtcagcttctttctttcggaaacccacggggcacatttctgatccgggagtccgagactaccaagggtgcctattcattgtctattagagattgggacgacatgaaaggtgatcatgtgaagcactataagataaggaaactagacaacggcggctactatattacaacaagggcacagttcgaaaccctccaacagttggttcaacactattccgagaaggcagatggactgtgttttaacctgaccgtcatcgctagctcctgtacgccccagacaagcggccttgcaaaagatgcatgggaggtcgctagacgttctctgtgcctggaaaaaaagcttggtcagggctgcttcgcagaagtctggcttgggacttggaatggcaacacaaaggttgccataaagaccctcaagcccgggaccatgtccccagaatccttcctcgaagaggctcaaattatgaaaaagctgaagcacgacaaactagttcaactttatgctgtggtatctgaggagcctatttatatcgtgactgagtatatgaacaaagggagtctgttggattttctgaaggatggagagggtcgtgccttaaaattgccaaacctcgtggacatggccgcccaggtagctgcaggaatggcttacatcgaacggatgaattatatccaccgggatcttagatcagctaatatactcgtcggaaatggtttgatatgtaaaatcgctgactttggtctcgcccgtttaattgaggacaatgaatataccgccagacagggtgccaagtttcctatcaaatggacagcgcctgaggcagccctctatggcaggtttacaataaagtcggacgtgtggtcatttggaatccttctcaccgaacttgttaccaagggtcgcgtcccataccccgggatgaacaatcgtgaggtgctagagcaggtggagcgtggctaccggatgccgtgcccccaggactgtcctatcagtcttcacgagctgatgatccactgctggaagaaggatccggaggaaaggccgacattcgagtacctgcagtcctttctcgaagactactttaccgccaccgaaccccagtaccagcccggtgagaacttatag

SEQ ID NO: 280434 - DNA, 1605 bp, Artificial Sequence
  derived and/or modified sequence
atgggttgtgtacagtgtaaggacaaggaagccaccaagctcacagaagagcgcgatgggtcattgaatcagagttccggatacaggtacggaactgaccctacgccacagcactacccgtcatttggtgtcacgtccattccaaactacaataacttccatgccgccgggggccagggtctgaccgtttttggtggcgttaatagcagtagccatacgggcaccttacggacaagaggaggaactggagtcaccctttttgtagctctgtatgattatgaagcccgaacagaggacgatctttcttttcataagggcgagaagttccaaattctcaattcctctgagggcgactggtgggaggcacgaagcctgacgacgggcgaaactggctatattccatctaattacgtggcacccgtagactctattcaggctgaggaatggtactttggcaaactgggacgcaaggacgccgaaaggcagctgttatcctttgggaaccccagaggaacatttctcattcgcgagtcagaaaccaccaagggcgcttacagcctctccattcgagactgggatgatatgaagggtgatcatgtcaagcattataaaattcgcaagctcgacaacggtgggtactacataactacccgcgctcagttcgagactctccagcaactagttcagcactactccgagaaggccgacggcttatgcttcaatctgactgtgattgccagttcttgcactccgcaaacctctgggctggccaaggacgcctgggaggtggcaagaagaagcctttgcctggagaaaaagctcggtcagggatgttttgcagaagtatggctgggaacatggaatgggaacaccaaggtagctattaaaacacttaaaccggggacaatgagcccagagtcattcctggaggaagcccaaatcatgaagaagcttaaacatgataaactggtgcaactgtatgccgtagtgtctgaggaacccatttatattgtaacagagtacatgaacaaagggagtctcctagattttctgaaggatggcgaaggccgagcactcaaactgccaaatctagtggacatggccgctcaggtcgcagctgggatggcctacattgagagaatgaactacattcacagagacctccgaagtgccaatattctggtcggaaacgggctgatctgtaaaatcgccgattttggcctggcgcgcttgatcgaggacaatgagtatacagctagacagggcgctaagtttcccattaagtggaccgcacccgaagctgcactttatggccggtttaccataaagagcgatgtgtggagttttggcatcctcctgacggaactggtcacaaagggtagagtgccgtacccgggcatgaacaatcgcgaggtgcttgaacaggtggagcgtggttaccggatgccctgcccgcaggactgtcctatatccctacatgagctcatgatacactgttggaaaaaggacccagaagagcgcccgacctttgagtacctacagagctttctggaggactatttcacagccactgaaccacagtatcagcccggcgaaaacctgtag

SEQ ID NO: 280435 - DNA, 1605 bp, Artificial Sequence
  derived and/or modified sequence
atgggctgcgtccagtgtaaggacaaggaggcaacaaaattaacggaagaacgcgacgggtcgctcaaccagagctcagggtatagatatggcacagaccctaccccacagcattatcctagtttcggagttacctccatcccaaattataacaactttcatgcagccggaggacaaggtctcactgtgttcggaggcgtgaattccagctctcacactggaacactgaggacacggggagggaccggggtaactctgttcgtggccctgtatgattacgaagccagaactgaagacgatctgtcattccacaaaggggaaaaattccaaatcttgaacagctcagagggcgactggtgggaagctcgttctctgacaaccggcgagactgggtacatcccctccaactacgttgcgcccgtggattcaatccaagcggaggagtggtacttcgggaagctaggtcgaaaggacgcggagcgacagctgctgagtttcggcaacccaagaggtactttcctgatccgcgaaagcgaaacaacaaagggagcctattcattgtccatccgcgattgggacgatatgaagggcgatcatgtgaaacattacaagatcagaaagctcgacaacgggggctattacattaccacccgggctcagtttgagacgctgcaacagctagttcagcactattcagagaaagccgacgggctatgtttcaacttgaccgtgatagcgagttcatgcactccccagactagtggcctcgctaaggatgcctgggaagtggcccgtcggtccctctgcttagaaaaaaagctcgggcaggggtgcttcgccgaggtgtggctgggcacatggaatggaaatacaaaggtggcaattaaaacactgaaacctggaactatgtcacctgaatcctttcttgaagaagcccagataatgaagaagttaaagcatgataaactggtccaattatatgccgtagtgtccgaggagcccatctacattgtgactgagtacatgaataaaggctcactgctggacttcctgaaagatggtgaggggcgcgccctgaagctgcccaatttggtcgatatggccgctcaggtggccgctggtatggcttacatcgagcggatgaactatattcaccgggatttgagatccgccaacatcctcgtgggtaacggtctgatttgtaagattgccgacttcgggctggcacggctgattgaagacaatgagtataccgccagacagggcgcaaaattcccgataaagtggacggcaccagaagctgcgttatatgggcggttcaccattaagtccgatgtatggtccttcgggatcctgctgaccgagcttgttacaaaggggcgcgttccctatccaggaatgaacaaccgggaagtgttagaacaggtcgaaaggggatatcgcatgccatgcccgcaggattgccctatatctctccatgagcttatgattcactgttggaagaaggaccccgaggaacggccaacctttgagtatctgcaaagcttcctcgaggattattttacagctaccgaacctcaataccagcccggcgaaaatttatag

SEQ ID NO: 280436 - DNA, 1458 bp, Artificial Sequence
  derived and/or modified sequence
atgggctgcgtccagtgcaaagataaagaagctactaagctaaccgaagaaagagacggatctctgaatcagtctagcggctatcggtacggcaccgatcctacgccccagcactacccatcattcggagtgaccagtattcctaactataacaattttcatgcagctggcggacaagggctaacagttttcggcggcgtgaactcttcaagccacacggggaccctcagaacgcggggtggaacaggggtgactctgttcgtcgcactgtatgactacgaggcccaggccgaggaatggtatttcggaaaactgggtcggaaggatgcagagaggcaactactgagcttcgggaacccacggggcaccttccttattcgtgaatcagagacaacaaagggcgcctacagcctttccattagagattgggacgacatgaagggcgatcacgtgaagcactacaaaattcgcaagctggacaacggaggttactacataacaactagagcccagtttgagaccctgcagcagctggttcagcactattccgagaaagcagacggattgtgctttaatctgactgtcatcgcttcttcgtgtacccctcagacaagcggcctggccaaagacgcctgggaggtggcgaggcgctctctgtgcctggagaaaaagctcggccagggatgcttcgccgaggtgtggctgggtacatggaacggaaatacgaaagtcgctatcaaaacactgaaaccaggcacaatgagtccagagtctttcctagaggaagcacagatcatgaagaaattaaagcatgacaagctcgtgcaactctatgctgtggtgagcgaagaaccaatttacatagttacggagtatatgaataaagggtcacttctagactttctgaaggacggcgaaggacgcgccttgaaactcccaaatctggtcgatatggccgctcaggtcgccgctgggatggcttatattgaaagaatgaattacattcacagggaccttcgatccgccaatatcttggtaggaaatggcttaatctgcaagatcgccgactttggcctagccaggctcatcgaagataatgaatatacagcccggcagggcgctaaattcccgatcaagtggaccgcccctgaggccgctctgtatggccggtttaccataaagagcgatgtgtggtccttcggaatcctgctgaccgagctggttactaaaggccgcgtgccctacccgggcatgaacaatcgtgaagtgctggagcaggtggagcgtggctaccggatgccctgcccgcaagattgtcccatttcattgcatgagctgatgattcactgctggaagaaagaccccgaggagcggccaaccttcgaatacctccagagctttctcgaagattacttcactgcgactgaaccccagtatcaacccggggaaaatttgtag

SEQ ID NO: 280437 - DNA, 1458 bp, Artificial Sequence
  derived and/or modified sequence
atgggctgtgtgcagtgcaaggacaaggaggccaccaagctgacagaggagagagatggcagcctgaaccagagcagcggctaccgctatggaacagaccccaccccccagcactaccccagctttggagtgaccagcatccccaactacaacaacttccacgccgccggcggccagggcctgactgtgtttggaggagtgaacagcagcagccacacaggcaccctgcggacccggggcggcaccggggtgaccctgtttgtggccctgtatgactatgaggccaggacagaggagtggtactttgggaagctgggcaggaaggatgctgagcggcagctgctgagctttggaaacccccggggcaccttcctgatccgggagagcgagaccaccaagggggcctacagcctgagcatccgggactgggatgacatgaagggggaccacgtgaagcactacaagatcaggaagctggacaatggaggctactacatcaccacccgggcccagtttgagaccctgcagcagctggtgcagcactacagcgagaaggcagatggcctgtgcttcaacctgaccgtcatcgccagcagctgcaccccccagaccagcggcctggccaaggatgcctgggaggtggcccggcgcagcctgtgcctggagaagaagctgggccagggctgctttgctgaggtgtggctgggcacctggaatggaaacaccaaggtggccatcaagaccctgaagccaggcaccatgagccctgagagcttcctggaggaggcccagatcatgaagaagctgaagcatgacaagctggtgcagctgtatgctgtggtgtctgaggagcccatctacatcgtgacagagtacatgaacaagggcagcctgctggacttcctgaaggatggagagggccgggccctgaagctgcccaacctggtggacatggccgcccaggtggccgccggcatggcctacattgaaagaatgaactacatccaccgggacctgcggagcgccaacatcctggtgggcaatggcctcatctgcaagattgctgactttggcctggcccggctgattgaggacaatgagtacacagcccggcagggcgccaagttccccatcaagtggacagcccctgaggccgccctgtatggccgcttcaccatcaagagtgatgtgtggagctttggcatcctgctgacagagctggtgaccaagggccgggtgccctacccaggcatgaacaaccgggaggtgctggagcaggtggagcggggctacaggatgccctgcccccaggactgccccatcagcctgcacgagctgatgatccactgctggaagaaggaccctgaggagcggcccacctttgagtacctgcagagcttcctggaggactacttcaccgccacagagccccagtaccagcctggagagaacctgtag

SEQ ID NO: 280438 - DNA, 1605 bp, Artificial Sequence
  derived and/or modified sequence
atgggctgtgtgcagtgcaaggacaaggaggccaccaagctgacagaggagagagatggcagcctgaaccagagcagcggctaccgctatggaacagaccccaccccccagcactaccccagctttggagtgaccagcatccccaactacaacaacttccacgccgccggcggccagggcctgactgtgtttggaggagtgaacagcagcagccacacaggcaccctgcggacccggggcggcaccggggtgaccctgtttgtggccctgtatgactatgaggccaggacagaagatgacctgtccttccacaagggggagaagttccagatcctgaacagcagcgagggggactggtgggaggcccggagcctgaccactggagagaccggctacatccccagcaactacgtggcccctgtggacagcatccaggccgaggagtggtactttgggaagctgggcaggaaggatgctgagcggcagctgctgagctttggaaacccccggggcaccttcctgatccgggagagcgagaccaccaagggggcctacagcctgagcatccgggactgggatgacatgaagggggaccacgtgaagcactacaagatcaggaagctggacaatggaggctactacatcaccacccgggcccagtttgagaccctgcagcagctggtgcagcactacagcgagaaggcagatggcctgtgcttcaacctgactgtgattgccagcagctgcaccccccagaccagcggcctggccaaggatgcctgggaggtggcccggcgcagcctgtgcctggagaagaagctgggccagggctgctttgctgaggtgtggctgggcacctggaatggaaacaccaaggtggccatcaagaccctgaagccaggcaccatgagccctgagagcttcctggaggaggcccagatcatgaagaagctgaagcatgacaagctggtgcagctgtatgctgtggtgtctgaggagcccatctacatcgtgacagagtacatgaacaagggcagcctgctggacttcctgaaggatggagagggccgggccctgaagctgcccaacctggtggacatggccgcccaggtggccgccggcatggcctacatcgagaggatgaactacatccaccgggacctgcggagcgccaacatcctggtgggcaatggcctcatctgcaagattgctgactttggcctggcccggctgattgaagataatgagtacacagcccggcagggcgccaagttccccatcaagtggacagcccctgaggccgccctgtatggccgcttcaccatcaagagtgatgtgtggagctttggcatcctgctgacagagctggtgaccaagggccgggtgccctacccaggcatgaacaaccgggaggtgctggagcaggtggagcggggctacaggatgccctgcccccaggactgccccatcagcctgcacgagctgatgatccactgctggaagaaggaccctgaggagcggcccacctttgagtacctgcagagcttcctggaggactacttcaccgccacagagccccagtaccagcccggggagaacctgtag

SEQ ID NO: 280439 - DNA, 1458 bp, Artificial Sequence
  derived and/or modified sequence
atgggctgtgtgcagtgcaaggacaaggaggccaccaagctgacagaggagagagatggcagcctgaaccagagcagcggctaccgctatggaacagaccccaccccccagcactaccccagctttggagtgaccagcatccccaactacaacaacttccacgccgccggcggccagggcctgactgtgtttggaggagtgaacagcagcagccacacaggcaccctgcggacccggggcggcaccggggtgaccctgtttgtggccctgtatgactatgaggcccaggccgaggagtggtactttgggaagctgggcaggaaggatgctgagcggcagctgctgagctttggaaacccccggggcaccttcctgatccgggagagcgagaccaccaagggggcctacagcctgagcatccgggactgggatgacatgaagggggaccacgtgaagcactacaagatcaggaagctggacaatggaggctactacatcaccacccgggcccagtttgagaccctgcagcagctggtgcagcactacagcgagaaggcagatggcctgtgcttcaacctgaccgtcatcgccagcagctgcaccccccagaccagcggcctggccaaggatgcctgggaggtggcccggcgcagcctgtgcctggagaagaagctgggccagggctgctttgctgaggtgtggctgggcacctggaatggaaacaccaaggtggccatcaagaccctgaagccaggcaccatgagccctgagagcttcctggaggaggcccagatcatgaagaagctgaagcatgacaagctggtgcagctgtatgctgtggtgtctgaggagcccatctacatcgtgacagagtacatgaacaagggcagcctgctggacttcctgaaggatggagagggccgggccctgaagctgcccaacctggtggacatggccgcccaggtggccgccggcatggcctacattgaaagaatgaactacatccaccgggacctgcggagcgccaacatcctggtgggcaatggcctcatctgcaagattgctgactttggcctggcccggctgattgaggacaatgagtacacagcccggcagggcgccaagttccccatcaagtggacagcccctgaggccgccctgtatggccgcttcaccatcaagagtgatgtgtggagctttggcatcctgctgacagagctggtgaccaagggccgggtgccctacccaggcatgaacaaccgggaggtgctggagcaggtggagcggggctacaggatgccctgcccccaggactgccccatcagcctgcacgagctgatgatccactgctggaagaaggaccctgaggagcggcccacctttgagtacctgcagagcttcctggaggactacttcaccgccacagagccccagtaccagcctggagagaacctgtag

SEQ ID NO: 280440 - DNA, 1458 bp, Artificial Sequence
  derived and/or modified sequence
atgggctgcgtgcagtgcaaggacaaggaggccaccaagctgaccgaagagcgggacggcagcctgaatcaaagctcaggttatcggtatggcactgatcccacgcctcaacactacccatctttcggtgttacctccatccccaactacaacaactttcacgccgccgggggtcagggcctgacggtctttgggggagtgaatagcagttcacatacgggtactttacgaacacggggcggaaccggggtgaccttgtttgtcgctctgtatgactacgaggctagaacggaggagtggtactttgggaagctgggaaggaaggacgccgagcggcaacttctgagctttgggaatccaagaggaacgtttctcatccgggagagcgaaaccacaaaaggtgcatactcgctgagtatcagagattgggatgatatgaagggcgatcacgtcaagcactacaaaataagaaaacttgacaatggaggatactatataactactcgcgcccagttcgagaccttgcagcagctggtccagcattactccgagaaagctgatggcctgtgtttcaacctgacggtaattgcatcaagctgcacaccgcaaacgtctggcctggcaaaggacgcctgggaggttgcacggaggtcactttgcctggagaagaagctgggacaggggtgcttcgccgaagtgtggctggggacctggaatgggaatactaaggtggcaatcaagacactgaaacccggcacaatgtcacccgaaagctttctagaggaagcccaaatcatgaaaaaattgaagcatgacaagctagtccagttatatgcagtcgtgtccgaagagcccatatacatagtgaccgagtatatgaataaaggcagccttctagattttctgaaagatggggagggacgggccctaaaacttccaaatctggtggacatggccgcacaggttgccgccggtatggcttatatcgagcgcatgaattacatacacagagatctcagatccgcaaacatcctcgtcggtaacgggttgatatgcaaaattgcggacttcgggcttgcccggctcattgaagataacgagtataccgcccgtcagggggcgaagtttcctattaaatggacggcccccgaggccgccctttatggccgctttacaatcaagagcgatgtgtggtccttcggaatcctcttaaccgagttggttacgaaaggccgggtcccctaccccggcatgaataatcgggaggtgctggaacaagtcgagcgcggatatcgcatgccctgcccccaggattgccctattagcctccacgaactgatgatccattgttggaaaaaagaccccgaggagcgccctacattcgaatacttgcagtcttttttggaggattatttcacggcgaccgagccccaatatcagcctggagaaaacttgtag

SEQ ID NO: 280441 - DNA, 1605 bp, Artificial Sequence
  derived and/or modified sequence
atgggctgcgtgcagtgcaaggacaaggaggccaccaagctgaccgaagaacgcgacgggagtttaaaccagagctccggctatagatacggcacagatcctactccacagcattacccctcatttggcgtgacttctatcccgaattataacaacttccatgctgctggcggccaggggctaaccgtgtttgggggggttaacagcagctcgcatacaggcaccctgaggactaggggcggcacaggggtcacactgtttgtggctctgtacgattatgaagcccgcaccgaggacgacctctcctttcacaaaggcgagaagtttcagatacttaactcatcggaaggtgactggtgggaggctagatctctcacaacaggagagactggatacattccaagcaactacgttgcacctgtcgattcaatacaagcagaagagtggtactttggcaagctgggaaggaaggatgcggagcgccagttgctgtcatttggtaaccctcgaggcacattcctgatccgggagtcagaaaccactaagggagcttactcgctgagcatcagagactgggatgatatgaagggggatcacgtcaagcactataaaatccgaaagctggacaacggcggatattacatcacgactcgcgctcagtttgagaccctgcagcagctggtccaacattattcggagaaagccgacggcctctgcttcaatctgacagtgatagcttcgagttgtactcctcagaccagcgggctggccaaggatgcgtgggaggtcgcccggaggtccttgtgcctcgagaagaagctggggcagggctgttttgccgaagtgtggctgggaacctggaatgggaacacgaaggtagctatcaaaacattgaagcccggcacaatgagccccgagagcttcttggaggaagcccagattatgaaaaaactaaagcacgacaaactcgttcagctctacgctgtcgtgagcgaagaaccgatttacatcgtgacagaatacatgaataagggctccctgctggatttcctgaaggacggggaagggcgcgcgctgaagctgccgaacttagttgatatggctgcgcaggtagcagccggcatggcttacattgagaggatgaattacatccacagggacctccggtccgccaacatccttgtgggcaacggtctcatatgcaagattgccgattttggtttagctaggctcatagaggataacgagtacacagcaaggcaaggggccaaatttccaatcaagtggaccgccccagaagccgccctttatggaaggtttactataaagtcggatgtgtggtccttcggcatactactgactgagttagtcactaaaggacgggttccctaccccgggatgaataacagggaggtgttggaacaagtggagcgcgggtaccgcatgccttgcccccaagactgtccaatatccctccatgagctgatgattcactgctggaagaaggatcctgaagagcgcccaacctttgagtatctgcagtcatttctcgaggattacttcaccgctaccgagccccagtatcagcctggcgaaaacctgtag

SEQ ID NO: 280442 - DNA, 1605 bp, Artificial Sequence
  derived and/or modified sequence
atgggctgcgtgcagtgcaaggacaaggaggccaccaagctgaccgaggagcgggatggatctctgaatcagagctctggttaccgttacggtactgacccaacaccccaacactatccaagctttggggtcacctccattcccaactataacaatttccatgctgctggcggacaaggactgaccgtgtttggcggtgtgaactcttcctcacacaccggtaccctgaggacaagaggtgggacaggagttactctctttgtggctttgtacgattacgaggcaagaacggaagatgatctcagctttcataaaggagaaaagttccaaattttgaactcaagcgaaggagactggtgggaggctcggagcttaacaacaggagagacaggttacattcccagcaactacgtggcccctgtggatagcatccaggctgaggagtggtattttggtaagttgggcagaaaagacgccgaacgccaactgctgtcattcgggaaccctagggggacattcctgatccgcgagtctgagacaacaaaaggagcttatagcctctcaattagagattgggatgatatgaagggcgatcacgttaaacactataagattcgcaagctagataacgggggatactacattaccacccgggcccagttcgaaaccctccagcaattggtccaacactactcggagaaagctgacggtttatgtttcaacctgaccgtgatcgccagttcttgcactccacagacatccggcctcgctaaggatgcctgggaagtcgcgcgtagaagcctgtgccttgaaaagaaactgggtcaggggtgctttgcagaagtctggctcggtacctggaatggcaatacaaaagttgcaattaaaactctgaaacctggcaccatgtctccagaatccttcctggaggaggctcagatcatgaagaagttaaagcatgataagctggttcagttatacgcggtggtgtctgaagagccgatttacatcgtcactgaatacatgaacaagggatctcttctggactttctgaaagatggggaaggacgggctctgaaactaccaaacctggtggacatggccgcccaggtcgcagccggcatggcatacattgagagaatgaattacattcatagagacctccgctcagctaatatccttgtcggcaatggactcatttgcaaaattgccgatttcggactcgcgcggctcattgaggacaatgagtatacagctaggcagggagccaagtttccaattaaatggacagcccctgaggccgcgctctatggacgatttactataaagtcagatgtatggtcattcgggatccttctaacagaactggtgactaaagggcgggtcccataccctggaatgaataatcgggaagtgctcgaacaagttgagcgcggctatcgaatgccctgcccacaggattgccccataagcctgcacgagctcatgatccactgctggaagaaagatcccgaggaacggccaaccttcgaatacctgcagtcatttctggaagattatttcaccgctacggagccccaataccagcctggggagaacctgtag

SEQ ID NO: 280443 - DNA, 1605 bp, Artificial Sequence
  derived and/or modified sequence
atgggctgcgtgcagtgcaaggacaaggaggccaccaagctgaccgaagagcgggatgggagcctgaaccagtcttcgggctacagatatgggacggatcctactcctcagcattatcccagcttcggtgtcacctccattcccaattacaacaactttcacgctgcgggtgggcaaggactcaccgtgttcggaggggtgaactctagctcccacaccggtactctgcgaactcgagggggaacgggagtgaccctgtttgtggcactatacgactatgaggctcgtaccgaggacgatctgtcctttcacaagggagaaaagttccagattctcaacagttcagaaggggattggtgggaggccaggtctctgacaactggcgaaactggatatatcccgagcaattatgtagcaccagtcgactcaatccaggcagaggagtggtatttcgggaagctcggccgtaaagacgcagaacgacagctcctatcctttggcaacccaagaggtacctttctcattagggagtctgagacgacaaaaggtgcctattcgttgagtatccgggattgggatgacatgaaaggggatcatgtcaagcactataaaatcagaaaactggacaacggtggctactatattaccactcgtgctcagtttgagacacttcaacagctggtgcagcactactcggagaaagccgatggactctgttttaacttaactgtaattgcgtcatcctgcaccccacagaccagcggactcgctaaagacgcctgggaggtggctcgccgaagcctttgccttgagaagaaactcggccagggatgctttgccgaagtttggctgggcacgtggaacgggaataccaaagtggccattaagactctcaaacctggaacaatgagccccgaaagttttctcgaagaagctcagataatgaaaaaactaaagcacgacaagctggtgcagctttacgcagtggtgagcgaggagccaatttatatcgttactgaatatatgaataaaggctccctactggatttcctgaaggatggcgaggggcgcgcccttaaattacccaacctggtcgatatggccgcccaggtggctgcgggaatggcatacatcgaacgcatgaactacatccacagagatcttcgctcggctaatattctggtgggcaacggactgatctgtaagattgccgatttcggattggcacgcctaatcgaggataatgagtatactgcacgccaaggagccaaattcccgattaaatggaccgcccctgaagcggcactatacggacgctttaccatcaaatctgatgtgtggtcctttggaattctgctgaccgaactcgtgactaaaggacgtgtaccatacccgggcatgaataacagagaggtcctcgagcaggtggagaggggttatcgcatgccatgccctcaggactgcccgatttctctgcatgaattgatgatacattgctggaagaaggaccctgaagaacgaccgacatttgaataccttcagagctttttggaggactactttacggctactgagcctcagtaccaacccggtgaaaacctgtag

SEQ ID NO: 280444 - DNA, 1458 bp, Artificial Sequence
  derived and/or modified sequence
atgggctgcgtgcagtgcaaggacaaggaggccaccaagctgaccgaagaacgcgacggtagtctgaatcaatccagcggctaccgttacggtactgatccaaccccacagcactacccatcattcggagtaaccagcatcccaaactataataatttccacgctgctggcgggcagggcctgaccgtcttcgggggcgttaactcttctagccacacaggcacgttacgcactaggggcggcacaggcgttactctgttcgtggctctttatgactacgaagcacaggcagaagaatggtactttggtaaattgggcagaaaagacgccgagcgtcagctcctaagcttcgggaatcctagggggacgtttctcatccgggagtcggaaacaacaaagggtgcttactccctctccatccgcgattgggacgacatgaagggagatcatgtgaagcattacaagatcagaaaactcgacaatggcggttactatattaccacccgcgctcagttcgaaacacttcaacagctcgtccaacattacagtgagaaggccgatggactgtgcttcaatcttacagtcatagcttcttcatgcactccccagacctcaggcctggcaaaagacgcttgggaagtggccagaagaagcctgtgcttggaaaagaagctcggccaggggtgcttcgcagaagtctggttggggacatggaatggtaatacaaaggtagctatcaaaacgttgaagccaggcactatgtcaccggagagctttttggaggaggctcaaatcatgaagaagcttaaacatgacaagctggtacagctttacgcagttgtgtctgaggaaccaatctacattgttactgagtatatgaacaaggggagcctgctcgattttcttaaggatggcgagggaagagcactcaaactccctaatctcgtagacatggcagcccaggtcgctgctgggatggcgtatatagaacgcatgaattacatacatcgcgatttgcgcagcgctaacatccttgtcggtaacggactgatttgcaagattgcagatttcggcctggcacgtctcatagaggataatgagtatactgccagacagggggccaagttccctattaagtggaccgcgccggaggctgccttatatggcagattcactattaagtctgatgtatggtcatttggcatattgctcaccgagcttgttacaaaagggcgagttccctaccccggcatgaacaacagggaggtcctagagcaagttgaaagaggatatagaatgccttgcccccaggactgtcccatctcactccatgaactgatgatccattgctggaagaaagaccccgaagagaggccaacatttgaataccttcaaagttttctggaggactatttcaccgcaaccgagccccagtatcagcctggggaaaatctttag

SEQ ID NO: 280445 - DNA, 1458 bp, Artificial Sequence
  derived and/or modified sequence
atgggctgcgtgcagtgcaaggacaaggaagcaaccaagctgaccgaagagcgggacggaagcctcaatcagagcagtggttacaggtacgggactgacccaactcctcagcattatccttcttttggcgtgacctccatcccaaactataataactttcatgcagccggagggcagggcttaactgtattcgggggtgtgaattccagcagtcacactggtaccctgcgaacgcggggtgggacaggagttactctctttgttgccctgtatgattatgaagcccgtactgaggagtggtatttcggtaagctgggacgcaaagatgctgaaaggcagctgctctccttcggtaatccacggggtacctttcttatccgggagtctgagaccaccaagggtgcctatagcttgtcgatccgcgactgggacgacatgaagggcgaccacgttaaacattacaaaataaggaagctggacaacgggggttactatattacgacaagagcccagtttgaaaccctccagcagttggtgcagcactattcggaaaaggctgacggcctgtgcttcaatctgacagtcatcgcttcatcctgcactccccagacctcaggcctcgcaaaggacgcatgggaagtcgccagaaggtccctgtgcctggagaagaagttgggtcaagggtgctttgcagaagtctggctcggtacatggaacggaaacaccaaggtcgccatcaaaaccctcaagcctggcaccatgagtccagaaagttttctggaggaggcccagattatgaagaagcttaagcatgacaagctcgtgcagctctatgcagttgtgtcagaagaaccaatttacatcgttaccgaatacatgaataaaggctcgcttctcgactttctcaaagacggagagggaagagctctcaaactgcctaacttagtcgatatggccgctcaggtggctgccggtatggcatatattgagcgaatgaattacatacatcgagatttgcgtagtgcaaatatccttgttggcaacgggctcatatgcaagatagccgatttcgggctcgcaaggctaatagaggataatgagtacaccgctcgccagggcgctaagttccccatcaagtggacagcacctgaagctgcattgtacggccgttttaccatcaagagtgatgtgtggtcatttggaatcctgttgaccgagctagtcactaaaggaagggtgccctatcctggaatgaataaccgcgaagtcctcgaacaggtcgaaaggggataccggatgccctgtccacaagattgccctatttctctccatgagcttatgattcactgttggaaaaaagacccggaggagcgtcctacatttgagtacctccagagctttctggaggactatttcaccgcaaccgagccacagtaccagcctggagagaacctgtag

SEQ ID NO: 280446 - DNA, 1605 bp, Artificial Sequence
  derived and/or modified sequence
atgggatgtgtgcaatgtaaggacaaggaggcgacgaagctgactgaggaacgggacgggagtctcaatcagagctctgggtacaggtacggtaccgatcctaccccccagcactatccgagtttcggggtgaccagcatcccaaattataacaacttccacgcagcgggaggacaagggctgactgtgtttggaggcgttaatagttcatcacataccgggactctgcggaccagagggggtacgggagtgaccttatttgtggccctctatgactatgaggccagaacagaagacgatctttctttccataagggcgagaagttccagattcttaactccagcgagggggattggtgggaagccagatctctgactaccggcgagactggctacattccatctaactacgtggcgccagtggactcaatacaggctgaagagtggtacttcgggaagcttggaaggaaggatgccgagagacagctgttatcgttcggaaaccctaggggaacatttctcatccgggagagtgagacaaccaagggcgcttattctctcagtatacgcgactgggatgacatgaagggggatcacgttaagcattataagattagaaagttggataatgggggttactatatcaccacaagggcccagtttgagacactgcagcagttggtccaacactattctgagaaagcagatggactatgtttcaacctaactgtaatcgcctcctcttgcactccacagactagcgggctggcaaaggatgcctgggaggtggcacgcagaagcctgtgtttggaaaagaagctcgggcaggggtgtttcgccgaggtgtggctaggcacgtggaatggcaatactaaggtggcaattaaaaccttaaagcccggaactatgagccccgagagctttctggaagaagcacagatcatgaagaaactgaagcacgacaaactggtccagctgtatgcagtggtgagtgaagagccaatatacatcgtgacagagtacatgaataaaggttcactactggacttcttgaaagatggcgaggggagagctctgaagctgcccaatctggtcgatatggccgcacaggttgctgctggaatggcttatattgagcgcatgaactatatccaccgggacctcagaagtgcaaatatcctcgttggaaacggcttgatctgcaaaattgctgatttcggtttagcaagacttatagaggataacgagtataccgccaggcagggggcaaagttccctattaaatggacagctccagaagcggcactgtacggccgattcactatcaaaagcgatgtctggagttttggaatcctccttacagagttagtgacaaaaggaagggtgccataccccggaatgaacaatagagaagtcctggaacaagttgagcgcggataccggatgccgtgtccccaggattgccccattagtttacatgagttgatgattcattgctggaaaaaagaccccgaggaaagacccacctttgaatacctccagtcttttctggaagactacttcacagcaactgaaccccagtatcaacctggtgaaaatttgtag

SEQ ID NO: 280447 - DNA, 1605 bp, Artificial Sequence
  derived and/or modified sequence
atgggctgtgtgcagtgtaaagataaggaggccacaaaactaactgaggagagagacgggtctctcaaccagtcctccggataccgatatggcactgatccaaccccccaacactatccctcattcggcgttacatccatccccaattataataacttccacgcggcaggaggtcagggccttacagtgtttggcggagtgaatagttcatcccacaccggaaccctgcgtaccaggggaggaaccggcgtgacgctattcgtcgctctgtacgattatgaagccaggaccgaggacgacctgtcattccacaaaggggaaaagttccaaatcctcaattcaagcgaaggggactggtgggaggcacggtcacttaccaccggcgaaacgggctacattccttcgaattacgtagcccctgtggacagtatacaggccgaagagtggtatttcggcaaattggggagaaaagacgccgagaggcagctgcttagttttggaaacccgcgaggcacttttctcattagggagtctgaaacaactaagggggcttattcactttctatccgggactgggatgacatgaagggagatcatgtaaaacactacaaaatcagaaaacttgataatggcggatactacataacgacccgtgcccagtttgagaccttacagcaactggtccagcattattctgaaaaagccgacggcttatgtttcaatctgaccgtcatcgccagctcttgtaccccccaaacttcaggactcgccaaggacgcctgggaagtcgcccgaagaagtctctgcctagagaaaaagctgggtcaagggtgtttcgcagaggtctggctaggcacgtggaacggcaacaccaaggttgcgatcaagaccctcaagccaggcaccatgtcaccagaaagttttctggaggaggctcaaatcatgaaaaaactgaaacatgataagctcgttcagctgtatgccgtggtatctgaggagccgatttatattgtcacagagtacatgaataaaggttctttactggattttctgaaggacggcgaaggaagggcattaaagctcccgaatctagtagacatggctgctcaggtcgcagctggcatggcctatattgagagaatgaattacatccaccgcgaccttcggagtgccaatatcctggttggaaacggccttatctgtaagatagcagacttcggtttggcaagactcatcgaggacaatgagtacactgcaaggcagggggcaaaatttcccataaaatggactgccccagaagccgctctgtatgggagatttacgatcaaatccgacgtttggtctttcggcattctcttgacagagcttgtgaccaagggcagggtgccgtaccctggaatgaacaatcgggaggttctagaacaagtggaacggggatatcgtatgccctgtcctcaagattgccccattagtctgcacgagttaatgatccactgctggaaaaaagatcccgaggagcgcccaaccttcgagtacttgcagtctttcttagaggactattttaccgcgactgaaccccagtaccagccaggagagaatctctag

SEQ ID NO: 280448 - DNA, 1605 bp, Artificial Sequence
  derived and/or modified sequence
atgggatgtgtgcagtgcaaggataaggaggctacgaaactgaccgaagagagggacgggagcctcaaccagtcatctggctaccgttacggcaccgaccccacaccccagcattacccctctttcggggtgactagcatccctaactataataattttcatgcggcaggcggacagggcctgacagtgtttggcggagtgaatagcagcagccacaccggcactctacgcactcggggagggacgggcgtaaccctttttgtcgccctgtacgactacgaggcccgaactgaagatgacctctctttccataagggagagaagtttcagatcctgaacagttccgagggtgactggtgggaagcccgatccctgacgactggagaaacagggtacatcccctccaactatgtggcaccggtagatagtatccaggctgaggaatggtatttcggcaagttggggagaaaggacgctgagaggcagctgctttcctttggcaatccccgtggaaccttcctgatccgcgagagtgaaactacaaaaggggcatacagtctgtcgattcgggactgggacgatatgaagggagaccacgttaaacattacaagatacgtaagctggataacggtggctattatattacgaccagagctcagtttgagacactccagcagctggtccagcactatagcgagaaggctgatggcctctgcttcaatctgacggttattgcctcaagctgtacaccccagaccagcggtctcgctaaggatgcatgggaggtggcacgcaggagtttgtgcttggagaaaaagttaggtcaggggtgcttcgccgaagtatggctgggcacctggaatgggaacactaaggttgccatcaagacgttaaagcccggaactatgtctcccgagtcattcctcgaagaagcccaaattatgaagaagctaaaacacgacaaattagtccagttatatgcagtggtctccgaggaacctatctacatcgtgaccgagtacatgaacaaaggatctctgctagacttcctcaaggatggggaaggcagggccctgaagttgccaaaccttgtggacatggccgctcaagtcgccgctgggatggcctacattgagcgcatgaattatatccaccgagacttaaggagtgcgaatatccttgtggggaacggtctaatttgcaagattgccgactttggcctggctcggctaatcgaagacaacgaatatacagcaagacagggggctaaatttccaattaagtggaccgcgcctgaagccgcactgtatggaagattcacaatcaagtccgatgtgtggtcctttggaatcctgctgacggaactggttaccaaaggacgcgtgccttaccccggtatgaataatcgcgaagtattagaacaagtggagcgtgggtatcggatgccttgtccacaggattgtcccatcagccttcacgaattaatgatacactgctggaaaaaggaccccgaagagagaccaacattcgagtacctgcagtccttcctggaggactatttcaccgcaaccgagccgcagtatcagcctggtgaaaatctgtag

SEQ ID NO: 280449 - DNA, 1458 bp, Artificial Sequence
  derived and/or modified sequence
atgggatgcgtccagtgcaaagacaaagaagccactaagctgaccgaagaaagagacggcagtttaaaccagtcctctggatacaggtatggcaccgaccccacaccacagcactatccctcgtttggagtgacctcgatccccaattataataatttccatgcagctgggggtcagggactgactgtgtttggaggggtcaattcaagcagccatacaggcacactgcggacgagaggtggtacgggtgtaacgttgtttgttgcattatatgattatgaagctcaagctgaggagtggtactttgggaaactgggccgaaaggatgcagaaagacagctgctgtcgtttggcaatccgagggggaccttcctgattcgtgaatcagagacaactaaaggggcttatagtctcagcattcgcgattgggacgatatgaagggggaccacgtgaagcattataagattcgcaaattagacaatggtggatattacatcactacccgagctcagttcgaaactttgcaacagcttgtgcagcactactcagaaaaagccgatgggctgtgtttcaatttgactgtgatagcctcttcgtgcaccccacagacaagcgggctcgcgaaagacgcttgggaggtggccagacggtccctttgtctggagaagaagttggggcagggctgtttcgccgaggtttggctgggtacttggaacgggaacacaaaagtagccatcaagactctcaagccaggtaccatgtccccagagagcttcctggaggaagcgcaaatcatgaagaagctgaaacacgacaagctagtgcaattatatgcagtggtatcagaggaaccaatatacatcgtcaccgaatacatgaacaaaggctctttactcgacttccttaaggatggcgaagggagggcacttaagcttcctaacctcgtagacatggcagcacaggtcgctgcaggcatggcatacatagaacggatgaactatatccatagggacctgagaagtgcgaacattctagttggaaacggactgatttgcaaaatcgctgatttcggattggcacgcctaattgaggacaacgagtacacagcccgtcagggagccaaattcccaattaaatggaccgccccagaggcagctctgtatggcaggtttaccataaagtccgatgtgtggagcttcgggatacttctgactgaactagtgaccaagggccgtgtcccatatccgggaatgaacaaccgggaagtgttggaacaggtcgaacgcggatatagaatgccgtgcccgcaggactgtcctataagcctgcacgaactgatgatacactgctggaagaaggaccctgaggagaggcctacttttgagtatctgcagtcattcctggaggactactttaccgcaactgagccacagtaccagccaggcgagaacctgtag

SEQ ID NO: 280450 - DNA, 1458 bp, Artificial Sequence
  derived and/or modified sequence
atgggctgcgtgcagtgcaaggacaaggaggccaccaagctgaccgaggagagagacggcagcctgaaccagagcagcggctacagatacggcaccgaccccaccccccagcactaccccagcttcggcgtgaccagcatccccaactacaacaacttccacgccgccggcggccagggcctgaccgtgttcggcggcgtgaacagcagcagccacaccggcaccctgagaaccagaggcggcaccggcgtgaccctgttcgtggccctgtacgactacgaggccagaaccgaggagtggtacttcggcaagctgggcagaaaggacgccgagagacagctgctgagcttcggcaaccccagaggcaccttcctgatcagagagagcgagaccaccaagggcgcctacagcctgagcatcagagactgggacgacatgaagggcgaccacgtgaagcactacaagatcagaaagctggacaacggcggctactacatcaccaccagagcccagttcgagaccctgcagcagctggtgcagcactacagcgagaaggccgacggcctgtgcttcaacctgaccgtgatcgccagcagctgcaccccccagaccagcggcctggccaaggacgcctgggaggtggccagaagaagcctgtgcctggagaagaagctgggccagggctgcttcgccgaggtgtggctgggcacctggaacggcaacaccaaggtggccatcaagaccctgaagcccggcaccatgagccccgagagcttcctggaggaggcccagatcatgaagaagctgaagcacgacaagctggtgcagctgtacgccgtggtgagcgaggagcccatctacatcgtgaccgagtacatgaacaagggcagcctgctggacttcctgaaggacggcgagggcagagccctgaagctgcccaacctggtggacatggccgcccaggtggccgccggcatggcctacatcgagagaatgaactacatccacagagacctgagaagcgccaacatcctggtgggcaacggcctgatctgcaagatcgccgacttcggcctggccagactgatcgaggacaacgagtacaccgccagacagggcgccaagttccccatcaagtggaccgcccccgaggccgccctgtacggcagattcaccatcaagagcgacgtgtggagcttcggcatcctgctgaccgagctggtgaccaagggcagagtgccctaccccggcatgaacaacagagaggtgctggagcaggtggagagaggctacagaatgccctgcccccaggactgccccatcagcctgcacgagctgatgatccactgctggaagaaggaccccgaggagagacccaccttcgagtacctgcagagcttcctggaggactacttcaccgccaccgagccccagtaccagcccggcgagaacctgtag

SEQ ID NO: 280451 - DNA, 1605 bp, Artificial Sequence
  derived and/or modified sequence
atgggctgcgtgcagtgcaaggacaaggaggccaccaagctgaccgaggagagagacggcagcctgaaccagagcagcggctacagatacggcaccgaccccaccccccagcactaccccagcttcggcgtgaccagcatccccaactacaacaacttccacgccgccggcggccagggcctgaccgtgttcggcggcgtgaacagcagcagccacaccggcaccctgagaaccagaggcggcaccggcgtgaccctgttcgtggccctgtacgactacgaggccagaaccgaggacgacctgagcttccacaagggcgagaagttccagatcctgaacagcagcgagggcgactggtgggaggccagaagcctgaccaccggcgagaccggctacatccccagcaactacgtggcccccgtggacagcatccaggccgaggagtggtacttcggcaagctgggcagaaaggacgccgagagacagctgctgagcttcggcaaccccagaggcaccttcctgatcagagagagcgagaccaccaagggcgcctacagcctgagcatcagagactgggacgacatgaagggcgaccacgtgaagcactacaagatcagaaagctggacaacggcggctactacatcaccaccagagcccagttcgagaccctgcagcagctggtgcagcactacagcgagaaggccgacggcctgtgcttcaacctgaccgtgatcgccagcagctgcaccccccagaccagcggcctggccaaggacgcctgggaggtggccagaagaagcctgtgcctggagaagaagctgggccagggctgcttcgccgaggtgtggctgggcacctggaacggcaacaccaaggtggccatcaagaccctgaagcccggcaccatgagccccgagagcttcctggaggaggcccagatcatgaagaagctgaagcacgacaagctggtgcagctgtacgccgtggtgagcgaggagcccatctacatcgtgaccgagtacatgaacaagggcagcctgctggacttcctgaaggacggcgagggcagagccctgaagctgcccaacctggtggacatggccgcccaggtggccgccggcatggcctacatcgagagaatgaactacatccacagagacctgagaagcgccaacatcctggtgggcaacggcctgatctgcaagatcgccgacttcggcctggccagactgatcgaggacaacgagtacaccgccagacagggcgccaagttccccatcaagtggaccgcccccgaggccgccctgtacggcagattcaccatcaagagcgacgtgtggagcttcggcatcctgctgaccgagctggtgaccaagggcagagtgccctaccccggcatgaacaacagagaggtgctggagcaggtggagagaggctacagaatgccctgcccccaggactgccccatcagcctgcacgagctgatgatccactgctggaagaaggaccccgaggagagacccaccttcgagtacctgcagagcttcctggaggactacttcaccgccaccgagccccagtaccagcccggcgagaacctgtag

SEQ ID NO: 280452 - DNA, 1458 bp, Artificial Sequence
  derived and/or modified sequence
atgggctgcgtgcagtgcaaggacaaggaggccaccaagctgaccgaggagagagacggcagcctgaaccagagcagcggctacagatacggcaccgaccccaccccccagcactaccccagcttcggcgtgaccagcatccccaactacaacaacttccacgccgccggcggccagggcctgaccgtgttcggcggcgtgaacagcagcagccacaccggcaccctgagaaccagaggcggcaccggcgtgaccctgttcgtggccctgtacgactacgaggcccaggccgaggagtggtacttcggcaagctgggcagaaaggacgccgagagacagctgctgagcttcggcaaccccagaggcaccttcctgatcagagagagcgagaccaccaagggcgcctacagcctgagcatcagagactgggacgacatgaagggcgaccacgtgaagcactacaagatcagaaagctggacaacggcggctactacatcaccaccagagcccagttcgagaccctgcagcagctggtgcagcactacagcgagaaggccgacggcctgtgcttcaacctgaccgtgatcgccagcagctgcaccccccagaccagcggcctggccaaggacgcctgggaggtggccagaagaagcctgtgcctggagaagaagctgggccagggctgcttcgccgaggtgtggctgggcacctggaacggcaacaccaaggtggccatcaagaccctgaagcccggcaccatgagccccgagagcttcctggaggaggcccagatcatgaagaagctgaagcacgacaagctggtgcagctgtacgccgtggtgagcgaggagcccatctacatcgtgaccgagtacatgaacaagggcagcctgctggacttcctgaaggacggcgagggcagagccctgaagctgcccaacctggtggacatggccgcccaggtggccgccggcatggcctacatcgagagaatgaactacatccacagagacctgagaagcgccaacatcctggtgggcaacggcctgatctgcaagatcgccgacttcggcctggccagactgatcgaggacaacgagtacaccgccagacagggcgccaagttccccatcaagtggaccgcccccgaggccgccctgtacggcagattcaccatcaagagcgacgtgtggagcttcggcatcctgctgaccgagctggtgaccaagggcagagtgccctaccccggcatgaacaacagagaggtgctggagcaggtggagagaggctacagaatgccctgcccccaggactgccccatcagcctgcacgagctgatgatccactgctggaagaaggaccccgaggagagacccaccttcgagtacctgcagagcttcctggaggactacttcaccgccaccgagccccagtaccagcccggcgagaacctgtag

SEQ ID NO: 280453 - protein, 482 aa, Artificial Sequence
  derived and/or modified sequence
MGCVQCKDKEATKLTEERDGSLNQSSGYRYGTDPTPQHYPSFGVTSIPNYNNFHAAGGQGLTVFGGVNSSSHTGTLRTRGGTGVTLFVALYDYEARTEDDLSFHKGEKFQILNSSEGDWWEARSLTTGETGYIPSNYVAPVDSIQAEEWYFGKLGRKDAERQLLSFGNPRGTFLIRESETTKGAYSLSIRDWDDMKGDHVKHYKIRKLDNGGYYITTRAQFETLQQLVQHYSGTWNGNTKVAIKTLKPGTMSPESFLEEAQIMKKLKHDKLVQLYAVVSEEPIYIVTEYMNKGSLLDFLKDGEGRALKLPNLVDMAAQVAAGMAYIERMNYIHRDLRSANILVGNGLICKIADFGLARLIEDNEYTARQGAKFPIKWTAPEAALYGRFTIKSDVWSFGILLTELVTKGRVPYPGMNNREVLEQVERGYRMPCPQDCPISLHELMIHCWKKDPEERPTFEYLQSFLEDYFTATEPQYQPGENL

SEQ ID NO: 280454 - protein, 120 aa, Artificial Sequence
  derived and/or modified sequence
MGCVQCKDKEATKLTEERDGSLNQSSGYRYGTDPTPQHYPSFGVTSIPNYNNFHAAGGQGLTVFGGVNSSSHTGTLRTRGGTGVTLFVALYDYEARTEDDLSFHKGEKFQILNSSEGDWW

SEQ ID NO: 280455 - protein, 65 aa, Artificial Sequence
  derived and/or modified sequence
MGCVQCKDKEATKLTEERDGSLNQSSGYRYGTDPTPQHYPSFGVTSIPNYNNFHAAGGQGLTVFG

SEQ ID NO: 280456 - protein, 186 aa, Artificial Sequence
  derived and/or modified sequence
MGCVQCKDKEATKLTEERDGSLNQSSGYRYGTDPTPQHYPSFGVTSIPNYNNFHAAGGQGLTVFGGVNSSSHTGTLRTRGGTGVTLFVALYDYEARTEDDLSFHKGEKFQILNSSEGDWWEARSLTTGETGYIPSNYVAPVDSIQAEEWYFGKLGRKDAERQLLSFGNPRGTFLIRESETTKGAYS

SEQ ID NO: 280457 - protein, 152 aa, Artificial Sequence
  derived and/or modified sequence
MGCVQCKDKEATKLTEERDGSLNQSSGYRYGTDPTPQHYPSFGVTSIPNYNNFHAAGGQGLTVFGGVNSSSHTGTLRTRGGTGVTLFVALYDYEARTEDDLSFHKGEKFQILNSSEGDWWEARSLTTGETGYIPSNYVAPVDSIQAEEWYFG

SEQ ID NO: 280458 - protein, 140 aa, Artificial Sequence
  derived and/or modified sequence
MGCVQCKDKEATKLTEERDGSLNQSSGYRYGTDPTPQHYPSFGVTSIPNYNNFHAAGGQGLTVFGGVNSSSHTGTLRTRGGTGVTLFVALYDYEARTEDDLSFHKGEKFQILNSSEGDWWEARSLTTGETGYIPSNYVAP

SEQ ID NO: 280459 - DNA, 2009 bp, Artificial Sequence
  derived and/or modified sequence
aaatgatcaagtgttgggtataagccaaggagctgagagagggggagaccagcgcaggtctgaggagctgagaagggaggcttacgtgaagggaatttagataatgggctgtgtgcaatgtaaggataaagaagcaacaaaactgacggaggagagggacggcagcctgaaccagagctctgggtaccgctatggcacagaccccacccctcagcactaccccagcttcggtgtgacctccatccccaactacaacaacttccacgcagccgggggccaaggactcaccgtctttggaggtgtgaactcttcgtctcatacggggaccttgcgtacgagaggaggaacaggagtgacactctttgtggccctttatgactatgaagcacggacagaagatgacctgagttttcacaaaggagaaaaatttcaaatattgaacagctcggaaggagattggtgggaagcccgctccttgacaactggagagacaggttacattcccagcaattatgtggctccagttgactctatccaggcagaagagtggtactttggaaaacttggccgaaaagatgctgagcgacagctattgtcctttggaaacccaagaggtacctttcttatccgcgagagtgaaaccaccaaaggtgcctattcactttctatccgtgattgggatgatatgaaaggagaccatgtcaaacattataaaattcgcaaacttgacaatggtggatactacattaccacccgggcccagtttgaaacacttcagcagcttgtacaacattactcaggtacctggaatggaaacacaaaagtagccataaagactcttaaaccaggcacaatgtcccccgaatcattccttgaggaagcgcagatcatgaagaagctgaagcacgacaagctggtccagctctatgcagtggtgtctgaggagcccatctacatcgtcaccgagtatatgaacaaaggaagtttactggatttcttaaaagatggagaaggaagagctctgaaattaccaaatcttgtggacatggcagcacaggtggctgcaggaatggcttacatcgagcgcatgaattatatccatagagatctgcgatcagcaaacattctagtggggaatggactcatatgcaagattgctgacttcggattggcccgattgatagaagacaatgagtacacagcaagacaaggtgcaaagttccccatcaagtggacggcccccgaggcagccctgtacgggaggttcacaatcaagtctgacgtgtggtcttttggaatcttactcacagagctggtcaccaaaggaagagtgccatacccaggcatgaacaaccgggaggtgctggagcaggtggagcgaggctacaggatgccctgcccgcaggactgccccatctctctgcatgagctcatgatccactgctggaaaaaggaccctgaagaacgccccacttttgagtacttgcagagcttcctggaagactactttaccgcgacagagccccagtaccaacctggtgaaaacctgtaaggcccgggtctgcggagagaggccttgtcccagaggctgccccacccctccccattagctttcaattccgtagccagctgctccccagcagcggaaccgcccaggatcagattgcatgtgactctgaagctgacgaacttccatggccctcattaatgacacttgtccccaaatccgaacctcctctgtgaagcattcgagacagaaccttgttatttctcagactttggaaaatgcattgtatcgatgttatgtaaaaggccaaacctctgttcagtgtaaatagttactccagtgccaacaatcctagtgctttccttttttaaaaatgcaaatcctatgtgattttaactctgtcttcacctgattcaactaaaaaaaaaaaagtattattttccaaaagtggcctctttgtctaaaacaataaaattttttttcatgttttaacaaaaaccaa

SEQ ID NO: 280460 - DNA, 2473 bp, Artificial Sequence
  derived and/or modified sequence
gccgcgctggtggcggcggcgcgtcgttgcagttgcgccatctgtcaggagcggagccggcgaggagggggctgccgcgggcgaggaggaggggtcgccgcgagccgaaggccttcgagacccgcccgccgcccggcggcgagagtagaggcgaggttgttgtgcgagcggcgcgtcctctcccgcccgggcgcgccgcgcttctcccagcgcaccgaggaccgcccgggcgcacacaaagccgccgcccgcgccgcaccgcccggcggccgccgcccgcgccagggagggattcggccgccgggccggggacaccccggcgccgccccctcggtgctctcggaaggcccaccggctcccgggcccgccggggaccccccggagccgcctcggccgcgccggaggagggcggggagaggaccatgtgagtgggctccggagcctcagcgccgcgcagtttttttgaagaagcaggatgctgatctaaacgtggaaaaagaccagtcctgcctctgttgtagaagacatgtggtgtatataaagtttgtgatcgttggcggacattttggaatttagataatgggctgtgtgcaatgtaaggataaagaagcaacaaaactgacggaggagagggacggcagcctgaaccagagctctgggtaccgctatggcacagaccccacccctcagcactaccccagcttcggtgtgacctccatccccaactacaacaacttccacgcagccgggggccaaggactcaccgtctttggaggtgtgaactcttcgtctcatacggggaccttgcgtacgagaggaggaacaggagtgacactctttgtggccctttatgactatgaagcacggacagaagatgacctgagttttcacaaaggagaaaaatttcaaatattgaacagctcggaaggagattggtgggaagcccgctccttgacaactggagagacaggttacattcccagcaattatgtggctccagttgactctatccaggcagaagagtggtactttggaaaacttggccgaaaagatgctgagcgacagctattgtcctttggaaacccaagaggtacctttcttatccgcgagagtgaaaccaccaaaggtgcctattcactttctatccgtgattgggatgatatgaaaggagaccatgtcaaacattataaaattcgcaaacttgacaatggtggatactacattaccacccgggcccagtttgaaacacttcagcagcttgtacaacattactcaggtacctggaatggaaacacaaaagtagccataaagactcttaaaccaggcacaatgtcccccgaatcattccttgaggaagcgcagatcatgaagaagctgaagcacgacaagctggtccagctctatgcagtggtgtctgaggagcccatctacatcgtcaccgagtatatgaacaaaggaagtttactggatttcttaaaagatggagaaggaagagctctgaaattaccaaatcttgtggacatggcagcacaggtggctgcaggaatggcttacatcgagcgcatgaattatatccatagagatctgcgatcagcaaacattctagtggggaatggactcatatgcaagattgctgacttcggattggcccgattgatagaagacaatgagtacacagcaagacaaggtgcaaagttccccatcaagtggacggcccccgaggcagccctgtacgggaggttcacaatcaagtctgacgtgtggtcttttggaatcttactcacagagctggtcaccaaaggaagagtgccatacccaggcatgaacaaccgggaggtgctggagcaggtggagcgaggctacaggatgccctgcccgcaggactgccccatctctctgcatgagctcatgatccactgctggaaaaaggaccctgaagaacgccccacttttgagtacttgcagagcttcctggaagactactttaccgcgacagagccccagtaccaacctggtgaaaacctgtaaggcccgggtctgcggagagaggccttgtcccagaggctgccccacccctccccattagctttcaattccgtagccagctgctccccagcagcggaaccgcccaggatcagattgcatgtgactctgaagctgacgaacttccatggccctcattaatgacacttgtccccaaatccgaacctcctctgtgaagcattcgagacagaaccttgttatttctcagactttggaaaatgcattgtatcgatgttatgtaaaaggccaaacctctgttcagtgtaaatagttactccagtgccaacaatcctagtgctttccttttttaaaaatgcaaatcctatgtgattttaactctgtcttcacctgattcaactaaaaaaaaaaaagtattattttccaaaagtggcctctttgtctaaaacaataaaattttttttcatgtttt

SEQ ID NO: 280461 - DNA, 975 bp, Artificial Sequence
  derived and/or modified sequence
agatctcctcccctcccagagggtccaagagaacaaaagtgtctgagaaagccagagtgtgaccacgcggtttctatgctccaagggatttatttcagtggtaggtggagcagctctgtggagcacatggctaatgataatggattgactgaccagaagcaggagaggacctagcagaagccggaggtcaagctgccccaagactgggggacagcctgggtgaagactctggacctcatgaccatgtatattccagagggggatctaaagagccccagaaattcacaaaggaccagtcctgcctctgttgtagaagacatgtggtgtatataaagtttgtgatcgttggcggacattttggaaagcaaatgagaatgagcgactgtaacccttgcctgttgttcataagcatgtacaccaggatctgtgtgatccttttcctgaagataaacagcatactgctcaaggaaggaaaacaacgcatagcaacaaatttcctgttttttaaagaaagatccaacttggtttagaaattatgctggcttgctttctatgtttctaatagagaataaggagaaacttgcttctcatttgccgacatgaggaatttagataatgggctgtgtgcaatgtaaggataaagaagcaacaaaactgacggaggagagggacggcagcctgaaccagagctctgggtaccgctatggcacagaccccacccctcagcactaccccagcttcggtgtgacctccatccccaactacaacaacttccacgcagccgggggccaaggactcaccgtctttggaggtgtgaactcttcgtctcatacggggaccttgcgtacgagaggaggaacaggagtgacactctttgtggccctttatgactatgaagcacggacagaagatgacctgagttttcacaaaggagaaaaatttcaaatattgaacagctcggaaggagattggtgg

SEQ ID NO: 280462 - DNA, 989 bp, Artificial Sequence
  derived and/or modified sequence
gtataagccaaggagctgagagagggggagaccagcgcaggtctgaggagctgagaagggaggcttacgtgaagggtaagactcgcatgggcctggccggtggacaagatgtgggaactgcatggacagttatgtggaggtgcattccatcctggctggagagtgtgtgaggggcagtgggagattggtggaaaagatataggccactggtgtggaaggctgggaagccacgcttcagatcggagaaagttgctaatcagagaagcggcgttctggaggtggaatttagataatgggctgtgtgcaatgtaaggataaagaagcaacaaaactgacggaggagagggacggcagcctgaaccagagctctgggtaccgctatggcacagaccccacccctcagcactaccccagcttcggtgtgacctccatccccaactacaacaacttccacgcagccgggggccaaggactcaccgtctttggaggtgtgaactcttcgtctcatacggggaccttgcgtacgagaggaggaacaggagtgacactctttgtggccctttatgactatgaagcacggacagaagatgacctgagttttcacaaaggagaaaaatttcaaatattgaacagctcggaaggagattggtgggaagcccgctccttgacaactggagagacaggttacattcccagcaattatgtggctccagttgactctatccaggcagaagagtggtactttggaaaacttggccgaaaagatgctgagcgacagctattgtcctttggaaacccaagaggtacctttcttatccgcgagagtgaaaccaccaaaggtgcctattcactttctatccgtgattgggatgatatgaaaggagaccatgtcaaacattataaaattcgcaaacttgacaatggtggatactacattaccacccgggcccagtttgaaacacttcagcagcttgtacaacattactcag

SEQ ID NO: 280463 - DNA, 712 bp, Artificial Sequence
  derived and/or modified sequence
gcccgccgcccggcggcgagagtagaggcgaggaccgcccgggcgcacacaaagccgccgcccgcgccgcaccgcccggcggccgccgcccgcgccagggagggattcggccgccgggccggggacaccccggcgccgccccctcggtgctctcggaaggcccaccggctcccgggcccgccggggaccccccggagccgcctcggccgcgccggaggagggcggggagaggaccatgtgagtgggctccggagcctcagcgccgcgcagtttttttgaagaagcaggatgctgatctaaacgtggaaaaagaccagtcctgcctctgttgtagaagacatgtggtgtatataaagtttgtgatcgttggcggacattttggaatttagataatgggctgtgtgcaatgtaaggataaagaagcaacaaaactgacggaggagagggacggcagcctgaaccagagctctgggtaccgctatggcacagaccccacccctcagcactaccccagcttcggtgtgacctccatccccaactacaacaacttccacgcagccgggggccaaggactcaccgtctttggaggtgtgaactcttcgtctcatacggggaccttgcgtacgagaggaggaacaggagtgacactctttgtggccctttatgactatgaagcacggacagaagatgacctgagttttcacaaaggaga

SEQ ID NO: 280464 - DNA, 518 bp, Artificial Sequence
  derived and/or modified sequence
caggatgctgatctaaacgtggaaaaaagtgaacataagtcaagacagcagtgaggcactctggcgctgggacacagtgagaaattaagatttgctagtgctggttccagggcggcctgaactcttgtacttcagctcatgtcatgctgggacagatctgaaggaagatccatctccctcgggtttcttgatacttctgtgccttctgtctggcaagggcgtcagagccacgggaacttagaggaccagtcctgcctctgttgtagaagacatgtggtgtatataaagtttgtgatcgttggcggacattttggaatttagataatgggctgtgtgcaatgtaaggataaagaagcaacaaaactgacggaggagagggacggcagcctgaaccagagctctgggtaccgctatggcacagaccccacccctcagcactaccccagcttcggtgtgacctccatccccaactacaacaacttccacgcagccgggggccaaggactcaccgtctttgg

SEQ ID NO: 280465 - DNA, 610 bp, Artificial Sequence
  derived and/or modified sequence
acagcggagagaataatcgaatgaaaactgaagctttctgctttattccttttctccttctcctttcagtcaggaatttagataatgggctgtgtgcaatgtaaggataaagaagcaacaaaactgacggaggagagggacggcagcctgaaccagagctctgggtaccgctatggcacagaccccacccctcagcactaccccagcttcggtgtgacctccatccccaactacaacaacttccacgcagccgggggccaaggactcaccgtctttggaggtgtgaactcttcgtctcatacggggaccttgcgtacgagaggaggaacaggagtgacactctttgtggccctttatgactatgaagcacggacagaagatgacctgagttttcacaaaggagaaaaatttcaaatattgaacagctcggaaggagattggtgggaagcccgctccttgacaactggagagacaggttacattcccagcaattatgtggctccagttgactctatccaggcagaagagtggtactttggaaaacttggccgaaaagatgctgagcgacagctattgtcctttggaaacccaagaggtacctttcttatcc

SEQ ID NO: 280466 - DNA, 1012 bp, Artificial Sequence
  derived and/or modified sequence
agtagaggcgaggttgttgtgcgagcggcgcgtcctctcccgcccgggcgcgccgcgcttctcccagcgcaccgaggaccgcccgggcgcacacaaagccgccgcccgcgccgcaccgcccggcggccgccgcccgcgccagggagggattcggccgccgggccggggacaccccggcgccgccccctcggtgctctcggaaggcccaccggctcccgggcccgccggggaccccccggagccgcctcggccgcgccggaggagggcggggagaggaccatgtgagtgggctccggagcctcagcgccgcgcagtttttttgaagaagcaggatgctgatctaaacgtggaaaaagaccagtcctgcctctgttgtagaagacatgtggtgtatataaagtttgtgatcgttggcggacattttgacagggtctcactctgtcacccaggctgacacgatcatggctcactacaatctctgccttcctgcctcaagggttcttccttgagcacctcagcctcccaagtagctgggaccacaggaatttagataatgggctgtgtgcaatgtaaggataaagaagcaacaaaactgacggaggagagggacggcagcctgaaccagagctctgggtaccgctatggcacagaccccacccctcagcactaccccagcttcggtgtgacctccatccccaactacaacaacttccacgcagccgggggccaaggactcaccgtctttggaggtgtgaactcttcgtctcatacggggaccttgcgtacgagaggaggaacaggagtgacactctttgtggccctttatgactatgaagcacggacagaagatgacctgagttttcacaaaggagaaaaatttcaaatattgaacagctcggaaggagattggtgggaagcccgctccttgacaactggagagacaggttacattcccagcaattatgtggctccagttgactctatccaggcagaagagtggtactttggaaaa

SEQ ID NO: 280467 - DNA, 571 bp, Artificial Sequence
  derived and/or modified sequence
attccagggttaagaaatggatgggtcactgagatctagcacccagttgtcctgggcttctgcttacggggttattgagatgatagaaggcccagtttttttgaagaagcaggatgctgatctaaacgtggaaaaagaccagtcctgcctctgttgtagaagacatgtggtgtatataaagtttgtgatcgttggcggacattttggaatttagataatgggctgtgtgcaatgtaaggataaagaagcaacaaaactgacggaggagagggacggcagcctgaaccagagctctgggtaccgctatggcacagaccccacccctcagcactaccccagcttcggtgtgacctccatccccaactacaacaacttccacgcagccgggggccaaggactcaccgtctttggaggtgtgaactcttcgtctcatacggggaccttgcgtacgagaggaggaacaggagtgacactctttgtggccctttatgactatgaagcacggacagaagatgacctgagttttcacaaaggagaaaaatttcaaatattgaacagctcggaaggagat

SEQ ID NO: 280468 - DNA, 864 bp, Artificial Sequence
  derived and/or modified sequence
cctcggccgcgccggaggagggcggggagaggaccatgtgagtgggctccggagcctcagcgccgcgcagtttttttgaagaagcaggatgctgatctaaacgtggaaaaagaccagtcctgcctctgttgtagaagacatgtggtgtatataaagtttgtgatcgttggcggacattttgggtctcactctgtcacccaggctgacacgatcatggctcactacaatctctgccttcctgcctcaagggttcttccttgagcacctcagcctcccaagtagctgggaccacaggaatttagataatgggctgtgtgcaatgtaaggataaagaagcaacaaaactgacggaggagagggacggcagcctgaaccagagctctgggtaccgctatggcacagaccccacccctcagcactaccccagcttcggtgtgacctccatccccaactacaacaacttccacgcagccgggggccaaggactcaccgtctttggaggtgtgaactcttcgtctcatacggggaccttgcgtacgagaggaggaacaggagtgacactctttgtggccctttatgactatgaagcacggacagaagatgacctgagttttcacaaaggagaaaaatttcaaatattgaacagctcggaaggagattggtgggaagcccgctccttgacaactggagagacaggttacattcccagcaattatgtggctccagttgactctatccaggcagaagagtggtactttggaaaacttggccgaaaagatgctgagcgacagctattgtcctttggaaacccaagaggtacctttcttatccgcgagagtgaaaccaccaaaggtgcctattcac

SEQ ID NO: 280469 - DNA, 609 bp, Artificial Sequence
  derived and/or modified sequence
atcatctgatagccataggatgtcatccaaacttgtgtcatggtcctgtaatgttcccgggtttgtggagtgaagaaaataacacttgggtatttggaatttattcttaagctgtttttgtcagggatggatgagtttctcattcttgagttgaaatgaaacttttaaatattcttaataactgtcttatcgccagaccctctgcatgagacaccaagggaccagtcctgcctctgttgtagaagacatgtggtgtatataaagtttgtgatcgttggcggacattttggaatttagataatgggctgtgtgcaatgtaaggataaagaagcaacaaaactgacggaggagagggacggcagcctgaaccagagctctgggtaccgctatggcacagaccccacccctcagcactaccccagcttcggtgtgacctccatccccaactacaacaacttccacgcagccgggggccaaggactcaccgtctttggaggtgtgaactcttcgtctcatacggggaccttgcgtacgagaggaggaacaggagtgacactctttgtggccctttatgactatgaagcacggacagaagatgacctgagtttt

SEQ ID NO: 280470 - DNA, 1012 bp, Artificial Sequence
  derived and/or modified sequence
agagtagcagcgagcagccgcgctggtggcggcggcgcgtcgttgcagttgcgccatctgtcaggagcggagccggcgaggagggggctgccgcgggcgaggaggaggggtcgccgcgagccgaaggccttcgagacccgcccgccgcccggcggcgagagtagaggcgaggttgttgtgcgagcggcgcgtcctctcccgcccgggcgcgccgcgcttctcccagcgcaccgaggaccgcccgggcgcacacaaagccgccgcccgcgccgcaccgcccggcggccgccgcccgcgccagggagggattcggccgccgggccggggacaccccggcgccgccccctcggtgctctcggaaggcccaccggctcccgggcccgccggggaccccccggagccgcctcggccgcgccggaggagggcggggagaggaccatgtgagtgggctccggagcctcagcgccgcgcaggaccagtcctgcctctgttgtagaagacatgtggtgtatataaagtttgtgatcgttggcggacattttggaatttagataatgggctgtgtgcaatgtaaggataaagaagcaacaaaactgacggaggagagggacggcagcctgaaccagagctctgggtaccgctatggcacagaccccacccctcagcactaccccagcttcggtgtgacctccatccccaactacaacaacttccacgcagccgggggccaaggactcaccgtctttggaggtgtgaactcttcgtctcatacggggaccttgcgtacgagaggaggaacaggagtgacactctttgtggccctttatgactatgaagcacggacagaagatgacctgagttttcacaaaggagaaaaatttcaaatattgaacagctcggaaggagattggtgggaagcccgctccttgacaactggagagacaggttacattcccagcaattatgtggctccagttgactctatccaggcagaagagtggtactttggaaa

SEQ ID NO: 280471 - DNA, 597 bp, Artificial Sequence
  derived and/or modified sequence
atttttcttatcagtaaagtggtccctttcacaggaccaagtaaaattactcgcttttaaattgaaaaacacaaaccaaatacattttgtttttgtttttgttttctgacttgggtcttgaattaaaatggaaaaagggctgttggccaccagtctaaagaatgccaggaccagtcctgcctctgttgtagaagacatgtggtgtatataaagtttgtgatcgttggcggacattttggaatttagataatgggctgtgtgcaatgtaaggataaagaagcaacaaaactgacggaggagagggacggcagcctgaaccagagctctgggtaccgctatggcacagaccccacccctcagcactaccccagcttcggtgtgacctccatccccaactacaacaacttccacgcagccgggggccaaggactcaccgtctttggaggtgtgaactcttcgtctcatacggggaccttgcgtacgagaggaggaacaggagtgacactctttgtggccctttatgactatgaagcacggacagaagatgacctgagttttcacaaaggagaaaaatttcaaatattgaacagctcggaa

SEQ ID NO: 280472 - DNA, 569 bp, Artificial Sequence
  derived and/or modified sequence
aaaatgtgtcatctcatcctggggactgcccttggccactgctgaatctgttttgaaacctctttgcaggaccagtcctgcctctgttgtagaagacatgtggtgtatataaagtttgtgatcgttggcggacattttggaatttagataatgggctgtgtgcaatgtaaggataaagaagcaacaaaactgacggaggagagggacggcagcctgaaccagagctctgggtaccgctatggcacagaccccacccctcagcactaccccagcttcggtgtgacctccatccccaactacaacaacttccacgcagccgggggccaaggactcaccgtctttggaggtgtgaactcttcgtctcatacggggaccttgcgtacgagaggaggaacaggagtgacactctttgtggccctttatgactatgaagcacggacagaagatgacctgagttttcacaaaggagaaaaatttcaaatattgaacagctcggaaggagattggtgggaagcccgctccttgacaactggagagacaggttacattcccagcaattatgtggctcc

SEQ ID NO: 280473 - DNA, 541 bp, Artificial Sequence
  derived and/or modified sequence
acataataaagcctagaaaagaaaggaccagtcctgcctctgttgtagaagacatgtggtgtatataaagtttgtgatcgttggcggacattttggaatttagataatgggctgtgtgcaatgtaaggataaagaagcaacaaaactgacggaggagagggacggcagcctgaaccagagctctgggtaccgctatggcacagaccccacccctcagcactaccccagcttcggtgtgacctccatccccaactacaacaacttccacgcagccgggggccaaggactcaccgtctttggaggtgtgaactcttcgtctcatacggggaccttgcgtacgagaggaggaacaggagtgacactctttgtggccctttatgactatgaagcacggacagaagatgacctgagttttcacaaaggagaaaaatttcaaatattgaacagctcggaaggagattggtgggaagcccgctccttgacaactggagagacaggttacattcccagcaattatgtggctccagttgactctatccag

SEQ ID NO: 280474 - DNA, 1449 bp, Artificial Sequence
  derived and/or modified sequence
atggggtgcgtgcaatgcaaggacaaagaggccacaaaactgacggaggagagggacgggtctttgaatcaatcttccgggtataggtacggaacagatcccacacctcagcattacccttccttcggtgtaacgtcaatacctaactacaataacttccacgccgctggcggccagggtctcaccgtgtttggcggtgttaattcctctagccacacgggaactctaaggaccagaggcggaacgggagtaacccttttcgtcgctctatatgattacgaagcgcgtacagaggatgacttatcctttcataagggcgaaaagttccaaattcttaacagctccgagggcgattggtgggaagcccgatcgctaactacgggcgagacaggctacataccatcgaattatgtggcgccagtcgatagcattcaggctgaggagtggtactttggtaagctaggtcgtaaggatgctgagcggcagctgctatccttcggcaatccaaggggcacttttctgataagagagtccgagacaacgaaaggagcttatagcctctcgattagggactgggatgatatgaagggcgatcacgtaaagcattataaaatccggaagctcgataatggaggatattatatcacaacgagggcccagtttgaaaccctgcagcagctggtacagcactattctggaacgtggaatggaaacacaaaggtcgccataaagaccctcaagccaggcacaatgagcccggagtcattcctggaggaggcacagatcatgaagaaactgaaacacgacaaattagtccagctttatgcagtagtgtcggaggagccgatttacatagtgacagagtatatgaacaaaggaagtctgctggatttcttgaaggatggcgaagggcgggctctgaaattacccaacctggtggatatggcagcacaagtggctgcagggatggcatacatcgaaaggatgaactatattcaccgggacctaagatctgctaacatcctcgtgggtaacggactcatatgcaaaatcgctgatttcggccttgcaagacttattgaggataacgagtacactgccaggcaaggcgctaagttcccaatcaaatggacagcacccgaggccgcactgtacggccggttcactataaagtctgacgtgtggtcatttgggatccttttaaccgaactggtgacaaaaggtagagtgccgtatcctggcatgaacaaccgagaagtgctcgaacaggtggagagaggctatcgcatgccctgtccccaagactgtccgataagtctgcacgagctcatgattcactgctggaaaaaagatccagaggagcggcctacgttcgagtatctgcaaagctttctcgaggattatttcacggctactgagccccagtatcagcccggggaaaatctctag

SEQ ID NO: 280475 - DNA, 363 bp, Artificial Sequence
  derived and/or modified sequence
atgggttgcgttcagtgcaaagataaagaggcaacgaagctaactgaggagcgggacggcagtctgaatcagtcatccggctatcgctacggaactgatcctacccctcagcactatccctccttcggcgtgacctccataccaaattacaacaactttcatgccgcaggtggccaaggactgaccgtattcggcggagtgaactcctcctcccacacgggcacactgaggacccgtggggggaccggcgtcacgctatttgtcgcactgtatgactacgaggctagaacggaggacgacctgagtttccataaaggcgagaaattccaaattctgaactcctctgaaggcgactggtggtag

SEQ ID NO: 280476 - DNA, 699 bp, Artificial Sequence
  derived and/or modified sequence
atgggctgcgtacagtgtaaagataaggaggctacgaagcttaccgaggaacgcgatgggtcactaaatcagagttcaggatatagatacgggaccgatcctacaccccagcactacccttccttcggcgtgacatcaattccgaactacaacaactttcatgccgcgggaggccagggactaacagtgtttggcggcgtaaactcatctagccacaccggcacactgcgcaccaggggcggtacaggagtaacactgttcgttgcactctatgactatgaagcacgaaccgaggacgacctatcgttccacaagggcgagaaatttcagatcctgaattccagtgagggcgactggtgggaggcgagatcacttacaacaggcgagaccggttacattccttcaaattatgtggcgcccgttgacagcattcaagctgaggaatggtattttggcaagcttggacgcaaggatgcagagcgccagctgctgtcctttggaaacccaagaggtacatttctgattcgggagagcgaaaccacaaaaggggcctactccttgtcaatccgcgactgggatgacatgaaaggtgaccacgtgaaacattacaagattcgcaagcttgacaatgggggttactatatcaccacccgtgcacaattcgaaacactccagcagcttgtgcagcattacagctag

SEQ ID NO: 280477 - DNA, 321 bp, Artificial Sequence
  derived and/or modified sequence
atgggttgcgtgcagtgcaaagacaaagaggctaccaaactaacagaggaaagagatggcagtctcaatcaatcatcgggataccggtatggcaccgatcccacgccacaacactacccttcttttggcgttacaagcattcccaattacaacaattttcacgccgcaggaggccaaggccttacagtgtttggaggagtgaactcttcaagccacaccgggaccctgcgaaccagaggcggcacgggggtaacgttgtttgttgccttgtatgactacgaggcacgcacggaggatgacctgagctttcataaggggtag

SEQ ID NO: 280478 - DNA, 198 bp, Artificial Sequence
  derived and/or modified sequence
atgggatgcgtccagtgcaaagataaagaagcaaccaagcttaccgaggaaagggacggctctctgaatcagtctagcggctaccggtacggaacagatcccacaccccaacactatccttctttcggagttactagcatccctaactataataattttcacgctgcaggaggacaagggttaactgtatttgggtag

SEQ ID NO: 280479 - DNA, 528 bp, Artificial Sequence
  derived and/or modified sequence
atgggatgtgtgcagtgcaaggataaggaagccacaaagttaaccgaagaaagagatggtagcctgaaccagtcttcaggctacagatacggtactgatcctactccccagcattatccaagttttggagtgacctctatcccgaattacaacaatttccacgctgctgggggacagggcctgactgtgtttggcggcgtcaactcgagcagccatacaggcaccctgcgcactcgaggggggactggcgttacgctattcgttgccctttacgattacgaggcccgtaccgaggatgacctgagcttccacaaaggggaaaagttccagattctaaattcttctgagggtgactggtgggaggcccggagccttacaaccggcgagacaggttatatcccaagtaattacgtggcccccgtcgattcaattcaggctgaggagtggtactttgggaaacttgggcgaaaggacgcggaaaggcaacttctgtcctttggcaatcctaggggcacgtttctgatctag

SEQ ID NO: 280480 - DNA, 462 bp, Artificial Sequence
  derived and/or modified sequence
atgggctgtgtgcaatgtaaggataaagaggcaactaagctgacagaggaacgcgacggctcactcaatcagtcctcaggatataggtatggtacggatcctacgcctcagcattacccttcatttggggtgacaagcatccccaactacaataactttcacgcagctggaggacaggggctaaccgtcttcggtggtgtgaattcctcttcacatacaggcaccttgcgcacaagggggggaaccggtgtgacactgtttgttgcgttatacgactatgaggcgagaactgaggatgacctgagcttccataagggcgagaagttccagattcttaatagtagtgagggagattggtgggaggctaggagtctgacaactggcgaaactggatatataccgagcaactatgtggctccggtggactccatccaagctgaggagtggtactttggcaaatag

SEQ ID NO: 280481 - DNA, 357 bp, Artificial Sequence
  derived and/or modified sequence
atggggtgcgttcagtgtaaggataaggaagccacaaaactgaccgaggaacgagatggatctttgaaccagtcgtcaggatatcgatatgggaccgatcccactcctcagcactacccttcttttggggtgacatctattccaaattataataactttcatgctgcgggtggccaaggactgaccgtctttggcggggttaattcctcatcccacaccggtaccctgaggacaagggggggaactggtgtaacccttttcgtggccttatacgattacgaggcgcggacggaagacgacttgagcttccataagggagagaaatttcaaattcttaacagctccgagggagactag

SEQ ID NO: 280482 - DNA, 561 bp, Artificial Sequence
  derived and/or modified sequence
atgggatgcgttcagtgcaaagataaggaggccaccaagctgacagaggagagagacggcagcctgaatcagtcgtccggttatcgttatggcaccgacccaacgccccagcactatccgtcttttggagtaacctcaatccccaactataataattttcacgccgctggagggcagggtctgactgtattcgggggcgtgaactccagttcccatactggtaccttacgcacgaggggaggaactggtgtcacgctatttgtcgccttgtatgactatgaggcacgcactgaggacgacctgagttttcataagggggagaagttccagattttaaactctagtgagggggattggtgggaagctaggtcattaactacgggggaaacaggctatatcccgtccaactacgtcgcgcccgtggatagtatccaggcggaggaatggtactttggtaaacttggccggaaagacgcggaacgccagctcctcagctttggcaatcctcgcgggactttcctgatcagagaatctgaaacaacaaaaggcgcctactcatag

SEQ ID NO: 280483 - DNA, 312 bp, Artificial Sequence
  derived and/or modified sequence
atgggctgcgtgcagtgtaaggataaagaagcaaccaaactcacagaggaacgagatggatcactaaatcagtcgagtggatacagatacggaactgatcctacaccccagcactatccctctttcggcgtgacatcgatccctaattacaataattttcacgctgccggcggccaagggctgacggtgttcggcggcgtgaactccagttcacacacaggtaccctgcgcactagagggggcacaggcgtgacactgttcgtggctctgtatgactacgaagctaggactgaagacgatttatcattttag

SEQ ID NO: 280484 - DNA, 459 bp, Artificial Sequence
  derived and/or modified sequence
atggggtgcgtgcagtgtaaggacaaagaggcaactaagctgacggaagagcgagacggctctctcaaccaatcgtccggctaccggtacgggaccgatcccacaccgcagcactacccctcttttggcgtgacctcaatccccaattacaataactttcacgccgccggcggccagggtctcaccgtctttggaggagtgaattcttcctctcacacaggcacactgagaacacgggggggaactggcgtcactctgttcgtggccctgtacgattacgaagcgcggacggaagatgatttgagtttccataagggcgaaaaatttcagattctgaacagctctgaaggcgactggtgggaagctcgttcactcaccacaggagagactggttacataccatctaattacgtggccccagtggattctatacaggctgaagaatggtacttcggctag

SEQ ID NO: 280485 - DNA, 351 bp, Artificial Sequence
  derived and/or modified sequence
atgggctgtgtgcagtgtaaggacaaggaagccaccaagctgacagaagaaagggacgggtccctcaaccaatcaagtggataccgctacgggacggacccaactccccagcactatccttcgttcggcgtaacatcgattcctaactacaacaattttcatgcagctggaggccagggactgaccgttttcggcggggtcaatagtagttctcataccggcacgctacggactaggggaggcacaggcgtgacactctttgtcgccctgtatgattacgaggctcgaaccgaggacgacctgtccttccacaaaggcgaaaagttccagattctgaacagcagtgaatag

SEQ ID NO: 280486 - DNA, 423 bp, Artificial Sequence
  derived and/or modified sequence
atggggtgcgtgcaatgcaaggacaaggaggcgacgaagctgacagaggagagagatggatccctgaaccaatcctcgggctacaggtacgggaccgaccctaccccacaacactatccatcctttggtgtgacctctatccccaactacaataacttccacgcagccgggggccagggattgaccgtgttcggtggcgttaacagctccagccacactgggactctacgcacgcggggcgggaccggagtgaccttattcgtggccctgtacgactacgaagcacgcaccgaagatgacctcagcttccataagggcgagaagtttcagatcctaaacagcagtgagggagattggtgggaagcccgatccctgactaccggagagaccggttatattccatcaaattacgtagctccttag

SEQ ID NO: 280487 - DNA, 438 bp, Artificial Sequence
  derived and/or modified sequence
atgggctgcgtgcagtgcaaggacaaggaagccaccaaactaaccgaggagcgtgatggctcactgaaccagagtagcgggtaccgctatgggacagaccctaccccacaacattatcctagctttggcgtgacttcaatacctaactataacaactttcatgcagcaggaggtcagggccttaccgtgtttggaggagtgaacagcagttcccatacaggcacactcaggacccgagggggcaccggagtcacactgttcgtggcactgtatgattacgaggcccggaccgaagatgacttaagcttccacaaaggcgaaaagtttcagatcctgaattcttcggagggggattggtgggaagcgcggtcccttacaactggtgaaacaggctacattcccagtaattacgtggcccccgtcgacagcatccaatag

SEQ ID NO: 280488 - DNA, 1449 bp, Artificial Sequence
  derived and/or modified sequence
atggggtgcgtgcagtgcaaggacaaagaagcgactaagctaacggaggagcgcgacgggtctctgaaccaatcgtccggatataggtatgggacagaccctactcctcagcactaccctagcttcggcgtaacgtccatcccaaattacaacaatttccatgcggctggcgggcaaggtctgacggtgttcggtggggtgaactcttcaagccataccggaactttgagaaccagaggtggtacgggcgtgacgctgttcgtcgctttatacgattacgaggctagaactgaagatgatctgtcttttcacaagggggagaaattccagattctgaattccagtgaaggagactggtgggaggcgaggtctctcacaaccggcgagaccggctacataccctctaattatgtggccccagttgactcgatccaagcagaagaatggtacttcggaaagctgggacggaaagacgccgaaagacagctgttatcgtttggcaacccccggggaactttcctgatacgcgagagtgaaactacaaaaggggcctattctctgagtatccgcgactgggacgacatgaaaggcgaccacgtgaagcattataaaattcggaagctggacaacgggggctattatataaccacccgggcccagttcgagacactccagcagttggttcaacattactctgggacttggaacggtaataccaaggtcgccattaagaccctcaaacccggcacgatgagtcctgaatcttttctggaggaagcccaaatcatgaaaaaactgaaacacgataaactcgtccagttgtatgctgtggtgtctgaagagccgatctacatcgtgacggagtacatgaacaagggcagtctgctggacttcctaaaggacggagagggtcgcgccctgaaattgccgaacctggtggatatggcagctcaagtcgcagccggcatggcatacattgaacgaatgaattatattcaccgcgaccttcgttcggctaatattctcgtgggaaacggccttatctgtaagatagctgatttcggcctggccagactgattgaagacaatgagtacacagccagacaaggcgccaaattccccattaagtggactgccccggaggccgccctgtacggccgctttactattaagagtgatgtctggtcttttggtattctgctgactgaacttgtgactaaggggcgcgttccatacccaggaatgaataacagagaggtgctggagcaggtggaaagggggtatagaatgccctgtccgcaggactgccccatcagtctgcatgagcttatgatacactgttggaagaaggatcccgaggagaggccaactttcgaatatctgcagtcattcctcgaggattattttaccgctactgagcctcagtatcaacctggcgagaacctgtag

SEQ ID NO: 280489 - DNA, 1449 bp, Artificial Sequence
  derived and/or modified sequence
atgggctgtgtgcagtgcaaggacaaggaggccaccaagctgacagaggagagagatggcagcctgaaccagagcagcggctaccgctatggaacagaccccaccccccagcactaccccagctttggagtgaccagcatccccaactacaacaacttccacgccgccggcggccagggcctgactgtgtttggaggagtgaacagcagcagccacacaggcaccctgcggacccggggcggcaccggggtgaccctgtttgtggccctgtatgactatgaggccaggacagaagatgacctgtccttccacaagggggagaagttccagatcctgaacagcagcgagggggactggtgggaggcccggagcctgaccactggagagaccggctacatccccagcaactacgtggcccctgtggacagcatccaggccgaggagtggtactttgggaagctgggcaggaaggatgctgagcggcagctgctgagctttggaaacccccggggcaccttcctgatccgggagagcgagaccaccaagggggcctacagcctgagcatccgggactgggatgacatgaagggggaccacgtgaagcactacaagatcaggaagctggacaatggaggctactacatcaccacccgggcccagtttgagaccctgcagcagctggtgcagcactacagcggcacctggaatggaaacaccaaggtggccatcaagaccctgaagccaggcaccatgagccctgagagcttcctggaggaggcccagatcatgaagaagctgaagcatgacaagctggtgcagctgtatgctgtggtgtctgaggagcccatctacatcgtgacagagtacatgaacaagggcagcctgctggacttcctgaaggatggagagggccgggccctgaagctgcccaacctggtggacatggccgcccaggtggccgccggcatggcctacatcgagaggatgaactacatccaccgggacctgcggagcgccaacatcctggtgggcaatggcctcatctgcaagattgctgactttggcctggcccggctgattgaagataatgagtacacagcccggcagggcgccaagttccccatcaagtggacagcccctgaggccgccctgtatggccgcttcaccatcaagagtgatgtgtggagctttggcatcctgctgacagagctggtgaccaagggccgggtgccctacccaggcatgaacaaccgggaggtgctggagcaggtggagcggggctacaggatgccctgcccccaggactgccccatcagcctgcacgagctgatgatccactgctggaagaaggaccctgaggagcggcccacctttgagtacctgcagagcttcctggaggactacttcaccgccacagagccccagtaccagcccggggagaacctgtag

SEQ ID NO: 280490 - DNA, 363 bp, Artificial Sequence
  derived and/or modified sequence
atgggctgtgtgcagtgcaaggacaaggaggccaccaagctgacagaggagagagatggcagcctgaaccagagcagcggctaccgctatggaacagaccccaccccccagcactaccccagctttggagtgaccagcatccccaactacaacaacttccacgccgccggcggccagggcctgactgtgtttggaggagtgaacagcagcagccacacaggcaccctgcggacccggggcggcaccggggtgaccctgtttgtggccctgtatgactatgaggccaggacagaagatgacctgtccttccacaagggggagaagttccagatcctgaacagcagcgagggggactggtggtag

SEQ ID NO: 280491 - DNA, 699 bp, Artificial Sequence
  derived and/or modified sequence
atgggctgtgtgcagtgcaaggacaaggaggccaccaagctgacagaggagagagatggcagcctgaaccagagcagcggctaccgctatggaacagaccccaccccccagcactaccccagctttggagtgaccagcatccccaactacaacaacttccacgccgccggcggccagggcctgactgtgtttggaggagtgaacagcagcagccacacaggcaccctgcggacccggggcggcaccggggtgaccctgtttgtggccctgtatgactatgaggccaggacagaagatgacctgtccttccacaagggggagaagttccagatcctgaacagcagcgagggggactggtgggaggcccggagcctgaccactggagagaccggctacatccccagcaactacgtggcccctgtggacagcatccaggccgaggagtggtactttgggaagctgggcaggaaggatgctgagcggcagctgctgagctttggaaacccccggggcaccttcctgatccgggagagcgagaccaccaagggggcctacagcctgagcatccgggactgggatgacatgaagggggaccacgtgaagcactacaagatcaggaagctggacaatggaggctactacatcaccacccgggcccagtttgagaccctgcagcagctggtgcagcactacagctag

SEQ ID NO: 280492 - DNA, 321 bp, Artificial Sequence
  derived and/or modified sequence
atgggctgtgtgcagtgcaaggacaaggaggccaccaagctgacagaggagagagatggcagcctgaaccagagcagcggctaccgctatggaacagaccccaccccccagcactaccccagctttggagtgaccagcatccccaactacaacaacttccacgccgccggcggccagggcctgactgtgtttggaggagtgaacagcagcagccacacaggcaccctgcggacccggggcggcaccggggtgaccctgtttgtggccctgtatgactatgaggccaggacagaagatgacctgtccttccacaagggctag

SEQ ID NO: 280493 - DNA, 198 bp, Artificial Sequence
  derived and/or modified sequence
atgggctgtgtgcagtgcaaggacaaggaggccaccaagctgacagaggagagagatggcagcctgaaccagagcagcggctaccgctatggaacagaccccaccccccagcactaccccagctttggagtgaccagcatccccaactacaacaacttccacgccgccggcggccagggcctgactgtgtttggatag

SEQ ID NO: 280494 - DNA, 528 bp, Artificial Sequence
  derived and/or modified sequence
atgggctgtgtgcagtgcaaggacaaggaggccaccaagctgacagaggagagagatggcagcctgaaccagagcagcggctaccgctatggaacagaccccaccccccagcactaccccagctttggagtgaccagcatccccaactacaacaacttccacgccgccggcggccagggcctgactgtgtttggaggagtgaacagcagcagccacacaggcaccctgcggacccggggcggcaccggggtgaccctgtttgtggccctgtatgactatgaggccaggacagaagatgacctgtccttccacaagggggagaagttccagatcctgaacagcagcgagggggactggtgggaggcccggagcctgaccactggagagaccggctacatccccagcaactacgtggcccctgtggacagcatccaggccgaggagtggtactttgggaagctgggcaggaaggatgctgagcggcagctgctgagctttggaaacccccggggcaccttcctgatctag

SEQ ID NO: 280495 - DNA, 462 bp, Artificial Sequence
  derived and/or modified sequence
atgggctgtgtgcagtgcaaggacaaggaggccaccaagctgacagaggagagagatggcagcctgaaccagagcagcggctaccgctatggaacagaccccaccccccagcactaccccagctttggagtgaccagcatccccaactacaacaacttccacgccgccggcggccagggcctgactgtgtttggaggagtgaacagcagcagccacacaggcaccctgcggacccggggcggcaccggggtgaccctgtttgtggccctgtatgactatgaggccaggacagaagatgacctgtccttccacaagggggagaagttccagatcctgaacagcagcgagggggactggtgggaggcccggagcctgaccactggagagaccggctacatccccagcaactacgtggcccctgtggacagcatccaggccgaggagtggtactttgggaagtag

SEQ ID NO: 280496 - DNA, 357 bp, Artificial Sequence
  derived and/or modified sequence
atgggctgtgtgcagtgcaaggacaaggaggccaccaagctgacagaggagagagatggcagcctgaaccagagcagcggctaccgctatggaacagaccccaccccccagcactaccccagctttggagtgaccagcatccccaactacaacaacttccacgccgccggcggccagggcctgactgtgtttggaggagtgaacagcagcagccacacaggcaccctgcggacccggggcggcaccggggtgaccctgtttgtggccctgtatgactatgaggccaggacagaagatgacctgtccttccacaagggggagaagttccagatcctgaacagcagcgagggggactag

SEQ ID NO: 280497 - DNA, 561 bp, Artificial Sequence
  derived and/or modified sequence
atgggctgtgtgcagtgcaaggacaaggaggccaccaagctgacagaggagagagatggcagcctgaaccagagcagcggctaccgctatggaacagaccccaccccccagcactaccccagctttggagtgaccagcatccccaactacaacaacttccacgccgccggcggccagggcctgactgtgtttggaggagtgaacagcagcagccacacaggcaccctgcggacccggggcggcaccggggtgaccctgtttgtggccctgtatgactatgaggccaggacagaagatgacctgtccttccacaagggggagaagttccagatcctgaacagcagcgagggggactggtgggaggcccggagcctgaccactggagagaccggctacatccccagcaactacgtggcccctgtggacagcatccaggccgaggagtggtactttgggaagctgggcaggaaggatgctgagcggcagctgctgagctttggaaacccccggggcaccttcctgatccgggagagcgagaccaccaagggggcctacagctag

SEQ ID NO: 280498 - DNA, 312 bp, Artificial Sequence
  derived and/or modified sequence
atgggctgtgtgcagtgcaaggacaaggaggccaccaagctgacagaggagagagatggcagcctgaaccagagcagcggctaccgctatggaacagaccccaccccccagcactaccccagctttggagtgaccagcatccccaactacaacaacttccacgccgccggcggccagggcctgactgtgtttggaggagtgaacagcagcagccacacaggcaccctgcggacccggggcggcaccggggtgaccctgtttgtggccctgtatgactatgaggccaggacagaagatgacctgtccttctag

SEQ ID NO: 280499 - DNA, 459 bp, Artificial Sequence
  derived and/or modified sequence
atgggctgtgtgcagtgcaaggacaaggaggccaccaagctgacagaggagagagatggcagcctgaaccagagcagcggctaccgctatggaacagaccccaccccccagcactaccccagctttggagtgaccagcatccccaactacaacaacttccacgccgccggcggccagggcctgactgtgtttggaggagtgaacagcagcagccacacaggcaccctgcggacccggggcggcaccggggtgaccctgtttgtggccctgtatgactatgaggccaggacagaagatgacctgtccttccacaagggggagaagttccagatcctgaacagcagcgagggggactggtgggaggcccggagcctgaccactggagagaccggctacatccccagcaactacgtggcccctgtggacagcatccaggccgaggagtggtactttggatag

SEQ ID NO: 280500 - DNA, 351 bp, Artificial Sequence
  derived and/or modified sequence
atgggctgtgtgcagtgcaaggacaaggaggccaccaagctgacagaggagagagatggcagcctgaaccagagcagcggctaccgctatggaacagaccccaccccccagcactaccccagctttggagtgaccagcatccccaactacaacaacttccacgccgccggcggccagggcctgactgtgtttggaggagtgaacagcagcagccacacaggcaccctgcggacccggggcggcaccggggtgaccctgtttgtggccctgtatgactatgaggccaggacagaagatgacctgtccttccacaagggggagaagttccagatcctgaacagcagcgagtag

SEQ ID NO: 280501 - DNA, 423 bp, Artificial Sequence
  derived and/or modified sequence
atgggctgtgtgcagtgcaaggacaaggaggccaccaagctgacagaggagagagatggcagcctgaaccagagcagcggctaccgctatggaacagaccccaccccccagcactaccccagctttggagtgaccagcatccccaactacaacaacttccacgccgccggcggccagggcctgactgtgtttggaggagtgaacagcagcagccacacaggcaccctgcggacccggggcggcaccggggtgaccctgtttgtggccctgtatgactatgaggccaggacagaagatgacctgtccttccacaagggggagaagttccagatcctgaacagcagcgagggggactggtgggaggcccggagcctgaccactggagagaccggctacatccccagcaactacgtggccccctag

SEQ ID NO: 280502 - DNA, 438 bp, Artificial Sequence
  derived and/or modified sequence
atgggctgtgtgcagtgcaaggacaaggaggccaccaagctgacagaggagagagatggcagcctgaaccagagcagcggctaccgctatggaacagaccccaccccccagcactaccccagctttggagtgaccagcatccccaactacaacaacttccacgccgccggcggccagggcctgactgtgtttggaggagtgaacagcagcagccacacaggcaccctgcggacccggggcggcaccggggtgaccctgtttgtggccctgtatgactatgaggccaggacagaagatgacctgtccttccacaagggggagaagttccagatcctgaacagcagcgagggggactggtgggaggcccggagcctgaccactggagagaccggctacatccccagcaactacgtggcccctgtggacagcatccagtag

SEQ ID NO: 280503 - DNA, 1449 bp, Artificial Sequence
  derived and/or modified sequence
atgggctgcgtgcagtgcaaggacaaggaggccaccaagctgaccgaagagcgcgacggatccttaaaccaaagttcaggctaccggtatggtaccgaccctacgcctcagcactatccatccttcggagttaccagcatcccaaactacaataacttccatgctgcaggaggtcagggtctcactgtctttggcggggtcaactcttcatcgcatacagggactttgagaactcgcggcggaacgggcgtcacactctttgtcgcactgtatgactatgaggcaagaaccgaggacgacttatcttttcacaaaggagaaaagtttcagattctgaacagcagcgaaggggattggtgggaggcccgctcccttactaccggcgagaccgggtacatcccctcgaactacgtggcacccgtggacagcatacaggcagaagaatggtattttgggaaactaggacggaaagacgctgaaagacagcttctctctttcggcaaccctcgagggactttcttgataagagagagtgagacaaccaagggtgcctatagccttagcatcagggattgggacgatatgaaaggagatcacgtcaaacattataaaattcgtaagctcgacaatggtggctattatataactacacgcgcgcagtttgagactctgcagcagctcgtacagcactattctgggacatggaatggtaacacgaaggtcgctatcaaaaccttgaaacccggcacaatgtcccctgagtctttcctggaggaggcccagattatgaagaaactaaaacacgataagctcgtccaactgtatgccgtagtgagtgaggaacctatatatatcgtgactgaatatatgaataagggtagcctgttggactttctgaaggacggcgaagggagggctttgaaactacctaatctggttgatatggcagctcaggttgccgctggcatggcatacattgaaaggatgaattacatccacagagatctcagatcagctaacattctggtcggcaacgggctgatatgcaaaattgccgacttcggcttagcccgactgatcgaggacaatgagtacactgcgaggcaaggtgcaaagtttcccattaagtggaccgcaccagaggctgctctgtacgggaggttcacaataaagtccgacgtgtggtcgttcggcattctattgacagaactggtaaccaagggtagagtaccctatccgggcatgaacaacagggaggtcctggagcaagtggaaaggggttatcgcatgccgtgcccccaggattgtcccatttctctgcatgagctgatgattcattgctggaagaaggatccagaagagcgcccgacctttgagtacttgcagtctttcctggaggactattttacggcaaccgagccccagtatcaacctggagagaatctttag

SEQ ID NO: 280504 - DNA, 363 bp, Artificial Sequence
  derived and/or modified sequence
atgggctgcgtgcagtgcaaggacaaggaggccaccaagctgaccgaagaacgtgacggtagcctaaatcagtcatctggttacaggtatggcacagacccaactccgcagcattatccttccttcggcgtgaccagcatacctaactataacaatttccacgccgccggaggccagggcttgacagtgtttggaggggtcaacagcagttcgcacacagggaccctgaggacccggggtggtaccggagttacgttattcgtcgccctctacgattatgaggcgcgcaccgaagacgacctgtcctttcacaagggagaaaagttccaaattctcaactccagtgagggggactggtggtag

SEQ ID NO: 280505 - DNA, 699 bp, Artificial Sequence
  derived and/or modified sequence
atgggctgcgtgcagtgcaaggacaaggaggccaccaagctgaccgaggagagggatgggtccttaaaccagtcctcaggctaccgttacggcactgatccaacacctcagcactacccctccttcggagtgacgtcaatccccaattacaacaattttcatgcagccggcggccaaggactcactgtgtttggcggagtgaactcctcttcccataccggcacccttaggacccggggtggaaccggtgtcaccctctttgtcgctttgtacgactatgaggctcgtacggaggacgacctttcattccacaaaggagagaagttccagatcctcaactcttcggagggggactggtgggaagcccggtccttgactaccggagagacaggctacattccaagcaattacgtggcgcctgtcgatagcattcaagccgaggagtggtactttgggaagctgggacggaaagatgctgagcgacagcttttgtcctttggcaacccacgagggaccttcttaatccgggaaagcgaaacaacaaagggcgcttactccctctccattagagactgggacgacatgaagggcgaccatgtgaagcactataaaatacgcaagctggataatggcggatattacatcactactcgggcgcagttcgagaccctgcagcagttagttcaacactactcctag

SEQ ID NO: 280506 - DNA, 321 bp, Artificial Sequence
  derived and/or modified sequence
atgggctgcgtgcagtgcaaggacaaggaggccaccaagctgaccgaggagcgggacgggtcgcttaaccagtctagtggctacaggtacgggacagatccgactcctcaacactaccccagttttggcgtgacaagcattcctaattataataatttccatgctgctggaggtcagggtctgactgtgtttggtggggtgaactcaagcagtcatacaggaacgctaaggacgaggggcgggaccggcgtcaccctgttcgtagctctgtacgactacgaggctagaactgaggacgatctctctttccataagggatag

SEQ ID NO: 280507 - DNA, 198 bp, Artificial Sequence
  derived and/or modified sequence
atgggctgcgtgcagtgcaaggacaaggaggccaccaagctgaccgaggaacgggatggtagtcttaatcagtcttcaggctaccgctatggtactgacccaacaccccaacactacccctcttttggggtgacatccatccctaattataataattttcacgccgcaggcgggcaggggctgacagtttttgggtag

SEQ ID NO: 280508 - DNA, 528 bp, Artificial Sequence
  derived and/or modified sequence
atgggctgcgtgcagtgcaaggacaaggaggccaccaagctgaccgaggagcgagatggatccctgaaccagtctagcgggtatcgctacggcactgaccctaccccacagcattatccatctttcggcgtcactagtattcccaactacaataattttcatgcggccggggggcaaggcctcacagtctttggcggcgtcaattcatcaagtcataccggcaccttacggactaggggtgggacaggggttacacttttcgtcgcactctatgactatgaggctcgtacagaggatgacttgtcttttcacaagggagagaaattccagattctgaacagttccgaaggagactggtgggaggctcgatctctaacaacaggggagaccggctacatccccagcaactatgtcgccccagtggactctatccaggccgaggaatggtacttcggcaaactggggaggaaggacgctgagcggcaacttctgagttttggcaatcctcgcggcacgttcctaatatag

SEQ ID NO: 280509 - DNA, 462 bp, Artificial Sequence
  derived and/or modified sequence
atgggctgcgtgcagtgcaaggacaaggaggccaccaagctgaccgaggaacgagatggaagtctgaatcagtcttctggttatcgatacggcaccgatccgaccccccagcattatccatcgtttggagtcacttctataccaaattacaataactttcatgccgctggcggacagggtctgactgtgttcgggggagtcaatagcagttcccataccggaaccctgcgaacacggggtggaaccggcgtgacactttttgtcgcgttatatgattatgaggcacgtacagaggatgacctcagtttccacaaaggcgaaaagtttcagattctgaattcgtctgaaggcgactggtgggaggcacgctccctgaccacgggcgaaaccgggtatatccccagcaactacgtggctcccgtggactctatccaggcagaagaatggtattttggcaagtag

SEQ ID NO: 280510 - DNA, 357 bp, Artificial Sequence
  derived and/or modified sequence
atgggctgcgtgcagtgcaaggacaaggaggccaccaagctgaccgaagagcgcgacggttcactgaaccagagctccgggtatcgttatgggactgatcccacgccccaacattatccctcgttcggcgtgacgtccatacccaactataataatttccatgcagccggtgggcaggggctgactgtgttcgggggagtaaactcctcttcgcacaccgggacgctgaggacccgtggcgggacaggcgttaccctgtttgtggcgttgtatgactatgaagcccggaccgaggacgatctaagcttccacaagggagagaaatttcaaatcttaaacagctcagagggagattag

SEQ ID NO: 280511 - DNA, 561 bp, Artificial Sequence
  derived and/or modified sequence
atgggctgcgtgcagtgcaaggacaaggaggccaccaagctgaccgaagagcgtgacgggtccctcaaccagtcctccggctataggtacggaactgaccccacaccccaacactacccgtcatttggggtcacatctatccctaactacaataacttccacgcagcaggcggacaagggcttaccgtgttcggtggagtgaactcctcctcccacactggaaccctgagaacaaggggaggcacgggagttacattgttcgtggccttatacgactatgaagcaaggacagaggacgacctgagcttccacaaaggcgaaaagttccaaatcctcaattcttctgagggcgactggtgggaagctcggtctctgaccacaggggagactggatacattccgtcaaattatgtagctccagtcgactccatccaagccgaagaatggtactttgggaagctggggaggaaagatgcagagcgccagctgctatctttcggcaatcccagagggaccttcttaatcagggaatcagaaacaacaaagggagcctattcttag

SEQ ID NO: 280512 - DNA, 312 bp, Artificial Sequence
  derived and/or modified sequence
atgggctgcgtgcagtgcaaggacaaggaggccaccaagctgaccgaggaacgggatggatccctcaatcagtcctctgggtaccgctacggaaccgaccctaccccccagcactacccaagcttcggcgtgacgtccataccaaactacaataatttccacgcagctggcggtcagggattaaccgtgtttggaggtgtaaacagctcctcccataccggcactttgcgcactcgcgggggaaccggcgtgacactgttcgtagcattatatgactatgaagccagaacagaagatgacttaagcttttag

SEQ ID NO: 280513 - DNA, 459 bp, Artificial Sequence
  derived and/or modified sequence
atgggctgcgtgcagtgcaaggacaaggaggccaccaagctgaccgaagagagggatggcagtttgaaccagagctccgggtacagatatgggactgatcctacgccacagcattaccccagtttcggcgttacaagcattccaaattacaacaacttccacgccgctggtggccagggactcaccgtgtttggtggagttaatagctctagccacaccggcacgctgagaacccgtggcggtactggagtgactctgttcgtcgctctgtacgactacgaggctaggaccgaggacgacctgagcttccacaagggagagaagttccagatactcaactcaagtgagggtgactggtgggaagcgaggagtttgaccaccggcgagaccgggtacattccttccaattacgtcgctcctgtggattcgatacaggcagaggagtggtatttcgggtag

SEQ ID NO: 280514 - DNA, 351 bp, Artificial Sequence
  derived and/or modified sequence
atgggctgcgtgcagtgcaaggacaaggaggccaccaagctgaccgaggagcgtgacggctcactaaatcaatcctccgggtatcgctacggcaccgatcccactccacagcactacccgtccttcggcgtgacttctatccccaattataacaactttcacgctgccggcggtcagggcctcaccgtttttgggggtgtgaacagcagttcccatacgggtaccctacgcacgcgcggtggtacgggggtgacactttttgtagctttgtacgattacgaagccaggactgaggacgacctgtcctttcacaagggagaaaaattccagatccttaatagctcagagtag

SEQ ID NO: 280515 - DNA, 423 bp, Artificial Sequence
  derived and/or modified sequence
atgggctgcgtgcagtgcaaggacaaggaggccaccaagctgaccgaggaacgggacggctctttaaatcaaagttccggataccgttacgggactgaccccacgcctcagcactacccatcgtttggcgtgacaagcatacctaactacaacaatttccatgccgccggcggacagggacttaccgtcttcgggggtgtgaacagctcgtcccacactggaaccttgcggactcgaggaggcacaggcgtcaccctattcgtcgccctttacgattacgaagccaggactgaggatgacctgagcttccacaagggagaaaagtttcagatcttgaattcttctgagggggactggtgggaagcacgctctctcacgactggggagacagggtacattccatccaattacgtcgcaccatag

SEQ ID NO: 280516 - DNA, 438 bp, Artificial Sequence
  derived and/or modified sequence
atgggctgcgtgcagtgcaaggacaaggaggccaccaagctgaccgaggaacgcgatgggagtctaaatcagtcaagcgggtatcgctatgggacagaccctaccccccagcattacccttcttttggcgtgacaagcatccccaattacaataatttccatgctgccggaggtcagggattgacggtgttcggcggggtaaactcttcaagtcatactggcaccctccggacgcgcggcggcacaggcgtcacgttgttcgtggccttatatgattatgaggctcggacagaggacgatcttagttttcacaagggagaaaagttccagattctaaacagttccgagggcgattggtgggaggcacgttccttgacgacaggcgagaccggatatatccccagtaactatgtcgcccccgtggactccatccagtag

SEQ ID NO: 280517 - DNA, 1449 bp, Artificial Sequence
  derived and/or modified sequence
atgggctgcgtgcagtgcaaggacaaggaggccaccaagctgaccgaggagcgtgacggttctttaaatcaatccagcggctataggtacgggaccgaccccactccccagcactatcccagctttggcgtcacatctatcccgaattacaacaattttcacgcagccgggggccagggcctgacagtgttcgggggggttaactcgagttcccacaccggaaccctaagaactcgagggggcactggcgtgacccttttcgtcgccttatatgactacgaggcacggaccgaggatgatttaagctttcataaaggtgagaaatttcaaatcctgaactcgtcggaaggggattggtgggaggccaggagcctcacaaccggtgaaacggggtatatccccagcaattacgttgcccctgtcgactccatccaggctgaagagtggtactttggcaagctcgggcgcaaggacgccgaaaggcagttgttgtcttttggtaacccacgcggaacattcctgattagagagtcagaaacgacaaaaggagcatacagcctgtccatccgtgattgggatgacatgaaaggtgaccatgtgaagcattacaagatcagaaagctggacaacggcggctattatattacaaccagggcccagtttgaaacgctgcagcaactggtgcaacattactccggcacatggaatggaaacacaaaagtggctatcaaaaccttgaaacccggcacgatgagccctgagtcctttcttgaagaagctcaaatcatgaaaaaacttaaacacgacaaactggtccagctgtatgctgtcgtttcggaagaacctatctatatcgtgacggaatatatgaacaagggatccctgctcgatttcttgaaggatggagaagggcgcgccctcaagctgccaaatctcgtggacatggctgcacaggttgccgccggaatggcgtacatcgagcgtatgaactacatacaccgcgatctgcggagtgcaaatatactagttgggaatggactaatttgtaaaattgccgatttcggactggcccggctgatagaagacaacgaatacacagccagacaaggagccaaatttccgatcaaatggacagcacctgaggcggcactctacggcagattcactattaaatctgatgtgtggagcttcgggattttgttgactgaactggttaccaaaggacgggtgccctaccccggaatgaataatcgcgaggtcttagagcaggtggagagaggatatcggatgccttgtcctcaggactgtcctatctcccttcatgaactgatgattcactgctggaaaaaagatccagaggagagacccaccttcgagtacctgcagtcattcctggaggattactttactgccacggaaccccaataccaaccaggggaaaacctgtag

SEQ ID NO: 280518 - DNA, 1449 bp, Artificial Sequence
  derived and/or modified sequence
atgggttgcgtgcagtgtaaagacaaagaggccactaaactcacggaagaacgtgacggaagcctgaatcagtcatccggctatcgctatggtacagacccaaccccacaacattatccaagtttcggggtgaccagtatcccaaattacaacaacttccacgcagctggtggtcagggactgaccgtgttcggcggagttaactcaagcagtcacaccggtactctgcgtacacgcggtggaacgggcgtcacccttttcgttgcactttatgactatgaggctcgcacagaagacgacctctcattccacaaaggcgagaagttccaaattctgaattcttctgaaggggattggtgggaggctagaagccttactacaggcgaaactggttacatccccagtaattatgtggcgcctgtggatagcattcaagcggaagagtggtattttggcaaattggggagaaaagatgccgagagacagttactatctttcggaaacccacgagggactttcctgataagagagtccgagacaacgaagggggcttatagcttatccatcagggattgggatgacatgaaaggagatcacgtgaaacattacaagattcggaaactcgataatggcggatattacattactacccgcgcacagtttgagaccttgcagcagctggtccaacattactctggcacttggaacggcaacaccaaggtggccatcaaaaccctaaaacccggtactatgtccccagagtcattcctggaggaggctcagatcatgaagaaactcaaacacgataagctggtgcagctatatgccgtggtctcggaagaacccatctatattgtgaccgagtacatgaacaaagggtccctgctggatttcctgaaagatggagaaggccgagctctgaagctgcccaatctagtcgatatggcagcacaggtggctgcagggatggcctatatcgagcgaatgaattacattcatagggatttgcgatccgctaacatcctcgtaggtaacggcctgatttgcaaaattgcagattttggccttgctagactgattgaagataacgaatacaccgccaggcaaggagcaaaattcccaattaagtggacggctcctgaggccgcactatacgggcgtttcacaattaagtccgacgtgtggagctttggaattctgctcacagaactggtgacaaagggacgcgtgccctatcccggaatgaacaatagggaggttctcgagcaggtggaaaggggatacaggatgccatgccctcaggactgccccatctcactgcacgaactgatgatccattgttggaagaaagacccagaggagaggcccacttttgagtatctgcagagctttctggaagattactttactgctaccgaaccccagtatcagcctggcgaaaacctttag

SEQ ID NO: 280519 - DNA, 363 bp, Artificial Sequence
  derived and/or modified sequence
atggggtgcgtgcaatgtaaggataaagaggcgactaagctcactgaggaaagggacggatcattgaaccagagctcagggtatcgctacggaacagacccaacccctcaacactacccaagctttggagtcaccagcatcccaaactataataattttcacgccgctggagggcaaggcctaacagttttcggcggtgtgaactccagctcacataccggaactctccgtactcgagggggaacaggtgttacccttttcgtcgcgctgtatgactacgaggcccgaactgaggatgatctgagcttccataagggcgagaaatttcaaattctcaacagcagcgagggggattggtggtag

SEQ ID NO: 280520 - DNA, 699 bp, Artificial Sequence
  derived and/or modified sequence
atggggtgcgtgcagtgcaaagataaggaagcaaccaagctcactgaggaaagagacggttctctaaaccagtccagtggatatagatacggtacagatcccaccccccagcactaccctagcttcggagtcacttcaataccaaactataataacttccacgcagcaggtggacagggcctgactgtgttcgggggtgtcaactccagttctcatactggcaccctgagaacaaggggcggtacaggcgtaaccctattcgttgcactctatgactacgaggctaggactgaggacgacttgtcatttcacaaaggggaaaaattccagattcttaatagttcggagggagattggtgggaagcacgaagtctgactacgggagagacagggtacataccttcaaactatgtagcgcctgtggactctatccaggccgaggaatggtactttggaaaactgggacgtaaggacgccgaacgacaactgttaagtttcggtaacccacgcggaacctttctgattagggagagcgagacaactaagggcgcttattctttatccattcgcgattgggacgacatgaagggagaccacgtgaagcactacaaaattaggaagcttgacaacggaggttactacatcaccacaagagcccagtttgagacactgcagcagttggttcagcattattcctag

SEQ ID NO: 280521 - DNA, 321 bp, Artificial Sequence
  derived and/or modified sequence
atgggatgcgtccaatgcaaagacaaagaagctactaaactcactgaagaaagagatggctccctcaatcagagctccggttacagatacggaactgaccctaccccacagcactatccctcatttggcgtgacttccatccctaattacaacaactttcatgcagcaggtggacagggtctgaccgtgtttggcggagtgaatagctcttctcacactgggacactgagaacccggggaggaacaggagttacacttttcgtagccctctatgattatgaggccaggactgaggacgatttatcctttcacaaagggtag

SEQ ID NO: 280522 - DNA, 198 bp, Artificial Sequence
  derived and/or modified sequence
atgggctgtgtacagtgtaaagataaagaggccaccaagttaaccgaggagcgcgatggatcgctcaatcagagttctggctacagatacggcacagatccaaccccgcaacattacccctccttcggcgtgacttccatacccaattacaacaattttcatgccgcaggaggacagggcctgactgtcttcgggtag

SEQ ID NO: 280523 - DNA, 528 bp, Artificial Sequence
  derived and/or modified sequence
atgggttgtgtgcaatgtaaggataaagaggctaccaagctcacagaagagcgagatgggtcacttaatcaaagctctgggtatagatatggcaccgatcccacaccacagcactaccccagctttggtgtcacctccatcccaaactacaataactttcacgcggcaggagggcagggattgaccgtttttggcggtgtgaacagctcatctcacacgggaaccttgcggacccgaggtggaacgggagtaacactgttcgtagcgctctacgattatgaagccaggacagaggatgacctgtctttccataaaggtgaaaaatttcagatcctgaactcttctgagggggattggtgggaagccaggtctctgaccactggcgagacggggtatatccccagcaattacgttgcacctgtggatagcatccaagctgaggagtggtactttggaaagcttggtcgtaaggacgcggagcggcaattgctctcctttggtaacccacggggaacgtttctgatatag

SEQ ID NO: 280524 - DNA, 462 bp, Artificial Sequence
  derived and/or modified sequence
atgggctgcgtgcagtgtaaggataaagaggccactaagctgaccgaggaacgagacggaagcttaaaccagagctctgggtacaggtacggaactgatcctacgccccaacattaccctagctttggtgttacaagcatccctaattataacaatttccacgccgcagggggacaaggcctgacagtgtttggtggggtgaatagctccagccataccggtaccctaaggaccagggggggaaccggcgttacgctgttcgtcgccttgtacgactacgaagctaggacagaggatgacctgtcttttcacaagggtgagaaattccagatcctaaacagcagcgagggagattggtgggaggcgagaagcttaacaacaggggagactgggtatataccatcaaactatgtcgctccggttgacagcatccaagctgaagaatggtacttcgggaagtag

SEQ ID NO: 280525 - DNA, 357 bp, Artificial Sequence
  derived and/or modified sequence
atgggctgtgttcagtgtaaagacaaagaggccaccaagctgactgaagagcgggatgggtcactgaaccaatcttcagggtatagatatggaactgaccccactccccagcattatccttccttcggcgtcacatccatccccaactataacaactttcacgccgcaggcggtcagggcctgacagtgttcggaggggtgaattcctctagtcacaccggcacgctgcgcactcggggtggtacaggcgtcaccctctttgtggccctgtacgattacgaggctcgtacggaagatgatctgtcctttcacaagggggagaaatttcagatcctcaattcatccgaaggagattag

SEQ ID NO: 280526 - DNA, 561 bp, Artificial Sequence
  derived and/or modified sequence
atgggttgtgtgcagtgcaaggataaagaggccacaaagttgaccgaagagagggatggatctctaaaccagtctagtggatacagatatgggacggatccgactccccagcactatcccagttttggggtcactagcatccccaattacaacaactttcatgctgccggaggccaaggcttaactgtatttgggggagtcaattcctccagccacactgggacactccgcaccagggggggaaccggtgtgacactctttgtggcattgtacgactatgaagcgcgtaccgaggatgacttgagtttccacaaaggagagaaatttcagatcctgaatagtagcgaaggcgactggtgggaagcacgtagtctcaccaccggggaaactggatacataccctccaattatgtcgcgccagtcgactctattcaggctgaggagtggtactttggcaaactggggagaaaggacgcagaacgccagctgctctcattcggaaaccccagggggacgttcctgattcgcgagtccgagactaccaaaggcgcatactcttag

SEQ ID NO: 280527 - DNA, 312 bp, Artificial Sequence
  derived and/or modified sequence
atgggctgcgtgcagtgtaaagacaaggaggccacaaaactgactgaggagcgggatggaagcctgaatcagtcatctggatatagatacggcaccgacccgaccccacagcactatccctccttcggggttaccagcattcccaattacaacaattttcacgccgctggaggtcaggggctgacagtatttgggggagtcaatagcagctctcacacaggcactttgcggacaagaggaggtaccggggtaacgctctttgtggccctgtacgactacgaggcgcgaacagaggatgatctttcattctag

SEQ ID NO: 280528 - DNA, 459 bp, Artificial Sequence
  derived and/or modified sequence
atgggttgcgtgcagtgcaaggataaagaagctaccaaacttaccgaggagagggacggctcattgaatcagtcatccggatatcggtacgggacggacccgacaccacagcattacccaagtttcggcgtgacttctatacccaactacaataacttccatgccgctggcggtcagggactgactgtgtttggcggtgtcaatagttcctctcatacaggcactctgagaacccgtggtggaactggcgtgacacttttcgttgccctgtatgactatgaggccaggactgaggacgatctcagtttccacaagggagagaaatttcagatcctcaactcgagtgaaggcgactggtgggaagcacggtctctaaccaccggagagacagggtatatcccaagtaactatgtcgctcctgtggacagcattcaggcggaggaatggtatttcggatag

SEQ ID NO: 280529 - DNA, 351 bp, Artificial Sequence
  derived and/or modified sequence
atgggatgcgtgcagtgtaaagataaggaggcaaccaagctgacagaggagcgggatggctccttgaaccagagctcaggataccgctatgggactgacccaacgccccaacattaccctagttttggtgtgactagcatccctaattataataatttccatgctgcgggagggcaaggcctgaccgtgtttggtggggtgaattcatccagtcacacaggcactttgcgaacgagaggcggtacaggagttacactgttcgtcgccctctacgattatgaggccaggactgaggacgacctttcctttcataagggtgaaaagtttcaaattctcaattcttccgaatag

SEQ ID NO: 280530 - DNA, 423 bp, Artificial Sequence
  derived and/or modified sequence
atgggttgcgttcaatgcaaagataaggaagccacaaagctgacagaggaaagggacgggtctttgaatcaaagcagcggatacaggtacgggaccgatccaaccccacaacactacccaagcttcggggtcacatccatacctaactacaataactttcatgccgcaggcggacaaggcttgaccgtctttgggggagtaaattcttcttctcacaccggcactctgcggactaggggaggtacaggcgtcaccttatttgttgcattgtatgattatgaggctcggacggaagacgatctcagctttcacaagggcgagaaatttcagattctcaactctagcgagggtgactggtgggaagcaaggagcctgacaacaggcgagacaggctacataccgtccaattacgtcgccccttag

SEQ ID NO: 280531 - DNA, 438 bp, Artificial Sequence
  derived and/or modified sequence
atgggatgtgtgcagtgcaaggacaaagaggctactaagctcactgaagagcgggatggtagtctgaaccagtcaagcggttacaggtatggcacagacccaactcctcagcattatccttcttttggcgttacctctatcccaaactacaataactttcacgctgctgggggtcagggtctgacagtctttgggggagtcaattccagcagccataccggaaccctgagaacccgaggcggtactggcgttaccttgtttgtggccctgtatgactacgaggccagaacagaagatgacctgtccttccataaaggagagaagtttcagattcttaatagtagtgagggcgactggtgggaggcaaggagccttactacgggcgagacaggctacattccttcaaactacgtcgcccctgttgactcaatccagtag

SEQ ID NO: 280532 - DNA, 1449 bp, Artificial Sequence
  derived and/or modified sequence
atgggctgcgtgcagtgtaaggacaaggaagccacaaagcttaccgaagagcgagatggtagtctgaaccaatcaagcggatataggtacggcactgacccaactcctcaacattacccttccttcggcgtaaccagtatccctaactataataactttcacgcggcaggcggtcaaggcctgacagtgtttgggggtgttaattcatccagtcatacgggaactctccgcactcgcggtggcacaggcgtcactctgtttgtggcattatacgattatgaggcaaggaccgaggacgacttgtccttccacaaaggcgagaagtttcagattttgaattcaagcgagggggactggtgggaggcccgatccttaaccaccggtgaaaccggatatatcccctccaactacgtggcccctgtcgattccattcaggcagaggaatggtacttcggcaagctcggtagaaaggacgcagagagacaactgcttagctttggtaaccccagggggacgtttctaattcgggaatcagagaccaccaagggggcttattcgctctctattagggactgggatgatatgaagggcgaccacgtcaagcactataaaatcagaaagctggacaacggcggttattacattaccacccgggctcagtttgagaccttgcagcagttggtgcagcattactccggtacctggaacggcaatactaaggtggcaattaagactctgaagccagggaccatgagtcccgaatcatttctggaggaggctcagatcatgaagaaattgaagcacgataaacttgtgcagctatatgctgtggtctcggaggaaccaatctacatcgtgaccgaatacatgaataagggatccctccttgattttctcaaagatggagaaggtcgggcattgaagttaccaaatctggtagacatggctgcccaggtggccgctgggatggcctatatagaaaggatgaattacattcatcgcgatcttagatcggccaacatactcgtgggcaatggactgatatgcaaaatagcagactttggtctggcacggctcatcgaggataatgagtacacagctaggcagggagctaagtttcccatcaaatggactgcccctgaggccgcattgtatggacggttcactatcaaatcagacgtctggtcttttggcatcctgctaaccgagctggtgaccaaggggagggtgccctatcccggtatgaacaatagagaggtgctggagcaggtggagcggggatacagaatgccatgtccccaggattgcccaatcagcctccacgagttaatgattcattgctggaagaaggacccagaggaaagacctacctttgagtatctgcagagcttcctggaggattactttactgccaccgaaccccagtatcagccgggagagaacttatag

SEQ ID NO: 280533 - DNA, 1449 bp, Artificial Sequence
  derived and/or modified sequence
atgggctgcgtgcagtgcaaggacaaggaggccaccaagctgaccgaggagagagacggcagcctgaaccagagcagcggctacagatacggcaccgaccccaccccccagcactaccccagcttcggcgtgaccagcatccccaactacaacaacttccacgccgccggcggccagggcctgaccgtgttcggcggcgtgaacagcagcagccacaccggcaccctgagaaccagaggcggcaccggcgtgaccctgttcgtggccctgtacgactacgaggccagaaccgaggacgacctgagcttccacaagggcgagaagttccagatcctgaacagcagcgagggcgactggtgggaggccagaagcctgaccaccggcgagaccggctacatccccagcaactacgtggcccccgtggacagcatccaggccgaggagtggtacttcggcaagctgggcagaaaggacgccgagagacagctgctgagcttcggcaaccccagaggcaccttcctgatcagagagagcgagaccaccaagggcgcctacagcctgagcatcagagactgggacgacatgaagggcgaccacgtgaagcactacaagatcagaaagctggacaacggcggctactacatcaccaccagagcccagttcgagaccctgcagcagctggtgcagcactacagcggcacctggaacggcaacaccaaggtggccatcaagaccctgaagcccggcaccatgagccccgagagcttcctggaggaggcccagatcatgaagaagctgaagcacgacaagctggtgcagctgtacgccgtggtgagcgaggagcccatctacatcgtgaccgagtacatgaacaagggcagcctgctggacttcctgaaggacggcgagggcagagccctgaagctgcccaacctggtggacatggccgcccaggtggccgccggcatggcctacatcgagagaatgaactacatccacagagacctgagaagcgccaacatcctggtgggcaacggcctgatctgcaagatcgccgacttcggcctggccagactgatcgaggacaacgagtacaccgccagacagggcgccaagttccccatcaagtggaccgcccccgaggccgccctgtacggcagattcaccatcaagagcgacgtgtggagcttcggcatcctgctgaccgagctggtgaccaagggcagagtgccctaccccggcatgaacaacagagaggtgctggagcaggtggagagaggctacagaatgccctgcccccaggactgccccatcagcctgcacgagctgatgatccactgctggaagaaggaccccgaggagagacccaccttcgagtacctgcagagcttcctggaggactacttcaccgccaccgagccccagtaccagcccggcgagaacctgtag

SEQ ID NO: 280534 - DNA, 363 bp, Artificial Sequence
  derived and/or modified sequence
atgggctgcgtgcagtgcaaggacaaggaggccaccaagctgaccgaggagagagacggcagcctgaaccagagcagcggctacagatacggcaccgaccccaccccccagcactaccccagcttcggcgtgaccagcatccccaactacaacaacttccacgccgccggcggccagggcctgaccgtgttcggcggcgtgaacagcagcagccacaccggcaccctgagaaccagaggcggcaccggcgtgaccctgttcgtggccctgtacgactacgaggccagaaccgaggacgacctgagcttccacaagggcgagaagttccagatcctgaacagcagcgagggcgactggtggtag

SEQ ID NO: 280535 - DNA, 699 bp, Artificial Sequence
  derived and/or modified sequence
atgggctgcgtgcagtgcaaggacaaggaggccaccaagctgaccgaggagagagacggcagcctgaaccagagcagcggctacagatacggcaccgaccccaccccccagcactaccccagcttcggcgtgaccagcatccccaactacaacaacttccacgccgccggcggccagggcctgaccgtgttcggcggcgtgaacagcagcagccacaccggcaccctgagaaccagaggcggcaccggcgtgaccctgttcgtggccctgtacgactacgaggccagaaccgaggacgacctgagcttccacaagggcgagaagttccagatcctgaacagcagcgagggcgactggtgggaggccagaagcctgaccaccggcgagaccggctacatccccagcaactacgtggcccccgtggacagcatccaggccgaggagtggtacttcggcaagctgggcagaaaggacgccgagagacagctgctgagcttcggcaaccccagaggcaccttcctgatcagagagagcgagaccaccaagggcgcctacagcctgagcatcagagactgggacgacatgaagggcgaccacgtgaagcactacaagatcagaaagctggacaacggcggctactacatcaccaccagagcccagttcgagaccctgcagcagctggtgcagcactacagctag

SEQ ID NO: 280536 - DNA, 321 bp, Artificial Sequence
  derived and/or modified sequence
atgggctgcgtgcagtgcaaggacaaggaggccaccaagctgaccgaggagagagacggcagcctgaaccagagcagcggctacagatacggcaccgaccccaccccccagcactaccccagcttcggcgtgaccagcatccccaactacaacaacttccacgccgccggcggccagggcctgaccgtgttcggcggcgtgaacagcagcagccacaccggcaccctgagaaccagaggcggcaccggcgtgaccctgttcgtggccctgtacgactacgaggccagaaccgaggacgacctgagcttccacaagggctag

SEQ ID NO: 280537 - DNA, 198 bp, Artificial Sequence
  derived and/or modified sequence
atgggctgcgtgcagtgcaaggacaaggaggccaccaagctgaccgaggagagagacggcagcctgaaccagagcagcggctacagatacggcaccgaccccaccccccagcactaccccagcttcggcgtgaccagcatccccaactacaacaacttccacgccgccggcggccagggcctgaccgtgttcggctag

SEQ ID NO: 280538 - DNA, 528 bp, Artificial Sequence
  derived and/or modified sequence
atgggctgcgtgcagtgcaaggacaaggaggccaccaagctgaccgaggagagagacggcagcctgaaccagagcagcggctacagatacggcaccgaccccaccccccagcactaccccagcttcggcgtgaccagcatccccaactacaacaacttccacgccgccggcggccagggcctgaccgtgttcggcggcgtgaacagcagcagccacaccggcaccctgagaaccagaggcggcaccggcgtgaccctgttcgtggccctgtacgactacgaggccagaaccgaggacgacctgagcttccacaagggcgagaagttccagatcctgaacagcagcgagggcgactggtgggaggccagaagcctgaccaccggcgagaccggctacatccccagcaactacgtggcccccgtggacagcatccaggccgaggagtggtacttcggcaagctgggcagaaaggacgccgagagacagctgctgagcttcggcaaccccagaggcaccttcctgatctag

SEQ ID NO: 280539 - DNA, 462 bp, Artificial Sequence
  derived and/or modified sequence
atgggctgcgtgcagtgcaaggacaaggaggccaccaagctgaccgaggagagagacggcagcctgaaccagagcagcggctacagatacggcaccgaccccaccccccagcactaccccagcttcggcgtgaccagcatccccaactacaacaacttccacgccgccggcggccagggcctgaccgtgttcggcggcgtgaacagcagcagccacaccggcaccctgagaaccagaggcggcaccggcgtgaccctgttcgtggccctgtacgactacgaggccagaaccgaggacgacctgagcttccacaagggcgagaagttccagatcctgaacagcagcgagggcgactggtgggaggccagaagcctgaccaccggcgagaccggctacatccccagcaactacgtggcccccgtggacagcatccaggccgaggagtggtacttcggcaagtag

SEQ ID NO: 280540 - DNA, 357 bp, Artificial Sequence
  derived and/or modified sequence
atgggctgcgtgcagtgcaaggacaaggaggccaccaagctgaccgaggagagagacggcagcctgaaccagagcagcggctacagatacggcaccgaccccaccccccagcactaccccagcttcggcgtgaccagcatccccaactacaacaacttccacgccgccggcggccagggcctgaccgtgttcggcggcgtgaacagcagcagccacaccggcaccctgagaaccagaggcggcaccggcgtgaccctgttcgtggccctgtacgactacgaggccagaaccgaggacgacctgagcttccacaagggcgagaagttccagatcctgaacagcagcgagggcgactag

SEQ ID NO: 280541 - DNA, 561 bp, Artificial Sequence
  derived and/or modified sequence
atgggctgcgtgcagtgcaaggacaaggaggccaccaagctgaccgaggagagagacggcagcctgaaccagagcagcggctacagatacggcaccgaccccaccccccagcactaccccagcttcggcgtgaccagcatccccaactacaacaacttccacgccgccggcggccagggcctgaccgtgttcggcggcgtgaacagcagcagccacaccggcaccctgagaaccagaggcggcaccggcgtgaccctgttcgtggccctgtacgactacgaggccagaaccgaggacgacctgagcttccacaagggcgagaagttccagatcctgaacagcagcgagggcgactggtgggaggccagaagcctgaccaccggcgagaccggctacatccccagcaactacgtggcccccgtggacagcatccaggccgaggagtggtacttcggcaagctgggcagaaaggacgccgagagacagctgctgagcttcggcaaccccagaggcaccttcctgatcagagagagcgagaccaccaagggcgcctacagctag

SEQ ID NO: 280542 - DNA, 312 bp, Artificial Sequence
  derived and/or modified sequence
atgggctgcgtgcagtgcaaggacaaggaggccaccaagctgaccgaggagagagacggcagcctgaaccagagcagcggctacagatacggcaccgaccccaccccccagcactaccccagcttcggcgtgaccagcatccccaactacaacaacttccacgccgccggcggccagggcctgaccgtgttcggcggcgtgaacagcagcagccacaccggcaccctgagaaccagaggcggcaccggcgtgaccctgttcgtggccctgtacgactacgaggccagaaccgaggacgacctgagcttctag

SEQ ID NO: 280543 - DNA, 459 bp, Artificial Sequence
  derived and/or modified sequence
atgggctgcgtgcagtgcaaggacaaggaggccaccaagctgaccgaggagagagacggcagcctgaaccagagcagcggctacagatacggcaccgaccccaccccccagcactaccccagcttcggcgtgaccagcatccccaactacaacaacttccacgccgccggcggccagggcctgaccgtgttcggcggcgtgaacagcagcagccacaccggcaccctgagaaccagaggcggcaccggcgtgaccctgttcgtggccctgtacgactacgaggccagaaccgaggacgacctgagcttccacaagggcgagaagttccagatcctgaacagcagcgagggcgactggtgggaggccagaagcctgaccaccggcgagaccggctacatccccagcaactacgtggcccccgtggacagcatccaggccgaggagtggtacttcggctag

SEQ ID NO: 280544 - DNA, 351 bp, Artificial Sequence
  derived and/or modified sequence
atgggctgcgtgcagtgcaaggacaaggaggccaccaagctgaccgaggagagagacggcagcctgaaccagagcagcggctacagatacggcaccgaccccaccccccagcactaccccagcttcggcgtgaccagcatccccaactacaacaacttccacgccgccggcggccagggcctgaccgtgttcggcggcgtgaacagcagcagccacaccggcaccctgagaaccagaggcggcaccggcgtgaccctgttcgtggccctgtacgactacgaggccagaaccgaggacgacctgagcttccacaagggcgagaagttccagatcctgaacagcagcgagtag

SEQ ID NO: 280545 - DNA, 423 bp, Artificial Sequence
  derived and/or modified sequence
atgggctgcgtgcagtgcaaggacaaggaggccaccaagctgaccgaggagagagacggcagcctgaaccagagcagcggctacagatacggcaccgaccccaccccccagcactaccccagcttcggcgtgaccagcatccccaactacaacaacttccacgccgccggcggccagggcctgaccgtgttcggcggcgtgaacagcagcagccacaccggcaccctgagaaccagaggcggcaccggcgtgaccctgttcgtggccctgtacgactacgaggccagaaccgaggacgacctgagcttccacaagggcgagaagttccagatcctgaacagcagcgagggcgactggtgggaggccagaagcctgaccaccggcgagaccggctacatccccagcaactacgtggccccctag

SEQ ID NO: 280546 - DNA, 438 bp, Artificial Sequence
  derived and/or modified sequence
atgggctgcgtgcagtgcaaggacaaggaggccaccaagctgaccgaggagagagacggcagcctgaaccagagcagcggctacagatacggcaccgaccccaccccccagcactaccccagcttcggcgtgaccagcatccccaactacaacaacttccacgccgccggcggccagggcctgaccgtgttcggcggcgtgaacagcagcagccacaccggcaccctgagaaccagaggcggcaccggcgtgaccctgttcgtggccctgtacgactacgaggccagaaccgaggacgacctgagcttccacaagggcgagaagttccagatcctgaacagcagcgagggcgactggtgggaggccagaagcctgaccaccggcgagaccggctacatccccagcaactacgtggcccccgtggacagcatccagtag

SEQ ID NO: 280547 - DNA, 132 bp, Artificial Sequence
  derived and/or modified sequence
tgagtgctgggcagccccaagcccgaggagatccccctgacctggatccagcccggcaccaccgtgctgaactgcagccacgacttcctgagcgagagcctgatcatcatcagaagaatggccatcttctag

SEQ ID NO: 280548 - DNA, 132 bp, Artificial Sequence
  derived and/or modified sequence
tgagtacttgggagcccgaaaccagaggagatccctctgacttggatccagcccggtactaccgtgcttaactgttcacatgatttcctgtccgaatccctaatcatcatcaggcgaatggccattttctag

SEQ ID NO: 280549 - DNA, 132 bp, Artificial Sequence
  derived and/or modified sequence
tgagtgctgggcagccccaagccagaggagatccccctgacctggatccagcccggcaccaccgtgctgaactgcagccatgacttcctgtctgagagcctcatcatcatccggaggatggccatcttctag

SEQ ID NO: 280550 - DNA, 132 bp, Artificial Sequence
  derived and/or modified sequence
tgagtgctgggcagccccaagcccgaggagatccccctgacctggatacagccaggcaccacagtcctcaactgttctcacgactttttgtccgagtctctgataatcatccgccgaatggctatcttctag

SEQ ID NO: 280551 - DNA, 132 bp, Artificial Sequence
  derived and/or modified sequence
taagtgctgggatcacctaaacccgaggagattccgttaacatggatccagcctgggaccactgtgctcaactgttcccacgattttctgagcgagtctctcataattatccgtagaatggccatattttag

SEQ ID NO: 280552 - DNA, 999 bp, Artificial Sequence
  derived and/or modified sequence
tgaggcagagagggcctgctgggccagagaagaccccaggacggccaggccagaagcagctgcagccccggcggcagaacccccgccgccagagacagcatcgtgagagaggtgatccagaacagcaaggaggtgctgagcctgctgcaggagaagaaccccgccttcaagcccgtgctggccatcatccaggccggcgacgacaacctgatgcaggagatcaaccagaacctggccgaggaggccggcctgaacatcacccacatctgcctgccccccgacagcagcgaggccgagatcatcgacgagatcctgaagatcaacgaggacaccagagtgcacggcctggccctgcagatcagcgagaacctgttcagcaacaaggtgctgaacgccctgaagcccgagaaggacgtggacggcgtgaccgacatcaacctgggcaagctggtgagaggcgacgcccacgagtgcttcgtgagccccgtggccaaggccgtgatcgagctgctggagaagagcgtgggcgtgaacctggacggcaagaagatcctggtggtgggcgcccacggcagcctggaggccgccctgcagtgcctgttccagagaaagggcagcatgaccatgagcatccagtggaagaccagacagctgcagagcaagctgcacgaggccgacatcgtggtgctgggcagccccaagcccgaggagatccccctgacctggatccagcccggcaccaccgtgctgaactgcagccacgacttcctgagcggcaaggtgggctgcggcagccccagaatccacttcggcggcctgatcgaggaggacgacgtgatcctgctggccgccgccctgagaatccagaacatggtgagcagcggcagaagatggctgagagagcagcagcacagaagatggagactgcactgcctgaagctgcagcccctgagccccgtgcccagcgacatcgagatcagcagaggccagaccccctag

SEQ ID NO: 280553 - DNA, 189 bp, Artificial Sequence
  derived and/or modified sequence
atgagcatccagtggaagaccagacagctgcagagcaagctgcacgaggccgacatcgtggtgctgggcagccccaagcccgaggagatccccctgacctggatccagcccggcaccaccgtgctgaactgcagccacgacttcctgagcgagagcctgatcatcatcagaagaatggccatcttctag

SEQ ID NO: 280554 - DNA, 384 bp, Artificial Sequence
  derived and/or modified sequence
atggtgagcagcggcagaagatggctgagagagcagcagcacagaagatggagactgcactgcctgaagctgcagcccctgagccccgtgcccagcgacatcgagatcagcagaggccagacccccaaggccgtggacgtgctggccaaggagatcggcctgctggccgacgagatcgagatctacggcaagagcaaggccaaggtgagactgagcgtgctggagagactgaaggaccaggccgacggcaagtacgtgctggtggccggcatcacccccacccccctgggcgagggcaagagcaccgtgaccatcggcctggtgcaggccctgaccgcccacctgaacgtgaacagcttcgcctgcctgagacagcccagctag

SEQ ID NO: 280555 - DNA, 999 bp, Artificial Sequence
  derived and/or modified sequence
tgagggcgggagggtttactaggtcagcggcgaccacaggacgggcaggcacgctcatcatgctccccaggaggccgcacccccgctgctagggattcaattgttagagaggtgattcaaaacagcaaggaagtgctgtcacttcttcaagagaagaatccagcctttaagcctgtgctggccatcattcaggccggcgacgataacttaatgcaggagatcaatcaaaatttggccgaagaagccggactaaacattacacatatctgtttgcccccagatagctcagaagccgagataatagacgagatactgaaaatcaatgaggacacccgggtccatgggctggctctccagatatccgagaacctcttcagtaataaggttttaaatgccttgaaaccagaaaaggacgtcgatggtgtcaccgacatcaacttaggcaaactggtcaggggcgatgcccatgagtgcttcgtgtctccagtcgcaaaagctgtcatcgagcttcttgagaagtcggtgggagtgaatctggatggtaagaaaattctggttgtaggggctcacgggagtctggaagccgccctgcagtgcctatttcagcgcaaaggaagcatgacgatgtcgattcagtggaaaacgaggcagctgcagtctaagctgcacgaggcggacatagtggtgctgggcagtcccaagcctgaggagatccctctcacatggatccagccaggtacaacagtactcaactgtagccacgattttctttccgggaaagttggatgcggcagtccaagaatccattttggaggtcttattgaagaagacgacgtgatccttttagcagcagcgctgcgcattcagaacatggtatcatctggtaggcgctggctgagagaacagcagcatcgacggtggcgtcttcactgccttaagttgcagcccctaagccccgtgcctagtgatatcgagatctccagaggacaaacaccgtag

SEQ ID NO: 280556 - DNA, 189 bp, Artificial Sequence
  derived and/or modified sequence
atgagcatccaatggaaaacccgacagctgcagtccaaactgcacgaagccgacattgtcgttctgggctcccctaagcccgaggagatacccctgacctggattcaacccggcacaactgtcctaaactgctcacacgactttctgtcagagagcctcatcatcattagacgaatggctatcttctag

SEQ ID NO: 280557 - DNA, 996 bp, Artificial Sequence
  derived and/or modified sequence
gtggccgggagggcctgcttggacagcggcggccgcaggatggccaggcccggagcagctgcagccccggcggccgaacgcccgcggcgcgggactccatcgtcagagaagtcattcagaattcaaaagaagttctaagtttattgcaagaaaaaaaccctgccttcaagccggttcttgcaattatccaggcaggtgacgacaacttgatgcaggaaatcaaccagaatttggctgaggaggctggtctgaacatcactcacatttgcctccctccagatagcagtgaagccgagattatagatgaaatcttaaagatcaatgaagataccagagtacatggccttgcccttcagatctctgagaacttgtttagcaacaaagtcctcaatgccttgaaaccagaaaaagatgtggatggagtaacagacataaacctggggaagctggtgcgaggggatgcccatgaatgttttgtttcacctgttgccaaagctgtaattgaacttcttgaaaaatcagtaggtgtcaacctagatggaaagaagattttggtagtgggggcccatgggtctttggaagctgctctacaatgcctgttccagagaaaagggtccatgacaatgagcatccagtggaaaacacgccagcttcaaagcaagcttcacgaggctgacattgtggtcctaggctcacctaagccagaagagattccccttacttggatacaaccaggaactactgttctcaactgctcccatgacttcctgtcagggaaggttgggtgtggctctccaagaatacattttggtggactcattgaggaagatgatgtgattctccttgctgcagctctgcgaattcagaacatggtcagtagtggaaggagatggcttcgtgaacagcagcacaggcggtggagacttcactgcttgaaacttcagcctctctcccctgtgccaagtgacattgagatttcaagaggacaaactccaa

SEQ ID NO: 280558 - DNA, 384 bp, Artificial Sequence
  derived and/or modified sequence
atggtctccagtggcaggagatggcttcgggaacagcagcatcggcgctggcgcttgcactgcctaaagctgcagccattatcacctgtcccttcggatattgagataagcagaggccagaccccaaaagccgtggatgtactggccaaagagatcggattacttgcagacgaaattgaaatatacggtaaatcaaaagccaaagtgcggctgtcagtcctggagcggttgaaggatcaggccgacggaaagtatgtcctggtcgccggaattaccccgacgccccttggcgagggaaaatctaccgtcactattggcttggtgcaggcactgactgctcacctgaacgtcaattcattcgcctgcctcagacaaccctcttag

SEQ ID NO: 280559 - DNA, 999 bp, Artificial Sequence
  derived and/or modified sequence
tgaggaagagagggcctgctgggccagaggcggccccaggacggccaggcccggagcagctgcagccctgggggccgcaccccagctgcccgggacagcatcgtgcgggaggtgatccagaacagcaaggaggtgctgagcctgctgcaggagaagaacccagccttcaagcctgtgctggccatcatccaggccggagatgacaacctgatgcaggagatcaaccagaacctggccgaggaggccggcctgaacatcacccacatctgcctgcccccagacagcagcgaggccgagatcattgatgagatcctgaagatcaatgaagacaccagggtgcacggcctggccctgcagatcagcgagaacctcttcagcaacaaggtgctgaatgccctgaagccagagaaggatgtggatggagtgacagacatcaacctgggcaagctggtgagaggagatgcccatgaatgttttgtgtcccctgtggccaaggccgtcatcgagctgctggagaagtctgtgggcgtgaacctggatggcaagaagatcctggtggtgggcgcccacggcagcctggaggccgccctgcagtgcctcttccagaggaagggctccatgaccatgagcatccagtggaagacccggcagctgcagagcaagctgcatgaagctgacatcgtggtgctgggcagccccaagccagaggagatccccctgacctggatccagcccggcaccaccgtgctgaactgcagccatgacttcctgagcggcaaggtgggctgcggcagcccccgcatccactttggaggcctcatcgaggaggatgatgtgatcctgctggccgccgccctgcgcatccagaacatggtgagcagcggccgccgctggctgcgggagcagcagcaccggcgctggaggctgcactgcctgaagctgcagcccctgagccctgtgcccagcgacatcgagatcagccggggccagaccccctag

SEQ ID NO: 280560 - DNA, 189 bp, Artificial Sequence
  derived and/or modified sequence
atgagcatccagtggaagacccggcagctgcagagcaagctgcatgaagctgacatcgtggtgctgggcagccccaagccagaggagatccccctgacctggatccagcccggcaccaccgtgctgaactgcagccatgacttcctgtctgagagcctcatcatcatccggaggatggccatcttctag

SEQ ID NO: 280561 - DNA, 384 bp, Artificial Sequence
  derived and/or modified sequence
atggtgagcagcggccgccgctggctgcgggagcagcagcaccggcgctggaggctgcactgcctgaagctgcagcccctgagccctgtgcccagcgacatcgagatcagccggggccagacccccaaggctgtggatgtgctggccaaggagatcggcctgctggctgatgaaattgagatctacggcaagagcaaggccaaggtgcggctgtctgtgctggagcggctgaaggaccaggctgatggcaagtatgtgctggtggccggcatcacccccacccccctgggggagggcaagagcacagtgaccatcggcctggtgcaggccctgacagcccacctgaatgtgaacagctttgcctgcctgcggcagcccagctag

SEQ ID NO: 280562 - DNA, 588 bp, Artificial Sequence
  derived and/or modified sequence
cagaatttggctgaggaggctggtctgaacatcactcacatttgcctccctccagatagcagtgaagccgagattatagatgaaatcttaaagatcaatgaagataccagagtacatggccttgcccttcagatctctgagaacttgtttagcaacaaagtcctcaatgccttgaaaccagaaaaagatgtggatggagtaacagacataaacctggggaagctggtgcgaggggatgcccatgaatgttttgtttcacctgttgccaaagctgtaattgaacttcttgaaaaatcagtaggtgtcaacctagatggaaagaagattttggtagtgggggcccatgggtctttggaagctgctctacaatgcctgttccagagaaaagggtccatgacaatgagcatccagtggaaaacacgccagcttcaaagcaagcttcacgaggctgacattgtggtcctaggctcacctaagccagaagagattccccttacttggatacaaccaggaactactgttctcaactgctcccatgacttcctgtcagaaagtttgattatcattagaagaatggccatcttttaa

SEQ ID NO: 280563 - DNA, 999 bp, Artificial Sequence
  derived and/or modified sequence
tgaggccgggagggcctgctgggccagcggcggccccaggacggccaggccaggagcagctgctcccccggtgggcgaactcctgcggcacgagacagtattgtaagagaagtgatccaaaattcaaaggaggtacttagcctgcttcaggaaaaaaaccctgcatttaagccagttctggcaatcatccaggcaggggacgataatctcatgcaggaaattaatcagaatttggctgaagaggccggcctgaacattacccacatttgtctgccacctgactctagcgaggcagaaatcatcgatgagatcctgaaaataaatgaggatacccgcgtgcatgggctggctctacagatttctgagaatttgttttctaataaagtgctgaatgctctgaaacccgagaaggatgttgacggcgtaacggacatcaacttgggaaaactcgtcagaggtgatgcccatgaatgtttcgtctctccagtggccaaggccgtgattgaactactcgaaaaatctgtcggggtcaatttggatggcaaaaaaattttagtggttggggcccacggatcacttgaagccgcattgcagtgcctcttccagcgtaaggggtccatgacgatgtctatccaatggaaaactcgtcagttgcagagtaaactgcatgaggctgatatcgtggtcctcgggtcccctaagcctgaggagattccactgacgtggatccagccaggcaccacagtactcaactgctcccatgattttctgagcgggaaggtggggtgcggatctcctcgcatccactttggaggcctgatcgaggaggacgatgtgatcctgctcgccgcagccctgcggatccagaatatggtgtcctcaggtaggagatggttacgggaacagcagcaccggcgctggcggctccactgtttgaaattacagccactaagccctgtacctagcgacatcgaaatttctcggggccagactccctag

SEQ ID NO: 280564 - DNA, 189 bp, Artificial Sequence
  derived and/or modified sequence
atgagcatccagtggaagacccggcagctgcagagcaagctgcacgaggccgatatcgtggttctcggcagtcctaagccagaagagatcccgcttacatggattcagcccggtaccactgtcctgaattgttcacacgacttcctgtctgaaagcctcattatcatccgacgcatggctatcttctag

SEQ ID NO: 280565 - DNA, 384 bp, Artificial Sequence
  derived and/or modified sequence
atggtgagcagcggccggcggtggctgcgggagcagcagcaccggcgctggcgactccactgcctaaagctgcaacctctatctcctgttccgtccgatatcgagatttctcgcggacaaactcccaaggcggttgatgttctggcaaaagagattgggttactggccgatgaaatcgagatctatgggaagagtaaagccaaggttaggcttagtgtgctagaacgtctgaaggatcaggcagatggcaaatatgtgctggtggccggtatcacaccaacccctctcggcgagggaaagagcaccgtaacgattgggctggtgcaggccctgaccgcccatcttaatgttaattctttcgcttgcctcaggcagccatcatag

SEQ ID NO: 280566 - DNA, 999 bp, Artificial Sequence
  derived and/or modified sequence
tgagggagggaggggctactgggtcaacgtcgtcctcaggacggccaagcacgcagttcatgctcgccagggggtcgcacacccgcagctagagatagcattgttcgcgaagtcattcaaaactctaaagaagtcctctccctgctgcaggaaaaaaaccccgctttcaagcctgtcctggcaattattcaggccggtgacgacaatctgatgcaagagataaaccagaacttggctgaggaagcagggctgaacataacccacatatgcctgccacctgattcctcagaggccgaaatcatcgacgagatcttaaaaataaacgaagatacacgtgtacacgggctggccctgcagatctctgagaatctcttcagcaacaaggtgctgaatgcacttaagccagaaaaagatgttgacggtgtcacagatatcaatttgggaaagttggtgcggggagacgcccatgaatgctttgtcagtcctgtggccaaggctgtcatcgagcttctagaaaaaagcgttggagtaaatctcgatgggaagaagattctcgtggtaggcgctcatgggagcctggaggcagccctgcaatgcctctttcagcggaagggcagcatgaccatgtcaatccagtggaaaacgcgccagctccagtcaaaactacacgaagcagacattgtcgttttaggctctcctaagcccgaagagattcccctgacatggatacagccagggacaactgtgctcaattgctcccacgatttccttagtggcaaagtgggatgtggatctccgaggatacattttggtggcctcatcgaggaagatgacgtaatcctgctcgccgctgcgttaaggatccagaacatggttagtagtgggaggcgttggctccgggaacagcagcatagaaggtggaggctgcattgcctgaagctccagccactctctccagtgccctccgatatagaaatcagtcgtggtcaaaccccctag

SEQ ID NO: 280567 - DNA, 373 bp, Artificial Sequence
  derived and/or modified sequence
ggtcctaggctcacctaagccagaagagattccccttacttggatacaaccaggaactactgttctcaactgctcccatgacttcctgtcagaaagtttgattatcattagaagaatggccatcttttaaagtgattcattgacttgtccctggagaaatcatgagttagatgagagtgtttagtgggaagtgaaaagacccgtccacggtttcggatgagatcctcgttggactgtgatcccaggatattacccaggcccagatcgtagacaacctcccaatggagtcctgcccctacacgggcagggggtgaaataatgattccctttcttaattttctttagccatgaaatttattaaaaatgtatgtct

SEQ ID NO: 280568 - DNA, 189 bp, Artificial Sequence
  derived and/or modified sequence
atgtccatccagtggaagacccggcaattgcagtccaagcttcatgaagcagatattgtggtgctgggaagcccaaaacccgaggagattcccctgacgtggatccagcccggaactacggtgttaaattgcagccatgattttttaagcgaatccctgatcatcatcaggaggatggccatcttctag

SEQ ID NO: 280569 - DNA, 384 bp, Artificial Sequence
  derived and/or modified sequence
atggtcagcagcgggaggcggtggttgagagagcagcaacacagaaggtggcggctgcattgcctgaagttacagcccctgagtccggtgccctccgatatcgaaatctcaagaggtcaaactccgaaggccgtcgacgtcctcgctaaggaaattggattgcttgctgacgaaattgagatctacggcaagtctaaagccaaggtccggctcagcgtcctcgagcgactgaaggaccaggccgacggcaaatacgttcttgtcgccggaataacccctacgcccctgggcgaggggaaatcaacggtgaccattgggcttgtgcaggccttgactgcgcatctcaatgtgaattcatttgcatgtctgcgtcagcccagctag

SEQ ID NO: 280570 - DNA, 1134 bp, Artificial Sequence
  derived and/or modified sequence
gggagaggcgggctcgggcccagcgccgcccgcgcgaagctccctggtgttgtgcgcccttccccgcgcgcggcccctcctgctgggctggggtctgtggctgacgtccgcttttcccggaacggcaaagagaagtcattcagaattcaaaagaagttctaagtttattgcaagaaaaaaaccctgccttcaagccggttcttgcaattatccaggcaggtgacgacaacttgatgcaggaaatcaaccagaatttggctgaggaggctggtctgaacatcactcacatttgcctccctccagatagcagtgaagccgagattatagatgaaatcttaaagatcaatgaagataccagagtacatggccttgcccttcagatctctgagaacttgtttagcaacaaagtcctcaatgccttgaaaccagaaaaagatgtggatggagtaacagacataaacctggggaagctggtgcgaggggatgcccatgaatgttttgtttcacctgttgccaaagctgtaattgaacttcttgaaaaatcagcttcacgaggctgacattgtggtcctaggctcacctaagccagaagagattccccttacttggatacaaccaggaactactgttctcaactgctcccatgacttcctgtcagggaaggttgggtgtggctctccaagaatacattttggtggactcattgaggaagatgatgtgattctccttgctgcagctctgcgaattcagaacatggtcagtagtggaaggagatggcttcgtgaacagcagcacaggcggtggagacttcactgcttgaaacttcagcctctctcccctgtgccaagtgacattgagatttcaagaggacaaactccaaaagctgtggatgtccttgccaaggagattggattgcttgcagatgaaattgaaatctatggcaaaagcaaagccaaagtacgtttgtccgtgctagaaaggttaaaggatcaagcagatggaaaatacgtcttagttgctgggatcacacccacccctcttggagaagggaagagcacagtcaccatcgggcttgtgcaggctctgaccgcacacctgaatgtcaactcctttgcctgcttgaggcagccttcc

SEQ ID NO: 280571 - protein, 438 aa, Artificial Sequence
  derived and/or modified sequence
MTSYMAIDGSALQVPLRQKPRRKTQGFLTMSRRRISCKDLGHADCQGWLYKKKEKGSFLSNKWKKFWVILKGSSLYWYSNQMAEKADGFVNLPDFTVERASECKKKHAFKISHPQIKTFYFAAENVQEMNVWLNKLGSAVIHQESTTKDEECYSESEQEDPEIAAETPPPPHASQTQSLTAQQASSSSPSLSGTSYSFSSLENTVKTPSSFPSSLSKERQSLPDTVNSLSAAEDEGQPITFAVQVHSPVPSEAGIHKALENSFVTSESGFLNSLSSDDTSSLSSNHDHLTVPDKPAGSKIMDKEETKVSEDDEMEKLYKSLEQASLSPLGDRRPSTKKELRKSFVKRCKNPSINEKLHKIRTLNSTLKCKEHDLAMINQLLDDPKLTARKYREWKVMNTLLIQDIYQQQRASPAPDDTDDTPQELKKSPSSPSVENSI

SEQ ID NO: 280572 - DNA, 1317 bp, Artificial Sequence
  derived and/or modified sequence
atgaccagctacatggccatcgacggcagcgccctgcaggtgcccctgagacagaagcccagaagaaagacccagggcttcctgaccatgagcagaagaagaatcagctgcaaggacctgggccacgccgactgccagggctggctgtacaagaagaaggagaagggcagcttcctgagcaacaagtggaagaagttctgggtgatcctgaagggcagcagcctgtactggtacagcaaccagatggccgagaaggccgacggcttcgtgaacctgcccgacttcaccgtggagagagccagcgagtgcaagaagaagcacgccttcaagatcagccacccccagatcaagaccttctacttcgccgccgagaacgtgcaggagatgaacgtgtggctgaacaagctgggcagcgccgtgatccaccaggagagcaccaccaaggacgaggagtgctacagcgagagcgagcaggaggaccccgagatcgccgccgagacccccccccccccccacgccagccagacccagagcctgaccgcccagcaggccagcagcagcagccccagcctgagcggcaccagctacagcttcagcagcctggagaacaccgtgaagacccccagcagcttccccagcagcctgagcaaggagagacagagcctgcccgacaccgtgaacagcctgagcgccgccgaggacgagggccagcccatcaccttcgccgtgcaggtgcacagccccgtgcccagcgaggccggcatccacaaggccctggagaacagcttcgtgaccagcgagagcggcttcctgaacagcctgagcagcgacgacaccagcagcctgagcagcaaccacgaccacctgaccgtgcccgacaagcccgccggcagcaagatcatggacaaggaggagaccaaggtgagcgaggacgacgagatggagaagctgtacaagagcctggagcaggccagcctgagccccctgggcgacagaagacccagcaccaagaaggagctgagaaagagcttcgtgaagagatgcaagaaccccagcatcaacgagaagctgcacaagatcagaaccctgaacagcaccctgaagtgcaaggagcacgacctggccatgatcaaccagctgctggacgaccccaagctgaccgccagaaagtacagagagtggaaggtgatgaacaccctgctgatccaggacatctaccagcagcagagagccagccccgcccccgacgacaccgacgacaccccccaggagctgaagaagagccccagcagccccagcgtggagaacagcatctag

SEQ ID NO: 280573 - DNA, 1317 bp, Artificial Sequence
  derived and/or modified sequence
atgaccagttatatggcaatcgatggtagtgcccttcaggttccactgcgacagaaacctaggcgaaagacccaaggattcctgaccatgtcgaggaggaggattagctgcaaggacctcgggcacgcagactgtcagggatggttgtacaaaaagaaagagaagggatcttttctgtctaataaatggaagaaattttgggtaatcctcaaaggttcctccttatattggtattctaaccaaatggcggagaaagctgacgggtttgtgaatctccccgattttaccgtggagcgcgcctccgaatgtaaaaagaagcatgccttcaaaatatctcacccccagatcaaaacattttattttgccgccgagaacgtgcaggaaatgaatgtctggttgaacaaactcgggtctgccgtgattcatcaggagtccaccacaaaagacgaggaatgctattctgagtcggagcaggaggatccagagattgccgctgaaactcctcccccaccccatgcttcacaaactcaaagcctgacggcccaacaggcttcctccagtagcccaagtttatctggaacttcgtattccttttcctcactcgaaaatactgtgaaaaccccaagtagctttccctcaagtctgagcaaggagaggcagtcgctaccagacacagtgaactctctgtccgctgctgaagacgagggacagccgataacgttcgcagtccaggtgcatagcccagtgccatccgaagccgggatacataaggctctcgaaaactcctttgtcacctccgaaagcggatttttgaattctctgtcttccgacgacaccagcagcctctcatcgaaccatgaccacttaacagtgcctgataagcccgccggcagtaagatcatggataaagaagaaaccaaagtaagcgaagacgatgaaatggagaagctgtataaatcacttgagcaggcctcactgagccctcttggcgaccgcagaccatctactaagaaggagctgcggaaaagctttgtgaagagatgtaaaaacccctctatcaacgagaagttgcacaaaattaggactctcaacagtacactgaaatgtaaagagcacgacctggctatgataaaccaactgctggacgaccccaagctgactgcgcgtaagtaccgcgagtggaaggtgatgaataccctcctgattcaggatatctaccaacagcaacgtgctagtcccgcacctgatgatacagacgataccccgcaggagctaaagaaaagcccatcatctccctctgttgagaatagcatatag

SEQ ID NO: 280574 - DNA, 1317 bp, Artificial Sequence
  derived and/or modified sequence
atgactagctatatggccatcgacggaagtgcactgcaggtgcccctccgccagaagccccggcgcaagacccaagggttcctcaccatgagccggcgcagaataagctgcaaggacttgggtcatgcagattgtcagggttggttgtacaagaaaaaggagaaaggtagctttctctcaaataaatggaaaaaattttgggttatcctaaagggcagcagcctgtactggtattcgaaccagatggccgagaaagccgacgggtttgtcaatcttcccgattttaccgttgagcgtgcaagcgagtgcaaaaagaaacatgctttcaagatctcgcatcctcagattaaaacattctacttcgccgcggagaacgtgcaggaaatgaacgtctggttgaacaaactcggcagcgccgttattcaccaagagtctactactaaggacgaagaatgctattctgagagcgaacaggaagatcccgagatcgcagccgaaactccaccaccccctcatgcatcccagactcaatctcttaccgcacagcaggcctcaagttcatcgccatcccttagcggcacctcctactcattctcaagtcttgagaacacagtgaagaccccctcgagtttcccttcttccctctcgaaggaacggcagtcactgccagacacggtcaactcgctgagtgcagcagaagatgagggccagccgattacatttgccgtacaggttcactcaccggtgccatccgaggcaggcatccataaggcccttgaaaattcctttgttacctcagagagcggctttctgaacagcctgagctcagacgatacctcctcactgagttccaaccatgatcatctgactgtgcctgacaaacctgccggcagcaaaataatggataaggaggagaccaaggtgagcgaagacgacgagatggagaagctgtacaagagtcttgaacaggcttccttaagtcccctgggcgatagacgtcctagtaccaaaaaagagctgagaaaatcattcgtgaagcgctgtaagaacccaagtatcaatgagaaactgcataaaatccgcactttgaattctactctgaagtgtaaggagcatgaccttgctatgattaaccagttgctcgacgaccccaagctgacggcccgcaagtaccgagagtggaaagtgatgaatactctcctgatacaggatatctaccaacaacaaagggccagcccagcccctgacgacacagatgacacacctcaagagctcaaaaaaagcccgagttcccctagtgtcgagaactcaatctag

SEQ ID NO: 280575 - DNA, 1658 bp, Artificial Sequence
  derived and/or modified sequence
gtactatgaggcttctgaatccaggaataagactgctcttggatttactctctttgtattgcatgtcaaaggcaacagaactggaccaagaaaattcataactttttgcttttgtttctactaagatgacatcatacatggctattgatggcagtgctcttcaggttcccttgcgtcagaagcccaggaggaaaactcaaggttttctcacgatgagtcggaggaggatatcgtgtaaagatctgggccatgctgactgccaagggtggctgtataagaaaaaggaaaagggaagtttcctaagcaacaaatggaaaaagttctgggtgatactgaaggggtcgtcactgtactggtatagcaatcaaatggcagagaaagctgatggatttgtcaacctgcctgatttcactgtggaaagagcatctgaatgcaagaaaaagcatgcttttaagatcagccatccacagatcaagaccttttattttgcagctgagaatgtgcaggaaatgaacgtgtggttaaataaacttggatcggctgtaatccatcaggaatccactacaaaggatgaagaatgttacagtgaaagtgaacaggaagatccagaaatagctgcggagacaccaccccctcctcacgcttcccagactcagtctttgactgcacagcaggcatcttcatcctcacccagcctgagtggaacgtcgtattctttctcttccctggaaaatacagtgaagacacccagcagttttccttcctccttatctaaagagagacaatccttgcctgacacagttaacagtttgtctgctgctgaagatgagggacaaccaataacgtttgctgtgcaagttcattcacctgtaccctcagaggcaggcatccacaaggccctggaaaacagttttgtcacatcagaaagtggatttttgaactctttatctagtgatgatacttcttcattgagtagcaatcatgaccatcttactgtcccagataagcctgctggatcaaagatcatggacaaagaagagacaaaagtgtctgaagatgatgaaatggagaagctgtacaaatcattagagcaagctagtctatctcctcttggggaccgacgaccttcgactaaaaaggagttgagaaaatcctttgttaagcggtgtaaaaatccatctataaacgagaaactccacaaaatccgaacattgaatagcacattaaagtgtaaagaacatgatctggccatgattaaccagttgctggatgacccgaagctgacagccaggaaatacagagagtggaaagtcatgaacaccctgctgatccaggacatctatcagcagcagcgggcttcgcctgcccctgatgacactgatgacaccccccaggaactcaagaaatcaccttcttctccctctgttgaaaattccatttgagacaaagtcagggttttctcctcttatattttatcacaagcaactcttcaagatgttgcaaaagcttacatttttccttaaaaggaaaactgaaacccagtccttcaagcatcagcttcccatctaaagatgcacgttagatgaagataatcaccgaatacaccagggctcctcatttcagtcgtaacgcatccattgagattggaatgattgagt

SEQ ID NO: 280576 - DNA, 3267 bp, Artificial Sequence
  derived and/or modified sequence
acatgtagtcttctcactttcttcttgccatgagactgagagagtgctccttgggacggagtttcagagtcatcaactgggctcatgagaaccacaagaaacctacgaaggcactgggacagagcctggctgctggtcaaaggcaacagaactggaccaagaaaattcataactttttgcttttgtttctactaagatgacatcatacatggctattgatggcagtgctcttcaggttcccttgcgtcagaagcccaggaggaaaactcaaggttttctcacgatgagtcggaggaggatatcgtgtaaagatctgggccatgctgactgccaagggtggctgtataagaaaaaggaaaagggaagtttcctaagcaacaaatggaaaaagttctgggtgatactgaaggggtcgtcactgtactggtatagcaatcaaatggcagagaaagctgatggatttgtcaacctgcctgatttcactgtggaaagagcatctgaatgcaagaaaaagcatgcttttaagatcagccatccacagatcaagaccttttattttgcagctgagaatgtgcaggaaatgaacgtgtggttaaataaacttggatcggctgtaatccatcaggaatccactacaaaggatgaagaatgttacagtgaaagtgaacaggaagatccagaaatagctgcggagacaccaccccctcctcacgcttcccagactcagtctttgactgcacagcaggcatcttcatcctcacccagcctgagtggaacgtcgtattctttctcttccctggaaaatacagtgaagacacccagcagttttccttcctccttatctaaagagagacaatccttgcctgacacagttaacagtttgtctgctgctgaagatgagggacaaccaataacgtttgctgtgcaagttcattcacctgtaccctcagaggcaggcatccacaaggccctggaaaacagttttgtcacatcagaaagtggatttttgaactctttatctagtgatgatacttcttcattgagtagcaatcatgaccatcttactgtcccagataagcctgctggatcaaagatcatggacaaagaagagacaaaagtgtctgaagatgatgaaatggagaagctgtacaaatcattagagcaagctagtctatctcctcttggggaccgacgaccttcgactaaaaaggagttgagaaaatcctttgttaagcggtgtaaaaatccatctataaacgagaaactccacaaaatccgaacattgaatagcacattaaagtgtaaagaacatgatctggccatgattaaccagttgctggatgacccgaagctgacagccaggaaatacagagagtggaaagtcatgaacaccctgctgatccaggacatctatcagcagcagcgggcttcgcctgcccctgatgacactgatgacaccccccaggaactcaagaaatcaccttcttctccctctgttgaaaattccatttgagacaaagtcagggttttctcctcttatattttatcacaagcaactcttcaagatgttgcaaaagcttacatttttccttaaaaggaaaactgaaacccagtccttcaagcatcagcttcccatctaaagatgcacgttagatgaagataatcaccgaatacaccagggctcctcatttcagtcgtaacgcatccattgagattggaatgattgagttcagttgaaaggcgttttttgtgttcctactgggagctcacggtgatgtggggctctaggggggatgtgagaaatgtctcttctgttcattgctctccagagaatgctatggacaagaatcaaattttaccaggagtaattgcccatggaaacattctgtttttcaaaagaagaatgtacatattccacttgactgggaagctgtgtggcccaaatcactgtttgagtggaggaatgttttctagagcagtgactggaaggacaaacgtggtgttgcagaacaaaaattccttgcctttggtatggaatggtggtgccttttccatgtgatgagaaatgcttcatagacagtggcatgtgggagagctgaaggaggaggcgtgttccatattccactcattcaaaggacagcttggtgttttcacactttatgcaggttaggggatctgattaatgtttcctttccttacaacagctagagaaaacatctcatcacaattggagacctctacttcctttgagctttcctactcaatggtaggagataggaatatgttccgcaaagaatgtctactgctcttgtccttggctgtgatccctatacatagtgtgaatttatatccaggtttcccaggatcaatattgacaagacgactttggcatctgaattgttttaatatctttactcaaaaaaacaaaaaaacaaaaacccatggaagcaacaaaagagttaaacatgagggatttatttttgtatgtttatatgtcacttgtgtgctatgtgaatagctatgtttgttatttaaatatatttatagaagttcaaattactagtgtttaaaagatgatatactattatatattgtgcttagtatatatttgatgagtctatactttttgcttgagaaaaatagaaatactattgattcactggtgttatgatgttgcactgtgtctgaggaatgctcaggaaatcttgtgggaaaaaaatggggcatgcattcataatttttcattttcttccccaccccaacccccatgagctcttaaatttagatttctatctcttgtaagtcactcttttaaccagcaaaggactttcatcttagattatcctttctattaaataaactttaagctttgtgccatttatgcctgcaaaccttagaccaaaggcaacacaactaatgtcatcttttcattaaagactaatagaaatttagaaatcattgtgttaaagagagctatagagaaacaatatgaaagtcttcccttactaatcaccatgaatatttctcaccataggaataaccacaacccaccaagtacccatgttggccctgcctacccgtaacaaattgttcacacaacctattttgttttatagcttcaaagtgtggcttgacattcaaatggaaggaaccacctgaattatatctgcaaacaaaatggaaatagttgttgaatagttccccaagctttactaagaagccttaatactctgtaaacaaacaaacaaacaaaaaacaaccttagca

SEQ ID NO: 280577 - DNA, 1317 bp, Artificial Sequence
  derived and/or modified sequence
atgaccagctacatggccattgatggcagcgccctgcaggtgcccctgcggcagaagcccaggaggaagacccagggcttcctgaccatgagcagaagacgcatcagctgcaaggacctgggccatgctgactgccagggctggctgtacaagaagaaggagaagggcagcttcctgagcaacaagtggaagaagttctgggtgatcctgaagggcagcagcctgtactggtacagcaaccagatggccgagaaggcagatggctttgtgaacctgcctgacttcaccgtggagcgggccagcgagtgcaagaagaagcacgccttcaagatcagccacccccagatcaagaccttctactttgctgctgaaaatgtgcaggagatgaatgtgtggctgaacaagctgggcagcgctgtgatccaccaggagagcaccaccaaggatgaggagtgctacagcgagagcgagcaggaggaccctgagattgctgctgagaccccacctccaccccacgccagccagacccagagcctgacagcccagcaggccagcagcagcagccccagcctgagcggcaccagctacagcttcagcagcctggagaacacagtgaagacccccagcagcttccccagcagcctgagcaaggagcggcagagcctgcctgacacagtgaacagcctgtctgctgctgaagatgagggccagcccatcacctttgctgtgcaggtgcacagccctgtgcccagcgaggccggcatccacaaggccctggagaacagctttgtgaccagcgagagcggcttcctgaacagcctgagcagtgatgacaccagcagcctgagcagcaaccacgaccacctgactgtgcctgacaagccagctggcagcaagatcatggacaaggaggagaccaaggtgtctgaagatgatgagatggagaagctgtacaagagcctggagcaggccagcctgagccccctgggggaccggcggcccagcaccaagaaggagctgaggaagagctttgtgaagcgctgcaagaaccccagcatcaatgagaagctgcacaagatccgcaccctgaacagcaccctgaagtgcaaggagcatgacctggccatgatcaaccagctgctggatgaccccaagctgacagccaggaagtaccgggagtggaaggtgatgaacaccctgctgatccaggacatctaccagcagcagagggccagccctgccccagatgacacagatgacaccccccaggagctgaagaagagccccagcagccccagcgtggagaacagcatctag

SEQ ID NO: 280578 - DNA, 1317 bp, Artificial Sequence
  derived and/or modified sequence
atgaccagctacatggccatcgacggcagcgccctgcaggtgcccctgagacagaaacccaggcggaagacccagggattcttaacgatgtctcggaggcgaatctcatgcaaagacttgggccatgctgactgtcagggctggctatacaagaaaaaggagaaaggcagctttctctccaacaaatggaagaaattttgggtgatccttaaggggtcctccttgtactggtattccaatcagatggcagagaaggccgatggcttcgttaatttgcctgattttaccgtcgaacgggcatctgaatgtaagaagaagcatgcctttaagatcagccacccccagatcaaaacgttttactttgctgccgagaacgtgcaggaaatgaatgtttggctgaacaagctgggctccgctgtgatccatcaggagagtacaaccaaggatgaggaatgttactccgagagcgagcaggaagaccccgaaatcgcggccgagaccccacctccaccacacgccagccagactcaatcccttactgcgcagcaggcctccagcagtagcccttctttatcgggcactagttattccttcagttctctggaaaacacagtgaagactccttcctcattccccagcagtctttcaaaagaaaggcagtcactgcctgacacagtgaactcactctcggctgcagaagacgagggacagcccattaccttcgccgtgcaagtgcattcccccgtcccaagtgaggccggaatccataaggccctggaaaatagcttcgttaccagtgagtccggcttcctgaattcgctcagtagcgatgacacatcttcgctgtccagcaatcatgaccaccttacggtaccagacaagcccgccggtagcaaaattatggacaaggaagagacaaaagtctctgaagatgacgagatggagaagctttacaaaagtctggagcaggcatccctgtcccccttgggcgatagacgcccaagcaccaagaaggagctgcgcaagagcttcgtgaaacgatgtaaaaatccttcgataaacgaaaagctacacaagatacgcacgttaaactccaccctgaaatgtaaggagcatgacttggctatgataaaccaactgctcgacgacccaaagcttactgccaggaaatacagagagtggaaggtcatgaacaccctgctgatacaggacatttatcagcagcaacgagcctccccagcacccgacgacacggatgatacaccacaggaactcaagaagagtccctcgagtccgtctgttgaaaactccatctag

SEQ ID NO: 280579 - DNA, 1317 bp, Artificial Sequence
  derived and/or modified sequence
atgaccagctacatggccatcgacggcagcgccctgcaggtgcccctccgacaaaagccaagacgcaagacccagggcttcctgactatgtcacgccggcggatcagctgcaaagatctcggccacgcagattgccagggttggctgtacaaaaagaaggaaaaagggtcttttttgtcgaacaagtggaagaagttctgggttatcttgaaaggctcgtccttgtattggtactccaaccagatggccgagaaggctgacggatttgtgaatctgccagactttacagtggagagagcttcagagtgtaagaaaaagcatgcatttaaaatttcccatcctcagatcaaaaccttctatttcgctgcagagaacgtccaggaaatgaatgtctggcttaataaactgggcagcgccgtgatccaccaggagtccaccaccaaagatgaagagtgttattctgagtccgagcaggaagatccggagattgccgcagaaaccccccctccaccgcacgcatctcaaacccaatcactgaccgcacagcaagcttccagctcctccccaagcttgtctgggacgagttactccttctcttccctggagaacacggtcaagacaccaagctccttcccttcatccctcagcaaagaacggcagagtctgcctgacacagtgaacagcctcagtgctgctgaggacgagggccagccaatcactttcgccgtccaggtgcattcacctgtgcccagcgaagcaggaatccacaaagccttagaaaattccttcgtaacctccgagtcagggttcctgaattctttaagcagtgatgacacatccagcctctcctctaatcatgaccatctgaccgttccggacaagccagcaggaagcaagatcatggataaggaagaaacaaaagtcagcgaggacgatgaaatggagaaactgtataagtctctggagcaggcctcactgagtcctctgggtgacaggagaccctccaccaaaaaggagttaaggaagtcttttgtcaagcgatgcaagaatccgagtatcaatgaaaagctgcacaagatcaggaccttaaacagtaccctgaagtgtaaggagcatgatttggctatgatcaaccaactgctggacgacccgaagttgaccgctaggaagtatagagaatggaaagtgatgaacacattactcatccaggatatctatcagcagcagagagccagtcctgcacccgacgacacagacgacacgccacaggaactgaaaaagtcacctagcagcccaagcgtcgagaacagcatttag

SEQ ID NO: 280580 - DNA, 1317 bp, Artificial Sequence
  derived and/or modified sequence
atgacaagttacatggctatagacgggagcgccctgcaggtcccattaaggcagaagccaaggaggaagactcaaggattcttgacaatgtcccgcaggcgcattagctgcaaagaccttggtcacgccgactgccagggctggctttataagaagaaagaaaagggctccttcctttccaataaatggaaaaagttttgggttattttgaaggggagttcgctctactggtattctaatcagatggctgagaaggccgacgggtttgttaacctcccagatttcacagtcgaacgggcttcagaatgcaaaaaaaagcacgctttcaaaatcagccatccacaaatcaaaacattctactttgccgcagaaaacgtccaagagatgaatgtatggctcaacaagcttggctccgccgtcatacaccaggagagtaccaccaaagatgaagagtgttattccgagtccgagcaggaggaccccgaaatcgccgctgagacacccccacccccacatgcctcccagacacaatcactgacagctcagcaggcttcttccagctcccctagcttatctgggacctcttactcctttagcagcttagagaacacagtgaagactccctctagtttccccagtagcctgtccaaggagagacaatcacttccagatacagtcaacagtctgtctgccgctgaagacgaaggccagcccattacattcgcggtacaggtacattctccagtaccatccgaggctgggatccataaggccctcgagaacagcttcgtaacgtctgaatctggctttttaaacagcttgtcatctgatgacacatccagcctaagtagcaatcatgatcacttgacggtgcctgacaaaccagccggatctaaaatcatggacaaagaggagacaaaagtgtcagaggacgacgagatggaaaagttatataagtctcttgagcaggcgtccctcagccctctcggagatagacggcctagtaccaagaaggagctgagaaagagttttgtgaaaagatgtaaaaatccctcgattaacgaaaagctgcataagatccgaacgttgaattcgaccctaaaatgcaaagaacacgatctagctatgattaaccagctgctggatgaccctaagctgaccgctaggaaatatagggagtggaaggtcatgaacactctcttgattcaagatatctaccagcagcaacgtgcaagcccagcacccgacgacaccgacgacactccccaagaattgaaaaagtctcctagcagcccttcagtggaaaactccatttag

SEQ ID NO: 280581 - DNA, 1317 bp, Artificial Sequence
  derived and/or modified sequence
atgaccagttacatggcgatagatgggtcggccctgcaggtccccctcagacagaaacccaggcggaagacccaaggatttctgacgatgtccagaaggcgcattagctgcaaagacctggggcacgccgactgtcaaggctggttgtacaaaaaaaaagaaaaaggttccttcttgagtaacaaatggaaaaagttctgggttattctcaagggatctagcctttactggtattctaatcagatggctgaaaaagccgacgggtttgtcaatctccctgactttacggtcgaaagagcctctgaatgcaagaaaaaacatgcattcaagatctctcatcctcagattaagacattttatttcgcagctgaaaacgtgcaagagatgaacgtgtggctgaacaaactaggaagcgctgtgattcaccaggaaagcactacaaaggacgaagaatgttactcggaaagcgaacaagaagatcccgaaatcgccgctgaaacgccccctcctccccacgcttcacagacacagagcttgaccgcacagcaggcgtctagttcatctcccagcctgtccgggactagttactccttctctagcctcgagaatacagtaaaaaccccctccagctttccatccagtctttcgaaagagcggcagtcactccccgacaccgtcaactctttgtcagccgctgaggacgaaggacagccaatcaccttcgccgtacaggtccattcacctgttcctagcgaagccggtatccacaaagccctggagaattctttcgttacttccgaatccggcttccttaattcgctgtcttccgacgacacgagctctctgtcttctaaccacgatcacctaacagtacccgacaaaccagctggatctaaaatcatggacaaggaggaaacaaaagtttcagaagacgacgagatggagaaactgtataaatctctggagcaagcttcactgagcccgctaggcgatagacgcccatcgacaaaaaaagagctgcgcaagagcttcgtcaagcgttgtaagaaccctagcatcaatgaaaaactccataaaatccgcaccttaaatagcactctgaagtgcaaagagcacgacctagctatgattaatcagttgctggacgatcccaaattgacagccaggaagtacagggagtggaaggttatgaacacactgctgatccaggatatctaccagcagcagagagcgtcccccgcaccagacgacactgatgacactcctcaagaactgaaaaagtcacccagctcccccagtgttgagaatagcatctag

SEQ ID NO: 280582 - protein, 437 aa, Artificial Sequence
  derived and/or modified sequence
MTSYMAIDGSALVPLRQKPRRKTQGFLTMSRRRISCKDLGHADCQGWLYKKKEKGSFLSNKWKKFWVILKGSSLYWYSNQMAEKADGFVNLPDFTVERASECKKKHAFKISHPQIKTFYFAAENVQEMNVWLNKLGSAVIHQESTTKDEECYSESEQEDPEIAAETPPPPHASQTQSLTAQQASSSSPSLSGTSYSFSSLENTVKTPSSFPSSLSKERQSLPDTVNSLSAAEDEGQPITFAVQVHSPVPSEAGIHKALENSFVTSESGFLNSLSSDDTSSLSSNHDHLTVPDKPAGSKIMDKEETKVSEDDEMEKLYKSLEQASLSPLGDRRPSTKKELRKSFVKRCKNPSINEKLHKIRTLNSTLKCKEHDLAMINQLLDDPKLTARKYREWKVMNTLLIQDIYQQQRASPAPDDTDDTPQELKKSPSSPSVENSI

SEQ ID NO: 280583 - protein, 78 aa, Artificial Sequence
  derived and/or modified sequence
MTSYMAIDGSALVPLRQKPRRKTQGFLTMSRRRISCKDLGHADCQGWLYKKKEKGSFLSNKWKKFWVILKGSSLYWYS

SEQ ID NO: 280584 - DNA, 1314 bp, Artificial Sequence
  derived and/or modified sequence
atgaccagctacatggccatcgacggcagcgccctggtgcccctgagacagaagcccagaagaaagacccagggcttcctgaccatgagcagaagaagaatcagctgcaaggacctgggccacgccgactgccagggctggctgtacaagaagaaggagaagggcagcttcctgagcaacaagtggaagaagttctgggtgatcctgaagggcagcagcctgtactggtacagcaaccagatggccgagaaggccgacggcttcgtgaacctgcccgacttcaccgtggagagagccagcgagtgcaagaagaagcacgccttcaagatcagccacccccagatcaagaccttctacttcgccgccgagaacgtgcaggagatgaacgtgtggctgaacaagctgggcagcgccgtgatccaccaggagagcaccaccaaggacgaggagtgctacagcgagagcgagcaggaggaccccgagatcgccgccgagacccccccccccccccacgccagccagacccagagcctgaccgcccagcaggccagcagcagcagccccagcctgagcggcaccagctacagcttcagcagcctggagaacaccgtgaagacccccagcagcttccccagcagcctgagcaaggagagacagagcctgcccgacaccgtgaacagcctgagcgccgccgaggacgagggccagcccatcaccttcgccgtgcaggtgcacagccccgtgcccagcgaggccggcatccacaaggccctggagaacagcttcgtgaccagcgagagcggcttcctgaacagcctgagcagcgacgacaccagcagcctgagcagcaaccacgaccacctgaccgtgcccgacaagcccgccggcagcaagatcatggacaaggaggagaccaaggtgagcgaggacgacgagatggagaagctgtacaagagcctggagcaggccagcctgagccccctgggcgacagaagacccagcaccaagaaggagctgagaaagagcttcgtgaagagatgcaagaaccccagcatcaacgagaagctgcacaagatcagaaccctgaacagcaccctgaagtgcaaggagcacgacctggccatgatcaaccagctgctggacgaccccaagctgaccgccagaaagtacagagagtggaaggtgatgaacaccctgctgatccaggacatctaccagcagcagagagccagccccgcccccgacgacaccgacgacaccccccaggagctgaagaagagccccagcagccccagcgtggagaacagcatctag

SEQ ID NO: 280585 - DNA, 237 bp, Artificial Sequence
  derived and/or modified sequence
atgaccagctacatggccatcgacggcagcgccctggtgcccctgagacagaagcccagaagaaagacccagggcttcctgaccatgagcagaagaagaatcagctgcaaggacctgggccacgccgactgccagggctggctgtacaagaagaaggagaagggcagcttcctgagcaacaagtggaagaagttctgggtgatcctgaagggcagcagcctgtactggtacagctag

SEQ ID NO: 280586 - DNA, 1314 bp, Artificial Sequence
  derived and/or modified sequence
atgacttcctatatggccattgacggatcagctcttgtgccgctgcggcagaagcccagaaggaaaactcagggcttcttaacaatgtcacgccggcgaatcagctgtaaggatctcggtcacgcagactgccagggctggttgtacaagaaaaaggagaaaggcagctttctctctaacaagtggaagaaattctgggtgattctaaaagggtcgagcctgtattggtactctaatcagatggcggaaaaggccgatggattcgtaaaccttcctgattttaccgtcgagcgcgcatctgaatgtaagaagaagcacgcattcaagattagccacccccagatcaagacattttatttcgctgccgagaatgtacaagagatgaacgtctggttaaacaaactgggtagtgccgtgattcaccaggaaagcacaactaaggatgaagaatgctactctgagtcagagcaggaggacccagagatcgccgccgagacccctcctcctccccacgcatctcaaacacagtccctcactgcccagcaggcttccagcagtagtccatcattgtccgggacgtcctatagctttagttccttggagaacaccgttaaaaccccgagctcgttcccttcatcactcagcaaggaacggcagagcctacccgatacggtgaattcactgtcagccgccgaagacgagggccagccgatcacctttgctgtgcaggtccactcacctgtgcccagtgaggccgggattcacaaagccctcgagaactcttttgtgacctcagaatccgggtttctgaattcactaagcagtgatgacacctcctctttatcatccaatcacgaccatctcacagtgccggacaagcccgcgggctccaaaatcatggataaggaagaaacaaaagtgagtgaggatgatgagatggagaaactgtacaagtctctggaacaagcatctctcagccccttaggagacaggcggccgtctacgaagaaggagcttcgaaaaagctttgtcaagcgatgcaagaatccctccatcaacgagaaactgcacaaaatacgcactctcaactctacactcaagtgcaaggagcatgacctggctatgatcaatcaactccttgatgatccaaagctgacggcacggaaatatagggaatggaaggtgatgaatactctccttattcaagatatctatcagcaacagcgggctagccctgcgcccgacgacacagatgacacgcctcaggagctcaagaagtctccctcatctccttccgtggagaactcaatctag

SEQ ID NO: 280587 - DNA, 237 bp, Artificial Sequence
  derived and/or modified sequence
atgacaagttacatggcaatcgacggatccgctttggtccccctacggcagaaaccaaggaggaagacacaggggttcctgaccatgagtcgcagaaggatctcttgcaaggatctggggcacgccgattgccagggctggctctacaagaagaaggagaagggcagctttcttagtaataaatggaaaaaattttgggtaatattaaaggggtcaagcttgtactggtactcttag

SEQ ID NO: 280588 - DNA, 6689 bp, Artificial Sequence
  derived and/or modified sequence
tttaagtagaatcctcaagcttggcctcagagtactatgaggcttctgaatccaggaataagactgctcttggatttactctctttgtattgcatgtcaaaggcaacagaactggaccaagaaaattcataactttttgcttttgtttctactaagatgacatcatacatggctattgatggcagtgctcttgttcccttgcgtcagaagcccaggaggaaaactcaaggttttctcacgatgagtcggaggaggatatcgtgtaaagatctgggccatgctgactgccaagggtggctgtataagaaaaaggaaaagggaagtttcctaagcaacaaatggaaaaagttctgggtgatactgaaggggtcgtcactgtactggtatagcaatcaaatggcagagaaagctgatggatttgtcaacctgcctgatttcactgtggaaagagcatctgaatgcaagaaaaagcatgcttttaagatcagccatccacagatcaagaccttttattttgcagctgagaatgtgcaggaaatgaacgtgtggttaaataaacttggatcggctgtaatccatcaggaatccactacaaaggatgaagaatgttacagtgaaagtgaacaggaagatccagaaatagctgcggagacaccaccccctcctcacgcttcccagactcagtctttgactgcacagcaggcatcttcatcctcacccagcctgagtggaacgtcgtattctttctcttccctggaaaatacagtgaagacacccagcagttttccttcctccttatctaaagagagacaatccttgcctgacacagttaacagtttgtctgctgctgaagatgagggacaaccaataacgtttgctgtgcaagttcattcacctgtaccctcagaggcaggcatccacaaggccctggaaaacagttttgtcacatcagaaagtggatttttgaactctttatctagtgatgatacttcttcattgagtagcaatcatgaccatcttactgtcccagataagcctgctggatcaaagatcatggacaaagaagagacaaaagtgtctgaagatgatgaaatggagaagctgtacaaatcattagagcaagctagtctatctcctcttggggaccgacgaccttcgactaaaaaggagttgagaaaatcctttgttaagcggtgtaaaaatccatctataaacgagaaactccacaaaatccgaacattgaatagcacattaaagtgtaaagaacatgatctggccatgattaaccagttgctggatgacccgaagctgacagccaggaaatacagagagtggaaagtcatgaacaccctgctgatccaggacatctatcagcagcagcgggcttcgcctgcccctgatgacactgatgacaccccccaggaactcaagaaatcaccttcttctccctctgttgaaaattccatttgagacaaagtcagggttttctcctcttatattttatcacaagcaactcttcaagatgttgcaaaagcttacatttttccttaaaaggaaaactgaaacccagtccttcaagcatcagcttcccatctaaagatgcacgttagatgaagataatcaccgaatacaccagggctcctcatttcagtcgtaacgcatccattgagattggaatgattgagttcagttgaaaggcgttttttgtgttcctactgggagctcacggtgatgtggggctctaggggggatgtgagaaatgtctcttctgttcattgctctccagagaatgctatggacaagaatcaaattttaccaggagtaattgcccatggaaacattctgtttttcaaaagaagaatgtacatattccacttgactgggaagctgtgtggcccaaatcactgtttgagtggaggaatgttttctagagcagtgactggaaggacaaacgtggtgttgcagaacaaaaattccttgcctttggtatggaatggtggtgccttttccatgtgatgagaaatgcttcatagacagtggcatgtgggagagctgaaggaggaggcgtgttccatattccactcattcaaaggacagcttggtgttttcacactttatgcaggttaggggatctgattaatgtttcctttccttacaacagctagagaaaacatctcatcacaattggagacctctacttcctttgagctttcctactcaatggtaggagataggaatatgttccgcaaagaatgtctactgctcttgtccttggctgtgatccctatacatagtgtgaatttatatccaggtttcccaggatcaatattgacaagacgactttggcatctgaattgttttaatatctttactcaaaaaaacaaaaaaacaaaaacccatggaagcaacaaaagagttaaacatgagggatttatttttgtatgtttatatgtcacttgtgtgctatgtgaatagctatgtttgttatttaaatatatttatagaagttcaaattactagtgtttaaaagatgatatactattatatattgtgcttagtatatatttgatgagtctatactttttgcttgagaaaaatagaaatactattgattcactggtgttatgatgttgcactgtgtctgaggaatgctcaggaaatcttgtgggaaaaaaatggggcatgcattcataatttttcattttcttccccaccccaacccccatgagctcttaaatttagatttctatctcttgtaagtcactcttttaaccagcaaaggactttcatcttagattatcctttctattaaataaactttaagctttgtgccatttatgcctgcaaaccttagaccaaaggcaacacaactaatgtcatcttttcattaaagactaatagaaatttagaaatcattgtgttaaagagagctatagagaaacaatatgaaagtcttcccttactaatcaccatgaatatttctcaccataggaataaccacaacccaccaagtacccatgttggccctgcctacccgtaacaaattgttcacacaacctattttgttttatagcttcaaagtgtggcttgacattcaaatggaaggaaccacctgaattatatctgcaaacaaaatggaaatagttgttgaatagttccccaagctttactaagaagccttaatactctgtaaacaaacaaacaaacaaaaaacaaccttagcattaagaaataaaaacaaaaaacaagaagcaagttgtactgctagaaacttctctaagataagaggccaggccagtcagtttggcccagcaaacatgtgggtacttctccacctagggaagccactgaagatgagtttgacctgtggtgacctgacagagagaacattcagatcctcagattgcaccctgatgccctggtttaggaaagcagtgctttaaccttttgcccctggaaattactgattctttctgtgattagcagataccagaagggaaattatttaggattggcaatgtaaagagtattgaaggaacaacaaataacaatagcagaaataacagtgtgacataaagtgcccttccacctatttttctttggtttgcaacaccagcctgtagacttccagtttttcttaaattgaagagctccagacacttttgagcagggtttgtgaatagctttgaatgctttcctttggcttttcgtgaagacatatttccccagcctttcaactgtaaactcctttagtaccattgaaacttaaggcaaaaaagatccctgggattacttagccaaggcttaaatttatttttcaaagtcaagaacattagcctagaagtttttgctttgctagttaaagcttactttgcagagcttcccaaagtgaaagggaaactgaacttcacaattttgcacctggctttctggagccccattgcctgctcattcgtgtttttccccctgtaaattattttgcttttgaccaggttgtgctagaaagtagggctgcttctgtgagttctcagcctaggctgtggccactaagacgtgggtggggggatagacaggagtgagagggagagtgggtgacactttccgtgacacttaatgtaggaagacatgggcttctctctcttggcctcaagccacttttctggtccaaagaatattgggaaaactggattactttcagtatatttcttgagaccgggtcatctctgaaatgcatttggggtagtttcctggggtccaagggccaattcctatacccagtcctgcagtgtctgtgagctgtggaatgagagagaaaaccatggctgctcaggaaggaagtggagaatctctcagcacacgtagatccaaatctgtggcacctgctaaagattaggatttggagaggactcctctttggggttgtgaagaggaccttttccctctgttgttagcctgtagatccagaacggagcctgatgtgatgccttcactggttgatatattgcaaatagacactctgagccctgcattgcaagggcgtcttttgctttaaagaattcttagttttgccacaacagctcaaatctcagaataggatcaaaggcctagaaagactcctaaagtataggattacaaagactccaggaagcgtaagaaagagattgtgtttggagtcagatttcaatgtgaaacccatgccttacatttacacagcactttgtagtttgcaaattggtgtgttttcagccccctcccgctgccccatgctctgagatgattgtggattattacagtgaagtgcctggcccggagcccccagtgatgaagcaggaacttgagtctcaggactcccagcggctctctgcccatttcctcctctccgccccccacctcgcttcacctgttaccttgtgaagttgctgttggcacatagcccactaggaaaccaagaagtttgactgggagcgtgtgtttcattgcactgggcttagcatacggctggccctggtggctgtttggctaaattctccatttgaaacctaaagggccctctctgtgcttgagcacagtctcctcctagtggtcctgcctcaacctgctggcgggctgtctatggattggggtttcacctaatcatgctgtgtttcctttcttttctttctgtacattagactacttgggaggtgctgtgtgatccttggatgaaaaacatatatttaaagaaatggagagtgtttattttgtttgctttttgaggcatgtgctgtcaaatgttagagaccaaacttagtgattagaggttggtcctttgaccttcttctcttaattgcttttcatgtaatcatgataatttactcaggtagcactccagtcacaaacaatgtcacagagatgaaacagattcaaagaaaaaatatttttaagtcttttgaaaagaagtgctattcaaatttaagacatgtttaaattcataggtacattatctcttagtaagaaatacttttttttttctttttttagacagagtcttgctctgttgcccaggctggagtgcagtggcacgattttagctcactgcaacctctgcctccctggttgaagtgattctcctgcctcagcctcccgagtagctgggactacgcccggctaatttttatatttttagtagagaccggggtttaccatgttgcccaggctggtttcaaactcctgacctcaggtgatctgcctgcctctgcctcccagagtgctgggattacaggtgtgagccaccacacctggccgaaagacagtattttgatatagccacatacatgatttaatgagtaatgttaagtacagaaaagctgccatatccacatagttttagggggcatttcttcttcagtctaacaagaatatgatatccaattgtggttttccaatttatttctcttccaatttcttttgtatacctcacaggagaaattgaatcctagaactgggagatgactgccctgcccagggttttgtaatacataattgaaaataaaagtccctgaaactaaatgtttgcagcctgtatgaaatggactgtggaagggggataatttctctcctcacagaaagccactcgtctccttgaatgaggcattgagcagacacacgtttctctgtgtcgtggggcaggaagcaattcccttgcctcttcagcacatctcagttctttcccacatgaccccagaaccacatagaaaacattgaaaataatggattcttcattgtatttgaattttttttttttaacctttagcccaaaagggaagtgtgcctcgtggaaagagcaaatgccgtaaaatagaaaccaggagttttaatcgccatatattttaatgtgcttgcatgatgggaatgtgacttttagcactgcatggtgtttgggggcaagatattaatgtggaaatcttagcttaagttttactgtgctctcatcctgtgtcagctacccctctaaactgaaaaagaggcatggctcatttctctcctgctttatgtttttgaggttgacttgtaagataaaaataaaaataagaaaaaaatatatctaggcaaatgacatgaaaaaaaagttgaaatatactactggtgttcatttttgtcctgcagtgttgctttctcaaagaaataaacatgtggctggaagtgtttaa

SEQ ID NO: 280589 - DNA, 485 bp, Artificial Sequence
  derived and/or modified sequence
gactgagtttccagagctgaggctgctttaagtagaatcctcaagcttggcctcagagtactatgaggcttctgaatccaggaataagactgctcttggatttactctctttgtattgcatagtcatcaactgggctcatgagaaccacaagaaacctacgaaggcactgggacagagcctggctgctggtcaaaggcaacagaactggaccaagaaaattcataactttttgcttttgtttctactaagatgacatcatacatggctattgatggcagtgctcttgttcccttgcgtcagaagcccaggaggaaaactcaaggttttctcacgatgagtcggaggaggatatcgtgtaaagatctgggccatgctgactgccaagggtggctgtataagaaaaaggaaaagggaagtttcctaagcaacaaatggaaaaagttctgggtgatactgaaggggtcgtcactgtactggtatagca

SEQ ID NO: 280590 - DNA, 1314 bp, Artificial Sequence
  derived and/or modified sequence
atgaccagctacatggccattgatggcagcgccctggtgcccctgcggcagaagcccaggaggaagacccagggcttcctgaccatgagcagaagacgcatcagctgcaaggacctgggccacgccgactgccagggctggctgtacaagaagaaggagaagggcagcttcctgagcaacaagtggaagaagttctgggtgatcctgaagggcagcagcctgtactggtacagcaaccagatggccgagaaggcagatggctttgtgaacctgcctgacttcaccgtggagcgggccagcgagtgcaagaagaagcacgccttcaagatcagccacccccagatcaagaccttctactttgctgctgaaaatgtgcaggagatgaatgtgtggctgaacaagctgggcagcgctgtgatccaccaggagagcaccaccaaggatgaggagtgctacagcgagagcgagcaggaggaccctgagattgctgctgagaccccacctcctcctcatgccagccagacccagagcctgacagcccagcaggccagcagcagcagccccagcctgagcggcaccagctacagcttcagcagcctggagaacacagtgaagacccccagcagcttccccagcagcctgagcaaggagcggcagagcctgcctgacacagtgaacagcctgtctgctgctgaagatgagggccagcccatcacctttgctgtgcaggtgcacagccctgtgcccagcgaggccggcatccacaaggccctggagaacagctttgtgaccagcgagagcggcttcctgaacagcctgagcagtgatgacaccagcagcctgagcagcaaccacgaccacctgactgtgcctgacaagccagctggcagcaagatcatggacaaggaggagaccaaggtgtctgaagatgatgagatggagaagctgtacaagagcctggagcaggccagcctgagccccctgggggacagaagacccagcaccaagaaggagctgaggaagagctttgtgaagcgctgcaagaaccccagcatcaatgagaagctgcacaagatccgcaccctgaacagcaccctgaagtgcaaggagcatgacctggccatgatcaaccagctgctggatgaccccaagctgacagccaggaagtaccgggagtggaaggtgatgaacaccctgctgatccaggacatctaccagcagcagagggccagccctgccccagatgacacagatgacaccccccaggagctgaagaagagccccagcagccccagcgtggagaacagcatctag

SEQ ID NO: 280591 - DNA, 237 bp, Artificial Sequence
  derived and/or modified sequence
atgaccagctacatggccattgatggcagcgccctggtgcccctgcggcagaagcccaggaggaagacccagggcttcctgaccatgagcagaagacgcatcagctgcaaggacctgggccacgccgactgccagggctggctgtacaagaagaaggagaagggcagcttcctgagcaacaagtggaagaagttctgggtgatcctgaagggcagcagcctgtactggtacagctag

SEQ ID NO: 280592 - DNA, 1314 bp, Artificial Sequence
  derived and/or modified sequence
atgaccagctacatggccatcgacggcagcgccctggtgcccctgagacagaagccccggaggaagacacagggatttctcaccatgtcacgcaggagaatctcgtgtaaggatctgggacacgcggattgtcagggctggctctacaagaagaaggagaagggaagttttctgagcaacaaatggaaaaagttctgggtgatactgaaaggtagcagcctgtactggtacagtaatcagatggctgaaaaggccgatggtttcgttaatctccctgatttcaccgtcgagcgagcaagtgaatgtaagaaaaagcacgcattcaagatcagccaccctcagattaagaccttttactttgcagcagagaacgtccaggagatgaacgtgtggctgaacaaactgggctccgctgtcattcaccaggagagtacaacgaaagatgaggagtgctacagcgaatcagaacaggaggatccggagatagcagctgagacgcccccccccccccacgccagtcagactcagagtctgaccgcgcagcaggcctcatccagttctccatccctgtcagggacatcttactctttcagcagccttgagaatactgtgaaaactcccagttctttcccctcaagtctaagcaaggagcggcaatctctgcccgacaccgtaaacagtctgagcgccgcagaggacgaggggcagccaattacctttgccgtgcaagttcactcacccgtcccgagtgaagcaggcattcacaaggcgcttgagaacagctttgtaacctctgagtcgggatttcttaacagcctctccagcgacgacacctctagcctctcctccaatcacgatcatctgacagttcccgacaagccagctgggagcaagattatggataaagaagagactaaggtgagcgaggatgacgaaatggaaaaattgtataagtccctggagcaggccagcctgtccccccttggagatcgacggccctcaacaaagaaggaactcagaaagtcttttgtaaagagatgcaaaaaccctagcatcaatgagaagttacataagatccggacattgaacagcactctcaaatgtaaggagcacgatcttgcgatgatcaaccaattgcttgacgatcctaaactcacggcgcggaaatatcgggaatggaaggtgatgaatactttattaatccaagacatctaccagcagcagagggctagccctgcccctgacgacacggacgacactcctcaggagctgaagaaatctccaagcagccccagcgtagagaattcgatttag

SEQ ID NO: 280593 - DNA, 237 bp, Artificial Sequence
  derived and/or modified sequence
atgaccagctacatggccatcgacggcagcgccctggtgcccctgaggcagaaacccaggaggaaaacacagggctttctaaccatgagccgccggagaatcagttgcaaagacctggggcatgctgattgccaggggtggctctataaaaagaaggagaaggggagcttcctgagcaataaatggaagaagttttgggtgattctgaaaggaagttccttatattggtatagctag

SEQ ID NO: 280594 - DNA, 1314 bp, Artificial Sequence
  derived and/or modified sequence
atgactagctacatggctatcgatggttccgctctggtcccacttcgccagaagcctcggcgaaaaactcagggtttcttaaccatgagcagacggagaatatcctgcaaagatcttggacacgccgattgccaagggtggctgtataagaaaaaagagaagggctctttcctttctaacaaatggaaaaagttttgggtgatcctgaaaggcagctccctgtactggtatagcaaccagatggcagaaaaagcagacggctttgtcaacttgccagacttcactgttgagcgggcaagtgaatgtaagaagaaacacgcattcaaaattagtcacccgcagatcaagacattctactttgccgcagagaacgtgcaagagatgaatgtgtggctgaacaaattgggctccgctgtgatccaccaggaaagtacgacgaaggacgaggaatgctattccgaatctgagcaggaggatcctgaaatagccgcagaaaccccacccccaccccacgcatcgcagacccaaagcctcacagcccaacaggcctcctctagtagtccctcactttctgggacgtcctacagcttttcctcattggagaacacggtcaagaccccatcctcttttccctcctccctgtctaaagagcggcagagcctgcctgataccgtgaattctctgagtgctgcagaggatgaaggacagccaataacattcgcagtccaagtacacagccccgttccaagcgaggcgggtatccacaaagctctggagaatagctttgtaacatctgagagcggattcctcaactctttgtcaagcgatgacacaagctcgctgtcttctaaccacgatcacttgactgtgcccgacaagcctgctgggtcaaaaatcatggataaggaggaaacgaaggtttccgaggatgatgaaatggaaaagctgtataagtctctggaacaggctagtctgtcacccctcggcgaccggagaccttctaccaaaaaggagctccggaagtctttcgtgaaacgctgtaagaatcccagcatcaacgaaaagctccataaaataagaactcttaatagcaccttgaaatgcaaggagcacgacttagctatgatcaaccagctactggatgatccaaaactgaccgctcgtaagtatcgcgaatggaaagtgatgaacaccctgctcatccaggacatttatcagcagcaacgggcttctccagcccctgatgacacagatgacactccacaggagctaaaaaagagcccaagctctccgagcgttgaaaattcaatctag

SEQ ID NO: 280595 - DNA, 237 bp, Artificial Sequence
  derived and/or modified sequence
atgactagctatatggccatcgacgggagcgctctcgtccctttacgtcagaagcccaggcgtaagacgcaggggtttttgaccatgtcccgccgacgcattagttgcaaagatttggggcatgcagactgccaaggttggctgtacaagaaaaaagaaaaaggttcatttctatccaacaagtggaaaaaattttgggtcatccttaaaggctcttctttgtactggtatagctag

SEQ ID NO: 280596 - protein, 586 aa, Artificial Sequence
  derived and/or modified sequence
SESLSSAVFVEGLKRQGGCARLEEACLSEAGEDLTGVRFSLPGKNFPCGSSSSSSRSRNSSSSNSSSSSSTTTTTTSSSGAQDRMPVLERYFHPAELGRRWTGPEGVLPSSPGSRPGCQQGPLPWDLPEMIRMVKLVWKSKSELQATKQRGILDNEDALRSFPGDIRLRGQTGVRAERRGSYPFIDFRLLNSTTYSGEIGTKKKVKRLLSFQRYFHASRLLRGIIPQAPLHLLDEDYLGQARHMLSKVGMWDFDIFLFDRLTNGNSLVTLLCHLFNTHGLIHHFKLDMVTLHRFLVMVQEDYHSQNPYHNAVHAADVTQAMHCYLKEPKLASFLTPLDIMLGLLAAAAHDVDHPGVNQPFLIKTNHHLANLYQNMSVLENHHWRSTIGMLRESRLLAHLPKEMTQDIEQQLGSLILATDINRQNEFLTRLKAHLHNKDLRLEDAQDRHFMLQIALKCADICNPCRIWEMSKQWSERVCEEFYRQGELEQKFELEISPLCNQQKDSIPSIQIGFMSYIVEPLFREWAHFTGNSTLSENMLGHLAHNKAQWKSLLPRQHRSRGSSGSGPDHDHAGQGTESEEQEGDSP

SEQ ID NO: 280597 - DNA, 1761 bp, Artificial Sequence
  derived and/or modified sequence
agcgagagcctgagcagcgccgtgttcgtggagggcctgaagagacagggcggctgcgccagactggaggaggcctgcctgagcgaggccggcgaggacctgaccggcgtgagattcagcctgcccggcaagaacttcccctgcggcagcagcagcagcagcagcagaagcagaaacagcagcagcagcaacagcagcagcagcagcagcaccaccaccaccaccaccagcagcagcggcgcccaggacagaatgcccgtgctggagagatacttccaccccgccgagctgggcagaagatggaccggccccgagggcgtgctgcccagcagccccggcagcagacccggctgccagcagggccccctgccctgggacctgcccgagatgatcagaatggtgaagctggtgtggaagagcaagagcgagctgcaggccaccaagcagagaggcatcctggacaacgaggacgccctgagaagcttccccggcgacatcagactgagaggccagaccggcgtgagagccgagagaagaggcagctaccccttcatcgacttcagactgctgaacagcaccacctacagcggcgagatcggcaccaagaagaaggtgaagagactgctgagcttccagagatacttccacgccagcagactgctgagaggcatcatcccccaggcccccctgcacctgctggacgaggactacctgggccaggccagacacatgctgagcaaggtgggcatgtgggacttcgacatcttcctgttcgacagactgaccaacggcaacagcctggtgaccctgctgtgccacctgttcaacacccacggcctgatccaccacttcaagctggacatggtgaccctgcacagattcctggtgatggtgcaggaggactaccacagccagaacccctaccacaacgccgtgcacgccgccgacgtgacccaggccatgcactgctacctgaaggagcccaagctggccagcttcctgacccccctggacatcatgctgggcctgctggccgccgccgcccacgacgtggaccaccccggcgtgaaccagcccttcctgatcaagaccaaccaccacctggccaacctgtaccagaacatgagcgtgctggagaaccaccactggagaagcaccatcggcatgctgagagagagcagactgctggcccacctgcccaaggagatgacccaggacatcgagcagcagctgggcagcctgatcctggccaccgacatcaacagacagaacgagttcctgaccagactgaaggcccacctgcacaacaaggacctgagactggaggacgcccaggacagacacttcatgctgcagatcgccctgaagtgcgccgacatctgcaacccctgcagaatctgggagatgagcaagcagtggagcgagagagtgtgcgaggagttctacagacagggcgagctggagcagaagttcgagctggagatcagccccctgtgcaaccagcagaaggacagcatccccagcatccagatcggcttcatgagctacatcgtggagcccctgttcagagagtgggcccacttcaccggcaacagcaccctgagcgagaacatgctgggccacctggcccacaacaaggcccagtggaagagcctgctgcccagacagcacagaagcagaggcagcagcggcagcggccccgaccacgaccacgccggccagggcaccgagagcgaggagcaggagggcgacagcccctag

SEQ ID NO: 280598 - DNA, 1761 bp, Artificial Sequence
  derived and/or modified sequence
tccgaatccctctcatccgccgtgttcgtggaaggcctgaagcggcagggcgggtgcgcgcgcttagaggaggcatgcttgtcggaggccggcgaggacctcacaggagtgagattttcccttccaggcaaaaacttcccctgcggttcttcttcttcgtcctcccgaagccggaactcctcctctagcaatagtagctccagctcctctacgacaacgaccactacatcatccagtggggctcaggacagaatgcctgtactcgagcggtatttccatcccgccgagctaggtcggcggtggaccggacctgaaggggtcctgcctagttctcccggatccagacctggttgtcagcaaggacccttaccatgggatctacccgagatgatccggatggtcaagttagtgtggaagtccaagtctgaacttcaagccaccaagcaaagggggattctggacaatgaagacgcgttgagatctttccctggcgatatacgtctgcgagggcagaccggggtgcgcgccgaacggcggggctcatacccctttatcgacttccgtctgcttaatagtacgacatattcaggggaaattggcactaagaagaaggtcaaacggctcttgagcttccaaaggtacttccacgcctctcggttgctgagaggcattattccacaagccccactgcacctccttgatgaagattatcttggccaggcaagacatatgttgagcaaagtgggtatgtgggatttcgatatttttctgttcgatcgcttgaccaatgggaatagtttagtcacactgttgtgccacctttttaacacccacggtctgatccaccactttaaattggacatggtaaccctccataggtttctggtgatggtgcaggaagattaccacagccaaaatccctaccataatgcagtgcacgctgctgacgtcacccaggccatgcattgttatctgaaggaacccaaactggcgtcatttctcactcccctggacatcatgctgggcctgctcgcagcggctgctcatgatgttgatcacccgggagtcaaccagccatttttaattaaaaccaatcaccacttggctaatctttatcagaacatgagtgtactggaaaatcatcattggcgctccaccataggaatgctgcgtgagtcccgtctgctggcccatcttccaaaggagatgacacaagacatcgaacaacagcttgggtcattgattttggcaacagacattaatcggcagaatgagttcctgacccgtttgaaggcacacctacataacaaggatctgagactggaagacgcccaggaccgccactttatgttgcagatcgcgctgaaatgcgcagacatttgtaatccttgccgtatctgggagatgtcaaaacagtggtctgagcgtgtgtgtgaggaattctacaggcagggcgagctggaacaaaaatttgagctggagattagccccctttgcaaccagcagaaggattcaattccttccattcaaatcggcttcatgtcatatatcgttgagcctctctttagggaatgggctcattttactgggaattcgactctgtctgaaaacatgctcgggcacctggcacacaataaggcacaatggaaatcactgttgccacgacagcacagatcccgcgggagctctggctctggtccagaccacgatcatgccgggcagggaacagagagcgaagagcaagagggcgatagcccatag

SEQ ID NO: 280599 - DNA, 5492 bp, Artificial Sequence
  derived and/or modified sequence
agtgaatcgctctcgtcggcagtgtttgtggagggcctgaagagacagggaggttgtgccaggctggaggaggcttgtctttccgaagctggagaggatcttacgggggttcgcttttccctgcctgggaagaatttcccctgtggtagcagcagcagcagcagcagaagcagaaacagcagcagcagcaacagcagcagcagcagcagcaccaccaccaccactacctcctcttctggggcacaagacagaatgcctgtgctagagcgatatttccacccagcagagctaggcaggaggtggacaggcccagaaggtgtgctgccctcctccccgggaagccggccggggtgccagcaggggccgctgccctgggacttgccagagatgatcaggatggtaaagctggtttggaaatccaaaagtgagctgcaggcgaccaaacagagaggcattctggacaatgaagatgctctccgcagctttccaggagatatacgactaaggggtcagacgggggttcgtgctgaacgccgtggctcctacccattcattgacttccgcctacttaacagtacaacatactcaggggagattggcaccaagaaaaaggtgaaaagactattaagctttcaaagatacttccatgcatcaaggctgcttcgtggaattataccacaagcccctctgcacctgctggatgaagactaccttggacaagcaaggcatatgctctccaaagtgggaatgtgggattttgacattttcttgtttgatcgcttgacaaatggaaacagcctggtaacactgttgtgccacctcttcaatacccatggactcattcaccatttcaagttagatatggtgaccttacaccgatttttagtcatggttcaagaagattaccacagccaaaacccgtatcacaatgctgttcacgcagccgacgtcacccaggccatgcactgctacctgaaagagccaaagcttgccagcttcctcacgcctctggacatcatgcttggactgctggctgcagcagcacacgatgtggaccacccaggggtgaaccagccatttttgataaaaactaaccaccatcttgcaaacctatatcagaatatgtctgtgctggagaatcatcactggcgatctacaattggcatgcttcgagaatcaaggcttcttgctcatttgccaaaggaaatgacacaggatattgaacagcagctgggctccttgatcttggcaacagacatcaacaggcagaatgaatttttgaccagattgaaagctcacctccacaataaagacttaagactggaggatgcacaggacaggcactttatgcttcagatcgccttgaagtgtgctgacatttgcaatccttgtagaatctgggagatgagcaagcagtggagtgaaagggtctgtgaagaattctacaggcaaggtgaacttgaacagaaatttgaactggaaatcagtcctctttgtaatcaacagaaagattccatccctagtatacaaattggtttcatgagctacatcgtggagccgctcttccgggaatgggcccatttcacgggtaacagcaccctgtcggagaacatgctgggccacctcgcacacaacaaggcccagtggaagagcctgttgcccaggcagcacagaagcaggggcagcagtggcagcgggcctgaccacgaccacgcaggccaagggactgagagcgaggagcaggaaggcgacagcccctaggggccggcccaacttagacgcggctctcctccggcagggcccccagagggcagaagcagcgtggaggggccctcacgcagcagcccagccactttctgagtgttgtcctggggctctttggaacgccatcttcctcccacttacctgcctcccctccttttcgcaaatgtacagaagccatttgtcacctcagcattcgctgccgaaatgagcaactccattcagtaacgtgggagctgatcccacgggcaggctctccctgctccaggagaagactaggaggaagaatgaggtgctcctgccgtgtccgccttgttccgggtcgcactggaacaggcagcaattcctaagtccggagcgtttgagcgtttgctatctgactgctgatctgcgtgacagaaacaccagcatatttgcaacgccaaggatattggtcttaagtgcaagagcacaaatgagagtgtgagagaaagtaccttctattttaataataatattattataaaaataataaatctttttaacttttatattttatgcactagacaatggatctgcaactttggactaaggtcattcaatgtacccaaacttgaacagggggttcattgttttgctattgactttattatgccactttggggcagagacttggcatcttcgcagtttaagaaaccacgtttcctatccaatccgaagggaaggtgctgtacagttcattcctttgcaccattagccaatctgtcttttatggattctgtgacatgtttatattcacccatgtacattttctgtaaataccaaacgctactgattcccatgccaaaatacatgagtattatgggattgctacctgtataaacaatggcactgtgaaaatactgttagttttaatacaagagaatgcatttgtaaatatggtatagagtttattaatatactattgtttgcagataaaggccttaactttaaacatctttcatcttctgaaagctgcccaacttaaatcctcatagatgtctttctcaactgccttcccatgttcatctgtatgttttccagctaaggtcacaaaccaaaactgaataaagtctttgaggaaacattttggaaacttcacatgcattccgcttgagaccatagtgtttaatctatggcaccaagcatcgtttcctcagattaatgagacccttcaacaagcctgaatcagtcacttttcaacacagcgatgttttaacaagccagctgctaagcttgtgtttatgtgactcttgttacagatcatggcggtgcgtcagcctcacaggagacatagcaggtctcagaaaccttctatgaccctgtcatctaaccatcagggaattccctgctcccatgccacacatttgtctattatggctatagtaccaaagtacttttggtgtttggttggtgtgcatttctttagtgtcgatagtaactggatttttctttttccttaatctcatgtgaacaactacccaactgtttagctgaagttcatattatttaagtaaagaaaatatttcagttttataacagactttaccttcctggcaggtcattgtagttaattatgtctctagcttggagtgtcaccttggaatttcgttgccattttttctcagacacctggccgtaaaatcagtttgttacagcattcttctctaggctgctaaacgctgtgcattgaaccttttctttagaagtttcagcgtaactaatgttagatgaaaattgttgatgcccctttctttttactttaaacaatgtggtagtgggagaatgactgtttctgccactatcaacctgatcctcatgctgatagaatgacagctagcacttatttcctaagtgcaactgttttagagatttttctcctaacatgcaaaggaaatactgattggcctataataagttcctatagggagactgaggcttgcagaattaaggttcaggggaaattttggaaagttggttgtattttcattgaagtaggagagattatcagatggtgctaaagaaagtgtgaagatcttatgaaataggtggatggtaagttgaaattattgatgtgggtaagaagggaggttgtggaaagttaacactagctttgtatttttttttctgtaaaactgtgaactgatatattttcctttatcactttagtattctgcagttctcagcttggtgaggctccaaaagagaatatgtcagatgtattcctacttccaaacctgtcttactttggtttgatggtacacatagggcttttgaacagtctatttttaatgtatatgaggtcaaatcaaggaaggcaattgctggggacaagaaaagtagaggtaggaaagaagacactattttagctaatggggtttcttgggactaaaaaatggctttgtttaaattataattatataataatttaaataaatgagattggaggtattcttagtagttctgagttgatagtttacattacaattaggtcttgaagaagagctcacagagaaaaaactaccaaatatccaatgggtaagcccatgatgtagccactagtacaataaaaatctgaagtaaaatgaggcataaacttgatgcagctgcctccctcattcaactggggagttcttgagttcctcatttgttggtaaaaagaaaaagaatgtgaaaatgtctctttttttcttggctattagtggctgtcttgcaatatttcaataggagtccaattactagttaaaacactggcggggtgcggtggctcacgcctgtaatcctagcactttgggaggccaagttgggcagatcacaagttcaagagatcgagaccattctggccaacatggtgaaaccccgtctctactaaaaatacaaaaattagctgggcatggcagtgcgtgcctgcaatcccagctactcaggaagctgaggcaggagaatcgcttgaacctgggaggtggaagttgtagtgaactgagatcgcaccactgcactccagcctggcaacagagctagaatccgtctcaaacaaacaaacaaaaaatcccacagctattggatcatccacagattttttctttacaatcttgttctccttgtccatggaccatcaatagttgacttgccaggtttaattctttcattgcttgagaagaaaggaatcaaaggactgtgtgtagtaagctgacggtaaagttaagattaaattaagacagagagagaatacatatcactgccaggcctgataggaaaaatctgctcttccttttaataacagtgatgaattgtcaggaccttatttaggaaaccctgacctacccataactccctgctaggctaagtagaaaccaggttatttctccctgcttatggctccccgcaaagggacttgcagcgtgtcctgcaactttgtcttcagatagtgcttcctacaaaactaggtcttgttttgtaatcttttctcgtgttgaatcagatctgcttacttatttaggtttggttatgagcttgtatctcactgtatttctcatgctttgttcttttaaacaaatcctttaaactgtgtcattttgtatacacatgtgaggtttgaaaaaaaaaaaaaaaaaaaaaagaactaccttgtgagttttgctcaaaatgtggcctaagtagccattggcatgtctagatgaacaaataaaaataaagataatttctttaaaata

SEQ ID NO: 280600 - DNA, 1761 bp, Artificial Sequence
  derived and/or modified sequence
tctgagagcctgagcagcgctgtgtttgtggagggcctgaagaggcagggcggctgtgcccggctggaggaggcctgcctgtctgaggccggggaggacctgactggagtgcgcttcagcctgcccgggaagaacttcccctgtggcagcagcagcagcagcagccgcagcaggaacagcagcagcagcaacagcagcagcagcagcagcaccaccaccaccaccaccagcagcagcggggcccaggacaggatgcctgtgctggagcgctacttccaccctgctgagctgggccgccgctggacaggccctgagggcgtgctgcccagcagccctggcagccggcccggctgccagcagggccccctgccctgggacctgcctgagatgatccgcatggtgaagctggtgtggaagagcaagtctgagctgcaggccaccaagcagaggggcatcctggacaatgaagatgccctgcgctccttccctggggacatccggctgcggggccagacaggagtgcgggcagagcggcggggcagctaccccttcatcgacttccggctgctgaacagcaccacctacagcggggagatcggcaccaagaagaaggtgaagaggctgctgtccttccagcgctacttccacgccagccggctgctgcggggcatcatcccccaggcccccctgcacctgctggatgaggactacctgggccaggcccggcacatgctgagcaaggtgggcatgtgggactttgacatcttcctgtttgaccggctgaccaatggaaacagcctggtgaccctgctgtgccacctgttcaacacccacggcctcatccaccacttcaagctggacatggtgaccctgcaccgcttcctggtgatggtgcaggaggactaccacagccagaacccctaccacaatgctgtgcacgccgcagatgtgacccaggccatgcactgctacctgaaggagcccaagctggccagcttcctgacccccctggacatcatgctgggcctgctggccgctgctgcccatgatgtggaccaccctggggtgaaccagcccttcctgatcaagaccaaccaccacctggccaacctgtaccagaacatgtctgtgctggagaaccaccactggaggagcaccatcggcatgctgcgggagagccggctgctggcccacctgcccaaggagatgacccaggacatcgagcagcagctgggcagcctcatcctggccacagacatcaaccggcagaatgagttcctgacccggctgaaggcccacctgcacaacaaggacctgcggctggaggatgcccaggacagacacttcatgctgcagatcgccctgaagtgtgccgacatctgcaacccctgccgcatctgggagatgagcaagcagtggagcgagcgggtgtgtgaggagttctaccggcagggcgagctggagcagaagtttgagctggagatcagccccctgtgcaaccagcagaaggacagcatccccagcatccagatcggcttcatgagctacatcgtggagcccctcttccgggagtgggcccacttcaccggcaacagcaccctgtctgagaacatgctgggccacctggcccacaacaaggcccagtggaagagcctgctgccccggcagcacaggagccggggcagcagcggcagcggccctgaccatgaccacgccggccagggcacagagagcgaggagcaggagggggacagcccctag

SEQ ID NO: 280601 - DNA, 1761 bp, Artificial Sequence
  derived and/or modified sequence
agcgagagcctgagcagcgccgtgttcgtggagggcctgaagcggcagggaggttgtgcacggctggaagaagcatgtttgagcgaggctggtgaagatctcacgggtgtaagattcagcctgcccgggaaaaacttcccctgtggatcatctagctcatcttctcgaagtaggaactcaagcagctccaactctagctcatcgagcagtaccacgaccaccacgacatccagttccggggctcaggacagaatgcctgtactggaacggtattttcaccccgcggagctcggcagaaggtggaccggccctgagggagtcctaccctctagcccaggctcccggcccggttgtcagcagggccccctgccgtgggatctgcctgaaatgatacgaatggtgaagttagtgtggaagtctaagtccgagctccaagctactaaacagcgcggaatactggacaacgaagacgccctccggtcttttcctggcgatattcggctcaggggccaaaccggcgtgagggcagagagacgaggctcatacccatttatcgactttcgattgcttaatagtacaacctactccggcgaaatcggcacgaagaagaaagtcaagcgactgctgtccttccagaggtacttccatgcatccaggttgctgaggggaataatacctcaggcccctctgcacctcttggatgaagactatctgggtcaggcaaggcatatgctgagcaaggtgggtatgtgggactttgacatattcctcttcgaccggttaacaaatggaaattcgctggtcacacttctgtgtcatctctttaacacccacggacttattcaccattttaagttggatatggtcaccctgcaccgtttcctggttatggtccaggaagattatcactcacagaatccctaccataacgcagttcacgccgccgacgtcacccaggctatgcattgctacttaaaggagccaaaacttgcatccttcttgacccctctagacataatgctcggcctgctggctgcagcagcacatgacgtcgatcatcctggtgttaatcagccattcttaattaagaccaaccaccatttggcgaatctttaccagaacatgtctgtgctggaaaatcatcactggaggtccacgatcggaatgttacgcgagtcaaggcttctggctcatttgcccaaagagatgacgcaagatatcgaacaacaacttgggtctctcatattagctaccgacattaaccgccaaaacgaattcttgacccggctgaaggctcacttgcataataaagacctgcgcttggaagacgcccaggaccggcactttatgcttcaaattgccctgaaatgcgccgatatctgcaatccctgccgaatctgggagatgagcaagcagtggtccgaacgggtatgcgaagagttctacagacaaggtgaactcgagcagaaattcgagctggagatttcccccttatgtaatcagcagaaggattctattccatctatccagatcggcttcatgagctacatcgttgagccactgtttcgcgagtgggctcactttaccggcaacagcaccctgtccgagaacatgctaggacatctggcccacaataaggcacaatggaagagtttattgccgcgacagcaccgctctagaggatcctccggtagtggacccgatcacgaccacgcgggccaaggcaccgagtccgaagagcaggaaggcgactcgccatag

SEQ ID NO: 280602 - DNA, 1761 bp, Artificial Sequence
  derived and/or modified sequence
tccgagtctttaagttccgccgtctttgttgagggccttaagaggcagggaggatgtgctagacttgaggaggcctgcctatccgaggcaggggaggacctgaccggcgtgcggttcagcctgcccggaaagaacttcccctgtgggtcctcttctagctctagcagatcacggaacagctcttcctctaattccagttcatcctctagtacaaccactacaaccacctcttccagtggagcccaagaccgtatgccagtcctggaaaggtattttcaccctgctgagctgggccgtcggtggactgggccagagggtgtgttgccatcgagtcccggatctcggccaggatgtcagcagggccctctcccctgggatcttccggagatgattcgcatggtaaagctggtatggaaatcaaaatccgaactgcaggcaacgaagcagagaggaatcttagacaacgaggacgcactaagatcttttcccggtgacattaggctaagagggcagacaggtgtacgggctgagaggagagggtcttacccgttcattgattttcgcctcttgaacagtactacatacagcggagaaattggcactaagaagaaggtgaagcggctgctgagtttccagaggtactttcacgcatctcggctcctgcggggtattatcccacaggcacccctccatttactcgatgaagattacctgggccaagcaaggcacatgctttccaaggtaggaatgtgggacttcgacatcttcctgtttgatagacttacaaatggaaactccttagttaccctactgtgccatctgttcaacacgcacggcctaatccaccatttcaagttggatatggtgacactccataggttcctggttatggttcaggaggactaccacagtcagaacccataccacaatgctgtccacgctgctgacgtgacccaggcaatgcactgctatttgaaagaacctaaattggcctcattcctaacccctcttgacatcatgctgggcctcctcgctgccgctgcacacgacgtcgaccatccaggtgtgaatcagcctttcctgataaaaactaatcatcatttggccaatctgtatcagaacatgtccgtgctggagaatcaccactggcgaagtaccattggcatgttgcgggaatcaagattattggcccatcttcccaaagagatgacgcaggacatcgaacagcagcttggaagtctgatactggctaccgacatcaaccgccagaacgaattcctgacccggctgaaggcacacttgcataataaagacttacgactggaggatgcacaggaccgccactttatgctacagattgcgctgaagtgcgcagatatatgcaacccttgcaggatttgggagatgtccaaacagtggtcagaaagggtatgcgaagagttctacagacagggagagctggagcagaagttcgaattagaaatttcgcctctgtgcaatcagcagaaggactccatcccaagtattcagattggcttcatgagttatattgtggaacctctcttcagagagtgggcacacttcactgggaatagcaccctgagtgaaaatatgctggggcatctcgcacataataaggctcagtggaagagcttactcccaagacaacacagaagcaggggctcttccgggtccggaccagaccacgatcacgccggacagggcaccgagtctgaagagcaagaaggggattccccatag

SEQ ID NO: 280603 - protein, 715 aa, Artificial Sequence
  derived and/or modified sequence
MVPGARGGGALARAAGRGLLALLLAVSAPLRLQAEELGDGCGHLVTYQDSGTMTSKNYPGTYPNHTVCEKTITVPKGKRLILRLGDLDIESQTCASDYLLFTSSSDQYGPYCGSMTVPKELLLNTSEVTVRFESGSHISGRGFLLTYASSDHPDLITCLERASHYLKTEYSKFCPAGCRDVAGDISGNMVDGYRDTSLLCKAAIHAGIIADELGGQISVLQRKGISRYEGILANGVLSRDGSLSDKRFLFTSNGCSRSLSFEPDGQIRASSSWQSVNESGDQVHWSPGQARLQDQGPSWASGDSSNNHKPREWLEIDLGEKKKITGIRTTGSTQSNFNFYVKSFVMNFKNNNSKWKTYKGIVNNEEKVFQGNSNFRDPVQNNFIPPIVARYVRVVPQTWHQRIALKVELIGCQITQGNDSLVWRKTSQSTSVSTKKEDETITRPIPSEETSTGINITTVAIPLVLLVVLVFAGMGIFAAFRKKKKKGSPYGSAEAQKTDCWKQIKYPFARHQSAEFTISYDNEKEMTQKLDLITSDMADYQQPLMIGTGTVTRKGSTFRPMDTDAEEAGVSTDAGGHYDCPQRAGRHEYALPLAPPEPEYATPIVERHVLRAHTFSAQSGYRVPGPQPGHKHSLSSGGFSPVAGVGAQDGDYQRPHSAQPADRGYDRPKAVSALATESGHPDSQKPPTHPGTSDSYSAPRDCLTPLNQTAMTALL

SEQ ID NO: 280604 - DNA, 2148 bp, Artificial Sequence
  derived and/or modified sequence
atggtgcccggcgccagaggcggcggcgccctggccagagccgccggcagaggcctgctggccctgctgctggccgtgagcgcccccctgagactgcaggccgaggagctgggcgacggctgcggccacctggtgacctaccaggacagcggcaccatgaccagcaagaactaccccggcacctaccccaaccacaccgtgtgcgagaagaccatcaccgtgcccaagggcaagagactgatcctgagactgggcgacctggacatcgagagccagacctgcgccagcgactacctgctgttcaccagcagcagcgaccagtacggcccctactgcggcagcatgaccgtgcccaaggagctgctgctgaacaccagcgaggtgaccgtgagattcgagagcggcagccacatcagcggcagaggcttcctgctgacctacgccagcagcgaccaccccgacctgatcacctgcctggagagagccagccactacctgaagaccgagtacagcaagttctgccccgccggctgcagagacgtggccggcgacatcagcggcaacatggtggacggctacagagacaccagcctgctgtgcaaggccgccatccacgccggcatcatcgccgacgagctgggcggccagatcagcgtgctgcagagaaagggcatcagcagatacgagggcatcctggccaacggcgtgctgagcagagacggcagcctgagcgacaagagattcctgttcaccagcaacggctgcagcagaagcctgagcttcgagcccgacggccagatcagagccagcagcagctggcagagcgtgaacgagagcggcgaccaggtgcactggagccccggccaggccagactgcaggaccagggccccagctgggccagcggcgacagcagcaacaaccacaagcccagagagtggctggagatcgacctgggcgagaagaagaagatcaccggcatcagaaccaccggcagcacccagagcaacttcaacttctacgtgaagagcttcgtgatgaacttcaagaacaacaacagcaagtggaagacctacaagggcatcgtgaacaacgaggagaaggtgttccagggcaacagcaacttcagagaccccgtgcagaacaacttcatcccccccatcgtggccagatacgtgagagtggtgccccagacctggcaccagagaatcgccctgaaggtggagctgatcggctgccagatcacccagggcaacgacagcctggtgtggagaaagaccagccagagcaccagcgtgagcaccaagaaggaggacgagaccatcaccagacccatccccagcgaggagaccagcaccggcatcaacatcaccaccgtggccatccccctggtgctgctggtggtgctggtgttcgccggcatgggcatcttcgccgccttcagaaagaagaagaagaagggcagcccctacggcagcgccgaggcccagaagaccgactgctggaagcagatcaagtaccccttcgccagacaccagagcgccgagttcaccatcagctacgacaacgagaaggagatgacccagaagctggacctgatcaccagcgacatggccgactaccagcagcccctgatgatcggcaccggcaccgtgaccagaaagggcagcaccttcagacccatggacaccgacgccgaggaggccggcgtgagcaccgacgccggcggccactacgactgcccccagagagccggcagacacgagtacgccctgcccctggccccccccgagcccgagtacgccacccccatcgtggagagacacgtgctgagagcccacaccttcagcgcccagagcggctacagagtgcccggcccccagcccggccacaagcacagcctgagcagcggcggcttcagccccgtggccggcgtgggcgcccaggacggcgactaccagagaccccacagcgcccagcccgccgacagaggctacgacagacccaaggccgtgagcgccctggccaccgagagcggccaccccgacagccagaagccccccacccaccccggcaccagcgacagctacagcgcccccagagactgcctgacccccctgaaccagaccgccatgaccgccctgctgtag

SEQ ID NO: 280605 - DNA, 3626 bp, Artificial Sequence
  derived and/or modified sequence
cgactgcgccccgtcccggcgccgcgctcgtccgcagaggaggcggcccggcccgggcagctgcggctcgggatccgtcgaggggaggccgagcttgccaagctggcgcccagcggggtcatggtgcccggcgcccgcggcggcggcgcactggcgcgggctgccgggcggggcctcctggctttgctgctcgcggtctccgccccgctccggctgcaggcggaggagctgggtgatggctgtggacacctagtgacttatcaggatagtggcacaatgacatctaagaattatcccgggacctaccccaatcacactgtttgcgaaaagacaattacagtaccaaaggggaaaagactgattctgaggttgggagatttggatatcgaatcccagacctgtgcttctgactatcttctcttcaccagctcttcagatcaatatggtccatactgtggaagtatgactgttcccaaagaactcttgttgaacacaagtgaagtaaccgtccgctttgagagtggatcccacatttctggccggggttttttgctgacctatgcgagcagcgaccatccagatttaataacatgtttggaacgagctagccattatttgaagacagaatacagcaaattctgcccagctggttgtagagacgtagcaggagacatttctgggaatatggtagatggatatagagatacctctttattgtgcaaagctgccatccatgcaggaataattgctgatgaactaggtggccagatcagtgtgcttcagcgcaaagggatcagtcgatatgaagggattctggccaatggtgttctttcgagggatggttccctgtcagacaagcgatttctgtttacctccaatggttgcagcagatccttgagttttgaacctgacgggcaaatcagagcttcttcctcatggcagtcggtcaatgagagtggagaccaagttcactggtctcctggccaagcccgacttcaggaccaaggcccatcatgggcttcgggcgacagtagcaacaaccacaaaccacgagagtggctggagatcgatttgggggagaaaaagaaaataacaggaattaggaccacaggatctacacagtcgaacttcaacttttatgttaagagttttgtgatgaacttcaaaaacaataattctaagtggaagacctataaaggaattgtgaataatgaagaaaaggtgtttcagggtaactctaactttcgggacccagtgcaaaacaatttcatccctcccatcgtggccagatatgtgcgggttgtcccccagacatggcaccagaggatagccttgaaggtggagctcattggttgccagattacacaaggtaatgattcattggtgtggcgcaagacaagtcaaagcaccagtgtttcaactaagaaagaagatgagacaatcacaaggcccatcccctcggaagaaacatccacaggaataaacattacaacggtggctattccattggtgctccttgttgtcctggtgtttgctggaatggggatctttgcagcctttagaaagaagaagaagaaaggaagtccgtatggatcagcagaggctcagaaaacagactgttggaagcagattaaatatccctttgccagacatcagtcagctgagtttaccatcagctatgataatgagaaggagatgacacaaaagttagatctcatcacaagtgatatggcagattaccagcagcccctcatgattggcaccgggacagtcacgaggaagggctccaccttccggcccatggacacggatgccgaggaggcaggggtgagcaccgatgccggcggccactatgactgcccgcagcgggccggccgccacgagtacgcgctgcccctggcgcccccggagcccgagtacgccacgcccatcgtggagcggcacgtgctgcgcgcccacacgttctctgcgcagagcggctaccgcgtcccagggccccagcccggccacaaacactccctctcctcgggcggcttctcccccgtagcgggtgtgggcgcccaggacggagactatcaaaggccacacagcgcacagcctgcggacaggggctacgaccggcccaaagctgtcagcgccctcgccaccgaaagcgggcaccctgactctcagaagcccccaacgcatcccgggacgagtgacagctattctgcccccagagactgcctcacacccctcaaccagacggccatgactgcccttttgtgaacacaatgtgaaagaagcctgctgtggtactgagcgtcgggctgtcacaaggcactggaagaagggagcctgctggtccagagtgtgcgtgtgtatcggtgtgtgtgtacacttgcatgtgtgtgtgtgatccagtaggatcctagagacaacctgtcatactgtttacaaaattgtgcagctggtttcgtgctgacccttagggtgcgtctgttgggttttgttgggctagaaaaatgaaaattttcagatggcgttttcattcctctgactgatattgagctgctttggtgttaaaggtgtaatgtgtacagagttgtatttaacaataataaaagtaacttaagtttgctctatcagattttagttctgcacagaggttaagtgggaaaatgcagctgttgcaaaatgtatataaatagtatgttcatttttttcagtatattatctgatactgtgttagcagcaggtctgcttaaacctagtcttgttgttattgagtcatttcctctcctttgataactagaactgaaagcatttttaacattcttctcctggaagaaatgaattacttgaagcatgaaaagcacaccagggtggttgtttatttagcaattatgactgtagatttaaaaacaagcaaagaaacaacacctcagcagctgcccgtttccttagtctccacttcagagggggatgcgaagaggtcggcccagctccggtgaccatgaaggtggcacaggaattacagtgtgaatggctgtgtcagatgttttcgtacctcagattaaaaatattgctgaggtcagacgccacaattttcatgactttcttcagaagtagcacattttcgtgacttccgctgtcctctgaaaaacaaagttatttggaacatgttcatgcaaaagtgattctgaccaagtctaaatcgagcttttctactgacatgaaactgttggaaactgatctcattttataagaaatgattttcccctcaaggaggcgtctgtaattccagaacagtccagacatcagctgtacctcatgctcagtagtttttatttgagtttcttttgtgagttaactatgggagatttaacctcttttgccaaagagggaagtgtgtgtgtttttttaatagaaaatatggaccaaaaatttttttccctgaagaatgtattataaccctatttgtgtggttattacatcctgtgaaatgtatatatgttaaaataatgggggtgctggaaggtcatggcagactagctgctggttagtgtggaggggaaatggtttactttgtagagtttacatggttttatgcgcacactaattgtaataaactatgccaaaccaaa

SEQ ID NO: 280606 - DNA, 2148 bp, Artificial Sequence
  derived and/or modified sequence
atggttcctggggcccgtggcgggggcgcactggcccgggccgcaggaaggggcctgctcgctctcctcctggctgtgagcgcacctcttcggctccaggccgaggagctgggggacggttgtggtcatcttgttacttaccaagattccggcaccatgacctccaaaaattatcctggaacgtatcccaaccataccgtgtgcgagaaaaccattaccgtgcctaaaggaaaaagactgatactccggcttggggacttagacattgagtcgcagacttgcgcctctgactacctactgtttacctcgtcatccgaccagtacggaccttattgtggaagtatgaccgtgccgaaggagctgctgctgaatacatcagaagtgactgtccggttcgaaagcgggagccatatctcgggaagagggtttttgcttacctacgcctcatcagaccatcctgaccttattacctgtcttgaaagggcgtctcattatcttaaaaccgaatactccaagttttgtcccgctggatgccgggacgttgccggtgatatttccggaaatatggttgacgggtaccgagacacctccctgctttgtaaggctgcaatccacgccgggatcattgcggacgagctgggcggacaaatctctgtgctgcagagaaaagggatatcacggtatgaagggattctggccaatggggtactgagtagagacggtagcctcagcgataaacggtttttgtttacttccaacggttgcagccgctcactgtcctttgagcccgacgggcaaattcgcgccagtagctcctggcagagcgtcaatgaaagcggagaccaggtgcattggtcccctggacaggcacgtctgcaagaccagggcccttcttgggcaagtggggattctagcaacaatcataagcctagggagtggctggaaatcgatctgggcgagaagaagaagattactggcatacgtaccaccggatccactcaaagtaactttaacttttatgtgaagtcttttgtgatgaacttcaagaataacaacagtaagtggaagacctataaaggcatcgtaaataatgaggaaaaagtgtttcaggggaatagtaatttccgagaccccgtgcagaacaacttcatcccaccgatagttgccaggtatgtgagggtggtgcctcagacctggcaccagcggatcgccctgaaagtcgagcttattggatgccagattacccaaggcaatgacagccttgtgtggaggaagacatcacaatctacttcggttagtactaagaaggaagatgaaactatcactcggcccattcctagtgaggaaacatcgacaggcataaacataaccaccgtcgctatccccttagtactactcgtcgtgctcgtgtttgcgggcatgggcatcttcgcggcattcagaaagaagaagaaaaaaggtagcccctacggcagcgccgaagcccagaagactgactgttggaaacagatcaaatacccattcgccaggcatcagagcgccgagttcaccatttcctacgacaacgaaaaggagatgacacagaagctggacctcattacaagcgatatggctgactaccagcaacctcttatgataggtacaggtacggtgactcgcaagggcagtacctttcgccccatggacaccgacgccgaggaagcaggggtgagtactgacgcagggggccattatgattgtcctcagagggcaggaagacatgaatacgccctccccctggctccacctgaaccggagtacgctacccctatagtggaaagacatgtcttacgcgcccatacattttctgcccaatccgggtaccgggtgccaggccctcaacctgggcataagcactctctgtctagcggtggcttctcccccgtggctggggttggcgcccaggatggggattatcagaggcctcattcagcacagccggcagaccgcggttatgatcgcccaaaagctgtgtcagctctggctaccgaatccggacatcccgattctcagaaaccaccgactcaccctggcactagcgacagctattcagcgcccagagactgtctgaccccactgaatcagacggcaatgaccgccctactatag

SEQ ID NO: 280607 - DNA, 2148 bp, Artificial Sequence
  derived and/or modified sequence
atggtgcctggggcccggggcggcggggccctggcccgggctgctggccggggcctgctggccctgctgctggccgtgtctgcccccctgcggctgcaggccgaggagctgggagatggctgcggccacctggtgacctaccaggacagcggcaccatgaccagcaagaactacccaggcacctaccccaaccacacagtgtgtgagaagaccatcaccgtgcccaagggcaagaggctcatcctgcggctgggggacctggacatcgagagccagacctgtgccagtgactacctgctcttcaccagcagcagtgaccagtatggcccctactgcggctccatgacagtgcccaaggagctgctgctgaacaccagcgaggtgacagtgcgctttgagagcggcagccacatcagcggccggggcttcctgctgacctacgccagcagtgaccacccagacctgatcacctgcctggagcgggccagccactacctgaagacagagtacagcaagttctgcccagctggctgcagagatgtggccggggacatcagcggcaacatggtggatggctacagagacaccagcctgctgtgcaaggccgccatccacgccggcatcatcgcagatgagctgggcggccagatctctgtgctgcagaggaagggcatcagccgctatgagggcatcctggccaacggggtgctgagcagagatggcagcctgagtgacaagcgcttcctgttcaccagcaatggctgcagccgcagcctgagctttgagccagatggccagatccgggccagcagctcctggcagagcgtgaatgaaagtggggaccaggtgcactggagccctggccaggcccggctgcaggaccagggccccagctgggccagcggggacagcagcaacaaccacaagccccgggagtggctggagattgacctgggggagaagaagaagatcaccggcatccgcaccaccggcagcacccagagcaacttcaacttctacgtgaagagctttgtgatgaacttcaagaacaacaacagcaagtggaagacctacaagggcatcgtgaacaatgaggagaaggtgttccagggcaacagcaacttccgggaccctgtgcagaacaacttcatcccccccatcgtggcccgctacgtgcgggtggtgccccagacctggcaccagagaattgccctgaaggtggagctgattggctgccagatcacccagggcaatgacagcctggtgtggaggaagaccagccagagcacctctgtgtccaccaagaaggaggatgagaccatcacccggcccatccccagcgaggagaccagcacaggcatcaacatcaccaccgtggccatccccctggtgctgctggtggtgctggtgtttgctggcatgggcatctttgctgccttcaggaagaagaagaagaagggcagcccctacggcagcgctgaggcccagaagacagactgctggaagcagatcaagtacccctttgcccggcaccagagcgctgagttcaccatctcctatgacaatgagaaggagatgacccagaagctggacctgatcaccagtgacatggctgactaccagcagcccctgatgattggcaccggcaccgtgaccaggaagggcagcaccttccggcccatggacacagatgctgaggaggccggcgtgtccacagatgctgggggccactatgactgcccccagagagctggaagacatgaatatgccctgcccctggcccctcctgagccagaatatgccacccccatcgtggagcggcacgtgctgcgggcccacaccttcagcgcccagagcggctacagagtgcccggcccccagcccggccacaagcacagcctgagcagcggcggcttcagccctgtggccggcgtgggcgcccaggatggagactaccagaggccccacagcgcccagcctgctgaccggggctatgaccggcccaaggctgtgtctgccctggccacagagagcggccacccagacagccagaagccacccacccaccctggcaccagtgacagctacagcgccccccgggactgcctgacccccctgaaccagacagccatgacagccctgctgtag

SEQ ID NO: 280608 - DNA, 2148 bp, Artificial Sequence
  derived and/or modified sequence
atggtgcccggcgcccggggcggcggcgccctggcccgggccgccggtcgcggccttctggcccttttgttggccgtgtccgccccactgagactgcaggccgaggaactcggggacggctgcgggcacctagtgacttatcaggactcgggcacgatgaccagcaagaattatccaggaacctacccaaaccacaccgtctgcgaaaaaacaattactgtcccaaaggggaaaaggctcattctgagactgggagatctggacattgagtcccagacgtgcgctagcgattacttgctttttaccagctcgtcagaccagtacggtccatattgtgggagtatgacagtccctaaggagttgctattgaacacatccgaggtaacagtgaggtttgaatccggaagccacatcagtggcaggggcttccttctcacgtacgcatcatctgaccatcctgacctcattacatgccttgaaagggcatctcactatctgaagacggagtactcaaagttctgtcctgcaggatgtagggatgtggctggggacatctccgggaacatggtcgacggctatcgtgataccagcctcttgtgtaaagctgccatccatgctggcattatagctgacgaactcggagggcaaattagtgtgctccagagaaagggcatctctcggtatgagggcatcctcgccaacggagtgctgtcccgggatggctcgctctctgataagcggttcctcttcaccagtaacggctgctcacggagtctgagtttcgaacccgacggccaaattcgagcatcgtcctcctggcagtcagtcaacgagtctggagatcaggttcattggagccccggtcaggccaggcttcaagatcaagggccctcttgggcctctggcgacagttcaaacaatcacaagcctcgggagtggctggagattgacctgggcgagaagaagaagattactggaataagaaccaccggaagcacgcagtccaatttcaacttctatgtgaagtctttcgtgatgaacttcaagaacaacaattccaagtggaaaacctataagggcatagtgaataacgaggagaaagtctttcaggggaactctaatttccgcgatccggtgcaaaataacttcataccccctattgtggcacgctacgtccgggtggtgccccagacttggcaccagcgcatcgcactgaaggttgagttgattggatgtcaaattacacagggcaatgattccctagtgtggaggaagacgagtcagtccacctctgtatcaaccaagaaagaggatgagaccatcactcgaccaatccccagcgaagaaacctccactggaatcaacataactacggtcgccatccctttagtgctgctggtggtccttgtgttcgccggtatgggcattttcgctgcatttcgtaagaagaagaagaagggaagtccctacgggtccgcggaagctcagaagaccgactgctggaaacagattaagtacccgtttgcgcgtcatcagagcgccgaatttactatctcatatgataatgaaaaggagatgacacagaagctggatctgattacctctgacatggctgattatcagcagccgttgatgatcggtaccggaacggtgacaagaaagggtagcaccttcagacccatggatactgacgctgaagaagcaggtgtgtctacagatgccgggggacactacgattgtcctcaacgcgccggacgtcatgagtatgctctgccgctggctccacccgagccggaatatgctacacctattgtagagcggcacgttttacgagcccacaccttttcagctcagtcaggctacagagtgccaggtccacagccagggcacaaacattctttgtccagtggggggtttagcccggtcgccggcgttggcgctcaggatggcgactatcaaaggccacactccgcccagccggctgatagggggtatgaccgacccaaagctgtgtctgcactggccacggaatcaggtcatcctgactctcagaagccacccacccaccccggaacttcagactcatattccgctcctagggattgtctgacccctctaaatcagaccgctatgactgctctcctatag

SEQ ID NO: 280609 - DNA, 2148 bp, Artificial Sequence
  derived and/or modified sequence
atggtgcccggagctcggggaggaggcgcattagccagggctgccggtcgtggccttctggccctgctgctagccgtatcagctcctctacggctgcaggccgaagagttaggcgatggctgtggccaccttgttacatatcaggattctggtacgatgacaagtaagaattaccccggaacctaccccaatcataccgtgtgcgagaagacaattacggtacctaagggaaagagacttattttgaggctgggagaccttgacatcgagagccaaacgtgtgcaagcgactatctgctattcacaagctcttcagatcagtatggaccctactgcggtagcatgacagttccaaaagagctgttgctgaacacaagtgaagtcactgttagattcgagtccggcagccatatctccgggaggggattccttctgacttacgcctccagtgaccatcctgacctcatcacctgtctagaacgggcatcacattaccttaagactgagtattccaagttttgtcctgctggctgccgagatgtggctggagatatttcaggaaatatggttgacggctacagggatacttcattgctgtgtaaggccgctatacatgctggtatcatcgcggacgaactgggagggcaaataagtgtgttacagagaaaggggatttcgcggtacgaagggattctggcaaacggggtcttgagtagggatgggtctctttccgataaacgctttctgttcactagcaatgggtgctcaagaagcctaagttttgagcccgatggccagataagggccagcagttcgtggcagagcgtgaatgagagcggagatcaagtacactggagtccgggtcaggcccgattacaggatcagggaccctcctgggccagcggcgattcctctaacaatcataagcccagggaatggttagaaatcgatctcggcgagaagaagaagatcaccggaattcgcactacagggagtacacagagtaattttaatttctatgttaagtcctttgtaatgaacttcaagaacaacaactccaaatggaagacttacaaggggattgtgaataatgaagagaaggtatttcaagggaattctaactttagggatcctgttcagaacaacttcattcccccaatcgtcgcgaggtatgttagagtggttcctcagacctggcaccaacggatcgctctaaaggtggagttgattggatgccagatcacgcagggtaatgattctctggtctggaggaaaacctcacagagcacctctgtgagtacaaaaaaggaggatgagaccatcacacgcccaattccgagtgaggagacctcaacaggtataaacataactaccgtggctatccccctggtgctgttagtggtgttggtctttgccggtatgggcatctttgccgctttcaggaaaaagaaaaagaaaggctccccttacgggtctgcggaggcacaaaagaccgattgttggaaacaaatcaaatacccatttgctcgacaccagtcagcagaattcaccatatcttatgacaatgagaaggagatgacgcagaagctagacctgataacctcggatatggctgactatcagcaaccactaatgatcggaaccggaaccgttactaggaagggatctacctttcggcctatggataccgatgctgaagaggccggagtgtcgaccgacgccggaggccactacgattgcccacaaagggcagggaggcacgaatatgccctccctctagctccccctgagcctgagtacgcaacacccattgtcgagcgacacgttttacgggcacacaccttctccgcgcaaagcggatacagagtcccgggacctcaaccagggcacaagcattccctttctagcggcggattctcgccagtagccggtgtcggcgcacaagacggcgattaccaacgcccacattccgctcagcctgccgatagagggtatgatcgacccaaagccgtatccgctctggcaacagagtctggacatccggactcccagaagccaccgactcatcccggaacctccgacagttattcggctcccagagattgtttgacacctctgaaccagacagccatgactgcacttctttag

SEQ ID NO: 280610 - protein, 908 aa, Artificial Sequence
  derived and/or modified sequence
MKIIFPILSNPVFRRTVKLLLCLLWIGYSQGTTHVLRFGGIFEYVESGPMGAEELAFRFAVNTINRNRTLLPNTTLTYDTQKINLYDSFEASKKACDQLSLGVAAIFGPSHSSSANAVQSICNALGVPHIQTRWKHQVSDNKDSFYVSLYPDFSSLSRAILDLVQFFKWKTVTVVYDDSTGLIRLQELIKAPSRYNLRLKIRQLPADTKDAKPLLKEMKRGKEFHVIFDCSHEMAAGILKQALAMGMMTEYYHYIFTTLDLFALDVEPYRYSGVNMTGFRILNTENTQVSSIIEKWSMERLQAPPKPDSGLLDGFMTTDAALMYDAVHVVSVAVQQFPQMTVSSLQCNRHKPWRFGTRFMSLIKEAHWEGLTGRITFNKTNGLRTDFDLDVISLKEEGLEKIGTWDPASGLNMTESQKGKPANITDSLSNRSLIVTTILEEPYVLFKKSDKPLYGNDRFEGYCIDLLRELSTILGFTYEIRLVEDGKYGAQDDANGQWNGMVRELIDHKADLAVAPLAITYVREKVIDFSKPFMTLGISILYRKPNGTNPGVFSFLNPLSPDIWMYILLAYLGVSCVLFVIARFSPYEWYNPHPCNPDSDVVENNFTLLNSFWFGVGALMQQGSELMPKALSTRIVGGIWWFFTLIIISSYTANLAAFLTVERMESPIDSADDLAKQTKIEYGAVEDGATMTFFKKSKISTYDKMWAFMSSRRQSVLVKSNEEGIQRVLTSDYAFLMESTTIEFVTQRNCNLTQIGGLIDSKGYGVGTPMGSPYRDKITIAILQLQEEGKLHMMKEKWWRGNGCPEEESKEASALGVQNIGGIFIVLAAGLVLSVFVAVGEFLYKSKKNAQLEKRSFCSAMVEELRMSLKCQRRLKHKPQAPVIVKTEEVINMHTFNDRRLPGKETMA

SEQ ID NO: 280611 - DNA, 2727 bp, Artificial Sequence
  derived and/or modified sequence
atgaaaattatattcccgatcctcagtaatcccgtcttccggcggactgtcaagttgctgctgtgcttactgtggattggctattctcagggcacaacccacgtgcttagattcggggggatcttcgaatatgtggagtccggtcccatgggcgcagaggaattagcattccgatttgccgtcaacacaattaatagaaatagaacactgctccctaataccacactaacatacgacacccagaaaatcaacctctacgatagcttcgaggccagcaagaaggcctgcgaccagctttccctaggcgtggccgctattttcggaccatcacatagctcctctgcgaacgccgttcagtctatttgcaacgcacttggggtaccacacattcaaactcgatggaagcatcaagtgtccgataacaaggacagcttctatgtgagcctttatcctgatttctctagccttagcagggctatcctggatctggtccaattcttcaaatggaaaacggtcacagtagtatatgatgattctacaggattgatccggctccaagaattgataaaggctccctccagatacaatttgagattaaaaattcgtcagctccctgccgacaccaaagacgcaaagccactgttaaaggaaatgaagaggggaaaagagtttcatgtgatctttgattgctcacatgaaatggccgctgggattctgaagcaagcgctggctatgggtatgatgactgaatattaccattatatcttcactacacttgacttattcgccttagacgtcgagccctatcgctatagcggtgttaatatgacaggcttcaggatcctcaatactgagaatacgcaagtgagtagtattatagagaaatggagcatggagcgtttgcaggccccccctaaacctgattcaggactgctcgacggctttatgacaacggatgccgctctcatgtatgacgctgtgcatgtcgtttccgttgccgtgcagcaatttccccagatgacagtctcatctctgcagtgtaataggcacaaaccttggcggtttggtactagattcatgtccctgattaaagaggcccactgggaaggtttgaccgggcgtatcacttttaacaaaaccaatggcctgcgcactgatttcgacctggacgtcatcagtttgaaggaagaaggcttagagaagatcggcacatgggacccagcatcaggacttaatatgaccgagagtcaaaaaggaaaaccggctaacataaccgacagtctttccaatcgctccttgatagtcacaactatcttggaagaaccttacgtactcttcaaaaaatcggataagccgctttatgggaacgatcgtttcgaaggctattgtattgacttacttcgagaattgtcaacaatcttgggatttacctatgagataaggcttgtggaggatggtaaatacggagcccaggatgacgccaatggtcagtggaatgggatggtgcgcgagcttatcgatcataaggccgatctggcagtggcccctttggccattacgtacgtgagagagaaagtgatcgatttcagcaaaccgttcatgactcttgggattagcatcctgtaccggaaacctaatggaaccaatcccggcgttttctcattcctgaacccgttgagtcctgacatctggatgtatatccttctggcttatctaggggtgtcctgcgtgcttttcgtgattgcccggttttcaccgtacgagtggtacaaccctcatccgtgtaaccccgattcagatgtagttgagaacaattttaccctcctgaactccttttggttcggcgtgggagccctgatgcagcaaggttcggagcttatgccaaaagccttatccacaagaatagtgggcggaatatggtggtttttcactctcattataataagtagctatacagctaatctggccgcatttctcacggtggaaagaatggagtcacctatcgatagtgccgatgatttagcgaaacaaaccaaaattgaatatggagccgtggaggatggagctacgatgacattcttcaagaagtctaaaatctccacatatgataaaatgtgggcctttatgagttcgaggagacagtctgtgttggttaagagcaacgaagaggggattcagcgggtactgaccagcgattatgcctttctcatggagtcgaccaccattgaattcgttacccagagaaattgtaatctgactcagatagggggattgatcgattctaaggggtacggggtgggcacccctatgggctccccataccgggataagataacaatcgccattctgcagctccaggaagagggcaaattgcatatgatgaaggagaaatggtggcgtggcaacggctgtcccgaggaagaatccaaggaagccagcgccctaggagtgcagaacataggggggatctttatcgttctggcggctgggctggtgcttagcgtctttgtggcagttggagagttcctgtataagtccaagaagaatgcccagctggaaaagagatctttttgcagcgccatggtcgaggaactgagaatgtcgctgaagtgccagaggcgccttaagcacaaaccccaggctccagtgattgtgaaaacagaagaagtcatcaacatgcacactttcaatgatcgcaggctcccgggaaaagagaccatggcctag

SEQ ID NO: 280612 - DNA, 2840 bp, Artificial Sequence
  derived and/or modified sequence
agcaattggcaaatccagaatgttaaacccggtctagctccaaataaatgttatatataagggtagagagtaaagaagaataccactgttcttctccacatacacagaaggaatctaggtggtatttttgaatatgtggaatctggcccaatgggagctgaggaacttgcattcagatttgctgtgaacacaattaacagaaacagaacattgctacccaatactacccttacctatgatacccagaagataaacctttatgatagttttgaagcatccaagaaagcctgtgatcagctgtctcttggggtggctgccatcttcgggccttcacacagctcatcagcaaacgcagtgcagtccatctgcaatgctctgggagttccccacatacagacccgctggaagcaccaggtgtcagacaacaaagattccttctatgtcagtctctacccagacttctcttcactcagccgtgccattttagacctggtgcagtttttcaagtggaaaaccgtcacggttgtgtatgatgacagcactggtctcattcgtttgcaagagctcatcaaagctccatcaaggtataatcttcgactcaaaattcgtcagttacctgctgatacaaaggatgcaaaacccttactaaaagaaatgaaaagaggcaaggagtttcatgtaatctttgattgtagccatgaaatggcagcaggcattttaaaacaggcattagctatgggaatgatgacagaatactatcattatatctttaccactctggacctctttgctcttgatgttgagccctaccgatacagtggtgttaacatgacagggttcagaatattaaatacagaaaatacccaagtctcctccatcattgaaaagtggtcgatggaacgattgcaggcacctccgaaacccgattcaggtttgctggatggatttatgacgactgatgctgctctaatgtatgatgctgtgcatgtggtgtctgtggccgttcaacagtttccccagatgacagtcagttccttgcagtgtaatcgacataaaccctggcgcttcgggacccgctttatgagtctaattaaagaggcacattgggaaggcctcacaggcagaataactttcaacaaaaccaatggcttgagaacagattttgatttggatgtgatcagtctgaaggaagaaggtctagaaaagattggaacgtgggatccagccagtggcctgaatatgacagaaagtcaaaagggaaagccagcgaacatcacagattccttatccaatcgttctttgattgttaccaccattttggaagagccttatgtcctttttaagaagtctgacaaacctctctatggtaatgatcgatttgaaggctattgcattgatctcctcagagagttatctacaatccttggctttacatatgaaattagacttgtggaagatgggaaatatggagcccaggatgatgccaatggacaatggaatggaatggttcgtgaactaattgatcataaagctgaccttgcagttgctccactggctattacctatgttcgagagaaggtcatcgacttttccaagccctttatgacacttggaataagtattttgtaccgcaagcccaatggtacaaacccaggcgtcttctccttcctgaatcctctctcccctgatatctggatgtatattctgctggcttacttgggtgtcagttgtgtgctctttgtcatagccaggtttagtccttatgagtggtataatccacacccttgcaaccctgactcagacgtggtggaaaacaattttaccttgctaaatagtttctggtttggagttggagctctcatgcagcaaggttctgagctcatgcccaaagcactgtccaccaggatagtgggaggcatttggtggtttttcacacttatcatcatttcttcgtatactgctaacttagccgcctttctgacagtggaacgcatggaatcccctattgactctgctgatgatttagctaaacaaaccaagatagaatatggagcagtagaggatggtgcaaccatgacttttttcaagaaatcaaaaatctccacgtatgacaaaatgtgggcctttatgagtagcagaaggcagtcagtgctggtcaaaagtaatgaagaaggaatccagcgagtcctcacctctgattatgctttcctaatggagtcaacaaccatcgagtttgttacccagcggaactgtaacctgacacagattggcggccttatagactctaaaggttatggcgttggcactcccatgggttctccatatcgagacaaaattaccatagcaattcttcagctgcaagaggaaggcaaactgcatatgatgaaggagaaatggtggaggggcaatggttgcccagaagaggagagcaaagaggccagtgccctgggggttcagaatattggtggcatcttcattgttctggcagccggcttggtgctttcagtttttgtggcagtgggagaatttttatacaaatccaaaaaaaacgctcaattggaaaagaggtccttctgtagtgccatggtagaagaattgaggatgtccctgaagtgccagcgtcggttaaaacataagccacaggccccagttattgtgaaaacagaagaagttatcaacatgcacacatttaacgacagaaggttgccaggtaaagaaaccatggcataaagctgggaggccaaacacccaagcacaaactgtcgtctttttccaaacaatttagccagaatgtttcctgtggaaatatgcaacctgtgcaaaataaaatgagttacctc

SEQ ID NO: 280613 - DNA, 4921 bp, Artificial Sequence
  derived and/or modified sequence
ggagagcagctatctcagtctttctcacttaatcttggcttcacgtcagaagctgtgcagcagtgcagtagaatagggcctggcaaaacctttgctagcaaagcgccttttgtgccgggctgtggctcgctatcgacatctcgtccgttaccaaggctgggtttcctactgatttccctcctcctctgctttcacaggctcgcgcggccggacattgtgggtgtgcgtgctggatttctcccggatgctctccgactaacatggatgtcccaccattccttgcagtggaaggttgttccttggcgcagtgagtgaagaacatgcagcgattgctaatgggtttgggaagcggagactccttcctctctctatgaccatgccgtgatcgtgtctgcggtcaccactcgacgcatcctcatttctacccgaacccaggagccgaacgctagatcggggaagtgggtgccgtgcgtgtgggcacagaaacaccatgaagattattttcccgattctaagtaatccagtcttcaggcgcaccgttaaactcctgctctgtttactgtggattggatattctcaaggaaccacacatgtattaagatttggtggtatttttgaatatgtggaatctggcccaatgggagctgaggaacttgcattcagatttgctgtgaacacaattaacagaaacagaacattgctacccaatactacccttacctatgatacccagaagataaacctttatgatagttttgaagcatccaagaaagcctgtgatcagctgtctcttggggtggctgccatcttcgggccttcacacagctcatcagcaaacgcagtgcagtccatctgcaatgctctgggagttccccacatacagacccgctggaagcaccaggtgtcagacaacaaagattccttctatgtcagtctctacccagacttctcttcactcagccgtgccattttagacctggtgcagtttttcaagtggaaaaccgtcacggttgtgtatgatgacagcactggtctcattcgtttgcaagagctcatcaaagctccatcaaggtataatcttcgactcaaaattcgtcagttacctgctgatacaaaggatgcaaaacccttactaaaagaaatgaaaagaggcaaggagtttcatgtaatctttgattgtagccatgaaatggcagcaggcattttaaaacaggcattagctatgggaatgatgacagaatactatcattatatctttaccactctggacctctttgctcttgatgttgagccctaccgatacagtggtgttaacatgacagggttcagaatattaaatacagaaaatacccaagtctcctccatcattgaaaagtggtcgatggaacgattgcaggcacctccgaaacccgattcaggtttgctggatggatttatgacgactgatgctgctctaatgtatgatgctgtgcatgtggtgtctgtggccgttcaacagtttccccagatgacagtcagttccttgcagtgtaatcgacataaaccctggcgcttcgggacccgctttatgagtctaattaaagaggcacattgggaaggcctcacaggcagaataactttcaacaaaaccaatggcttgagaacagattttgatttggatgtgatcagtctgaaggaagaaggtctagaaaagattggaacgtgggatccagccagtggcctgaatatgacagaaagtcaaaagggaaagccagcgaacatcacagattccttatccaatcgttctttgattgttaccaccattttggaagagccttatgtcctttttaagaagtctgacaaacctctctatggtaatgatcgatttgaaggctattgcattgatctcctcagagagttatctacaatccttggctttacatatgaaattagacttgtggaagatgggaaatatggagcccaggatgatgccaatggacaatggaatggaatggttcgtgaactaattgatcataaagctgaccttgcagttgctccactggctattacctatgttcgagagaaggtcatcgacttttccaagccctttatgacacttggaataagtattttgtaccgcaagcccaatggtacaaacccaggcgtcttctccttcctgaatcctctctcccctgatatctggatgtatattctgctggcttacttgggtgtcagttgtgtgctctttgtcatagccaggtttagtccttatgagtggtataatccacacccttgcaaccctgactcagacgtggtggaaaacaattttaccttgctaaatagtttctggtttggagttggagctctcatgcagcaaggttctgagctcatgcccaaagcactgtccaccaggatagtgggaggcatttggtggtttttcacacttatcatcatttcttcgtatactgctaacttagccgcctttctgacagtggaacgcatggaatcccctattgactctgctgatgatttagctaaacaaaccaagatagaatatggagcagtagaggatggtgcaaccatgacttttttcaagaaatcaaaaatctccacgtatgacaaaatgtgggcctttatgagtagcagaaggcagtcagtgctggtcaaaagtaatgaagaaggaatccagcgagtcctcacctctgattatgctttcctaatggagtcaacaaccatcgagtttgttacccagcggaactgtaacctgacacagattggcggccttatagactctaaaggttatggcgttggcactcccatgggttctccatatcgagacaaaattaccatagcaattcttcagctgcaagaggaaggcaaactgcatatgatgaaggagaaatggtggaggggcaatggttgcccagaagaggagagcaaagaggccagtgccctgggggttcagaatattggtggcatcttcattgttctggcagccggcttggtgctttcagtttttgtggcagtgggagaatttttatacaaatccaaaaaaaacgctcaattggaaaagagagccaagactaagttacctcaagactatgtattcctccctattttggagtcagtttccatttctacagtgttgtcatcatcaccatcttcatcatcattatcatcatgttcttaataagtacatctaataaggtccttctgtagtgccatggtagaagaattgaggatgtccctgaagtgccagcgtcggttaaaacataagccacaggccccagttattgtgaaaacagaagaagttatcaacatgcacacatttaacgacagaaggttgccaggtaaagaaaccatggcataaagctgggaggccaaacacccaagcacaaactgtcgtctttttccaaacaatttagccagaatgtttcctgtggaaatatgcaacctgtgcaaaataaaatgagttacctcatgccgctgtgtctatgaactagagactctgtgatctaagcagttgcaatgatcagacttgatttacaagcatcatggatcaaccaagttacacggggttacactgttaatcatgggttcctcccttcttctgagtgaatgttaacatgcgcattttgtggctgatttcaaatgcagtccagtgagaaattacaggttccttttgaagctcaactgttgccaggagatggaatatcaatgcccaacagggcaaccaataaaagtgtcactaagaatataaatatttggaatcagcaaaaactgtagtgttacaggaaacagtacagtcttctgaacacccagatcatagaggtgatgatgttactagcccccaactactcagtataattattgtctgaatgcaaagtatgtgtttataggatgtgaaaaaatgtaatgcaaaacaaatttgaatcccatggcagttggaatataaagcagatgttcatcacttattttccttttttcttttcttatttttttttttgacagtctgtgtcactgattgagatagaaatgccaattatcaaggaaataatgttttcttaagttccctaaggcagaagatttaacatgcaattctaccagatcccttcctattcccccaacaccttttctctaacccccatatcccaaataataataataataataataataataataataataataataaaagcagttggttcagtgattctgaattaaaaggataatgttttgcaatgttcaagttgtaaaaactggccgagtattggctgtgtggaagactaaagctttcattctaacattcagacatagcaatccaaacccttgttcctgctgtaaatgaacttgatggagcatgggcagatttcagtgatacgagaaaggggactggtcatctatagaaaaatctgtgagagaacttggaagtggactgcgtttatcaatacagtcacaatgttaaatgaacaaaattcttgaacagttttttttcaaaaaatgttcaggtttatttgtggaaatgcaagatttctatgaaaatagtttttgtatggaaatttttgtaatactttttatcaacaaaacaagaacatgtgttcctgtcaggggtgtgatgtcaagcatgaatggtagtgcgtgtgcaccaccaacgtttggtgaaaactatttttatcaagaaaaaaggaatcatagaagagaaatattttcaagttagataatataaaagctaggtgcactaccaccactgcttaccatgccacacccctggtttccacgaggctgacaacatactgtaatgaacaattgtgtgtaaaatggtaaaagacacagacctcttgacaacattgtgataacagttgagtgcacacagtttgctgtttgaatccaatgcacaaaattaaaaaaaatcattaaaactatgttcattttactttca

SEQ ID NO: 280614 - DNA, 4876 bp, Artificial Sequence
  derived and/or modified sequence
ggagagcagctatctcagtctttctcacttaatcttggcttcacgtcagaagctgtgcagcagtgcagtagaatagggcctggcaaaacctttgctagcaaagcgccttttgtgccgggctgtggctcgctatcgacatctcgtccgttaccaaggctgggtttcctactgatttccctcctcctctgctttcacaggctcgcgcggccggacattgtgggtgtgcgtgctggatttctcccggatgctctccgactaacatggatgtcccaccattccttgcagtggaaggttgttccttggcgcagtgagtgaagaacatgcagcgattgctaatgggtttgggaagcggagactccttcctctctctatgaccatgccgtgatcgtgtctgcggtcaccactcgacgcatcctcatttctacccgaacccaggagccgaacgctagatcggggaagtgggtgccgtgcgtgtgggcacagaaacaccatgaagattattttcccgattctaagtaatccagtcttcaggcgcaccgttaaactcctgctctgtttactgtggattggatattctcaaggaaccacacatgtattaagatttggtggtatttttgaatatgtggaatctggcccaatgggagctgaggaacttgcattcagatttgctgtgaacacaattaacagaaacagaacattgctacccaatactacccttacctatgatacccagaagataaacctttatgatagttttgaagcatccaagaaagcctgtgatcagctgtctcttggggtggctgccatcttcgggccttcacacagctcatcagcaaacgcagtgcagtccatctgcaatgctctgggagttccccacatacagacccgctggaagcaccaggtgtcagacaacaaagattccttctatgtcagtctctacccagacttctcttcactcagccgtgccattttagacctggtgcagtttttcaagtggaaaaccgtcacggttgtgtatgatgacagcactggtctcattcgtttgcaagagctcatcaaagctccatcaaggtataatcttcgactcaaaattcgtcagttacctgctgatacaaaggatgcaaaacccttactaaaagaaatgaaaagaggcaaggagtttcatgtaatctttgattgtagccatgaaatggcagcaggcattttaaaacaggcattagctatgggaatgatgacagaatactatcattatatctttaccactctggacctctttgctcttgatgttgagccctaccgatacagtggtgttaacatgacagggttcagaatattaaatacagaaaatacccaagtctcctccatcattgaaaagtggtcgatggaacgattgcaggcacctccgaaacccgattcaggtttgctggatggatttatgacgactgatgctgctctaatgtatgatgctgtgcatgtggtgtctgtggccgttcaacagtttccccagatgacagtcagttccttgcagtgtaatcgacataaaccctggcgcttcgggacccgctttatgagtctaattaaagaggcacattgggaaggcctcacaggcagaataactttcaacaaaaccaatggcttgagaacagattttgatttggatgtgatcagtctgaaggaagaaggtctagaaaagattggaacgtgggatccagccagtggcctgaatatgacagaaagtcaaaagggaaagccagcgaacatcacagattccttatccaatcgttctttgattgttaccaccattttggaagagccttatgtcctttttaagaagtctgacaaacctctctatggtaatgatcgatttgaaggctattgcattgatctcctcagagagttatctacaatccttggctttacatatgaaattagacttgtggaagatgggaaatatggagcccaggatgatgccaatggacaatggaatggaatggttcgtgaactaattgatcataaagctgaccttgcagttgctccactggctattacctatgttcgagagaaggtcatcgacttttccaagccctttatgacacttggaataagtattttgtaccgcaagcccaatggtacaaacccaggcgtcttctccttcctgaatcctctctcccctgatatctggatgtatattctgctggcttacttgggtgtcagttgtgtgctctttgtcatagccaggtttagtccttatgagtggtataatccacacccttgcaaccctgactcagacgtggtggaaaacaattttaccttgctaaatagtttctggtttggagttggagctctcatgcagcaaggttctgagctcatgcccaaagcactgtccaccaggatagtgggaggcatttggtggtttttcacacttatcatcatttcttcgtatactgctaacttagccgcctttctgacagtggaacgcatggaatcccctattgactctgctgatgatttagctaaacaaaccaagatagaatatggagcagtagaggatggtgcaaccatgacttttttcaagaaatcaaaaatctccacgtatgacaaaatgtgggcctttatgagtagcagaaggcagtcagtgctggtcaaaagtaatgaagaaggaatccagcgagtcctcacctctgattatgctttcctaatggagtcaacaaccatcgagtttgttacccagcggaactgtaacctgacacagattggcggccttatagactctaaaggttatggcgttggcactcccatgggttctccatatcgagacaaaattaccatagcaattcttcagctgcaagaggaaggcaaactgcatatgatgaaggagaaatggtggaggggcaatggttgcccagaagaggagagcaaagaggccagtgccctgggggttcagaatattggtggcatcttcattgttctggcagccggcttggtgctttcagtttttgtggcagtgggagaatttttatacaaatccaaaaaaaacgctcaattggaaaaggaatcttctatttggttagtgccaccataccatccagacactgtttagtaatcttttgaaacttactaaaagaggtttttaataatgaggtccttctgtagtgccatggtagaagaattgaggatgtccctgaagtgccagcgtcggttaaaacataagccacaggccccagttattgtgaaaacagaagaagttatcaacatgcacacatttaacgacagaaggttgccaggtaaagaaaccatggcataaagctgggaggccaaacacccaagcacaaactgtcgtctttttccaaacaatttagccagaatgtttcctgtggaaatatgcaacctgtgcaaaataaaatgagttacctcatgccgctgtgtctatgaactagagactctgtgatctaagcagttgcaatgatcagacttgatttacaagcatcatggatcaaccaagttacacggggttacactgttaatcatgggttcctcccttcttctgagtgaatgttaacatgcgcattttgtggctgatttcaaatgcagtccagtgagaaattacaggttccttttgaagctcaactgttgccaggagatggaatatcaatgcccaacagggcaaccaataaaagtgtcactaagaatataaatatttggaatcagcaaaaactgtagtgttacaggaaacagtacagtcttctgaacacccagatcatagaggtgatgatgttactagcccccaactactcagtataattattgtctgaatgcaaagtatgtgtttataggatgtgaaaaaatgtaatgcaaaacaaatttgaatcccatggcagttggaatataaagcagatgttcatcacttattttccttttttcttttcttatttttttttttgacagtctgtgtcactgattgagatagaaatgccaattatcaaggaaataatgttttcttaagttccctaaggcagaagatttaacatgcaattctaccagatcccttcctattcccccaacaccttttctctaacccccatatcccaaataataataataataataataataataataataataataataaaagcagttggttcagtgattctgaattaaaaggataatgttttgcaatgttcaagttgtaaaaactggccgagtattggctgtgtggaagactaaagctttcattctaacattcagacatagcaatccaaacccttgttcctgctgtaaatgaacttgatggagcatgggcagatttcagtgatacgagaaaggggactggtcatctatagaaaaatctgtgagagaacttggaagtggactgcgtttatcaatacagtcacaatgttaaatgaacaaaattcttgaacagttttttttcaaaaaatgttcaggtttatttgtggaaatgcaagatttctatgaaaatagtttttgtatggaaatttttgtaatactttttatcaacaaaacaagaacatgtgttcctgtcaggggtgtgatgtcaagcatgaatggtagtgcgtgtgcaccaccaacgtttggtgaaaactatttttatcaagaaaaaaggaatcatagaagagaaatattttcaagttagataatataaaagctaggtgcactaccaccactgcttaccatgccacacccctggtttccacgaggctgacaacatactgtaatgaacaattgtgtgtaaaatggtaaaagacacagacctcttgacaacattgtgataacagttgagtgcacacagtttgctgtttgaatccaatgcacaaaattaaaaaaaatcattaaaactatgttcattttactttca

SEQ ID NO: 280615 - DNA, 4789 bp, Artificial Sequence
  derived and/or modified sequence
ggagagcagctatctcagtctttctcacttaatcttggcttcacgtcagaagctgtgcagcagtgcagtagaatagggcctggcaaaacctttgctagcaaagcgccttttgtgccgggctgtggctcgctatcgacatctcgtccgttaccaaggctgggtttcctactgatttccctcctcctctgctttcacaggctcgcgcggccggacattgtgggtgtgcgtgctggatttctcccggatgctctccgactaacatggatgtcccaccattccttgcagtggaaggttgttccttggcgcagtgagtgaagaacatgcagcgattgctaatgggtttgggaagcggagactccttcctctctctatgaccatgccgtgatcgtgtctgcggtcaccactcgacgcatcctcatttctacccgaacccaggagccgaacgctagatcggggaagtgggtgccgtgcgtgtgggcacagaaacaccatgaagattattttcccgattctaagtaatccagtcttcaggcgcaccgttaaactcctgctctgtttactgtggattggatattctcaaggaaccacacatgtattaagatttggtggtatttttgaatatgtggaatctggcccaatgggagctgaggaacttgcattcagatttgctgtgaacacaattaacagaaacagaacattgctacccaatactacccttacctatgatacccagaagataaacctttatgatagttttgaagcatccaagaaagcctgtgatcagctgtctcttggggtggctgccatcttcgggccttcacacagctcatcagcaaacgcagtgcagtccatctgcaatgctctgggagttccccacatacagacccgctggaagcaccaggtgtcagacaacaaagattccttctatgtcagtctctacccagacttctcttcactcagccgtgccattttagacctggtgcagtttttcaagtggaaaaccgtcacggttgtgtatgatgacagcactggtctcattcgtttgcaagagctcatcaaagctccatcaaggtataatcttcgactcaaaattcgtcagttacctgctgatacaaaggatgcaaaacccttactaaaagaaatgaaaagaggcaaggagtttcatgtaatctttgattgtagccatgaaatggcagcaggcattttaaaacaggcattagctatgggaatgatgacagaatactatcattatatctttaccactctggacctctttgctcttgatgttgagccctaccgatacagtggtgttaacatgacagggttcagaatattaaatacagaaaatacccaagtctcctccatcattgaaaagtggtcgatggaacgattgcaggcacctccgaaacccgattcaggtttgctggatggatttatgacgactgatgctgctctaatgtatgatgctgtgcatgtggtgtctgtggccgttcaacagtttccccagatgacagtcagttccttgcagtgtaatcgacataaaccctggcgcttcgggacccgctttatgagtctaattaaagaggcacattgggaaggcctcacaggcagaataactttcaacaaaaccaatggcttgagaacagattttgatttggatgtgatcagtctgaaggaagaaggtctagaaaagattggaacgtgggatccagccagtggcctgaatatgacagaaagtcaaaagggaaagccagcgaacatcacagattccttatccaatcgttctttgattgttaccaccattttggaagagccttatgtcctttttaagaagtctgacaaacctctctatggtaatgatcgatttgaaggctattgcattgatctcctcagagagttatctacaatccttggctttacatatgaaattagacttgtggaagatgggaaatatggagcccaggatgatgccaatggacaatggaatggaatggttcgtgaactaattgatcataaagctgaccttgcagttgctccactggctattacctatgttcgagagaaggtcatcgacttttccaagccctttatgacacttggaataagtattttgtaccgcaagcccaatggtacaaacccaggcgtcttctccttcctgaatcctctctcccctgatatctggatgtatattctgctggcttacttgggtgtcagttgtgtgctctttgtcatagccaggtttagtccttatgagtggtataatccacacccttgcaaccctgactcagacgtggtggaaaacaattttaccttgctaaatagtttctggtttggagttggagctctcatgcagcaaggttctgagctcatgcccaaagcactgtccaccaggatagtgggaggcatttggtggtttttcacacttatcatcatttcttcgtatactgctaacttagccgcctttctgacagtggaacgcatggaatcccctattgactctgctgatgatttagctaaacaaaccaagatagaatatggagcagtagaggatggtgcaaccatgacttttttcaagaaatcaaaaatctccacgtatgacaaaatgtgggcctttatgagtagcagaaggcagtcagtgctggtcaaaagtaatgaagaaggaatccagcgagtcctcacctctgattatgctttcctaatggagtcaacaaccatcgagtttgttacccagcggaactgtaacctgacacagattggcggccttatagactctaaaggttatggcgttggcactcccatgggttctccatatcgagacaaaattaccatagcaattcttcagctgcaagaggaaggcaaactgcatatgatgaaggagaaatggtggaggggcaatggttgcccagaagaggagagcaaagaggccagtgccctgggggttcagaatattggtggcatcttcattgttctggcagccggcttggtgctttcagtttttgtggcagtgggagaatttttatacaaatccaaaaaaaacgctcaattggaaaagaggtccttctgtagtgccatggtagaagaattgaggatgtccctgaagtgccagcgtcggttaaaacataagccacaggccccagttattgtgaaaacagaagaagttatcaacatgcacacatttaacgacagaaggttgccaggtaaagaaaccatggcataaagctgggaggccaaacacccaagcacaaactgtcgtctttttccaaacaatttagccagaatgtttcctgtggaaatatgcaacctgtgcaaaataaaatgagttacctcatgccgctgtgtctatgaactagagactctgtgatctaagcagttgcaatgatcagacttgatttacaagcatcatggatcaaccaagttacacggggttacactgttaatcatgggttcctcccttcttctgagtgaatgttaacatgcgcattttgtggctgatttcaaatgcagtccagtgagaaattacaggttccttttgaagctcaactgttgccaggagatggaatatcaatgcccaacagggcaaccaataaaagtgtcactaagaatataaatatttggaatcagcaaaaactgtagtgttacaggaaacagtacagtcttctgaacacccagatcatagaggtgatgatgttactagcccccaactactcagtataattattgtctgaatgcaaagtatgtgtttataggatgtgaaaaaatgtaatgcaaaacaaatttgaatcccatggcagttggaatataaagcagatgttcatcacttattttccttttttcttttcttatttttttttttgacagtctgtgtcactgattgagatagaaatgccaattatcaaggaaataatgttttcttaagttccctaaggcagaagatttaacatgcaattctaccagatcccttcctattcccccaacaccttttctctaacccccatatcccaaataataataataataataataataataataataataataataaaagcagttggttcagtgattctgaattaaaaggataatgttttgcaatgttcaagttgtaaaaactggccgagtattggctgtgtggaagactaaagctttcattctaacattcagacatagcaatccaaacccttgttcctgctgtaaatgaacttgatggagcatgggcagatttcagtgatacgagaaaggggactggtcatctatagaaaaatctgtgagagaacttggaagtggactgcgtttatcaatacagtcacaatgttaaatgaacaaaattcttgaacagttttttttcaaaaaatgttcaggtttatttgtggaaatgcaagatttctatgaaaatagtttttgtatggaaatttttgtaatactttttatcaacaaaacaagaacatgtgttcctgtcaggggtgtgatgtcaagcatgaatggtagtgcgtgtgcaccaccaacgtttggtgaaaactatttttatcaagaaaaaaggaatcatagaagagaaatattttcaagttagataatataaaagctaggtgcactaccaccactgcttaccatgccacacccctggtttccacgaggctgacaacatactgtaatgaacaattgtgtgtaaaatggtaaaagacacagacctcttgacaacattgtgataacagttgagtgcacacagtttgctgtttgaatccaatgcacaaaattaaaaaaaatcattaaaactatgttcattttactttca

SEQ ID NO: 280616 - DNA, 2727 bp, Artificial Sequence
  derived and/or modified sequence
atgaagatcatcttccccatcctgagcaaccctgtgttccggaggacagtgaagctgctgctgtgcctgctgtggattggctacagccagggcaccacccacgtgctgcgctttggaggcatctttgaatatgtggagagcggccccatgggcgctgaggagctggccttccgctttgctgtgaacaccatcaacagaaacagaaccctgctgcccaacaccaccctgacctatgacacccagaagatcaacctgtatgacagctttgaggccagcaagaaggcctgtgaccagctgagcctgggcgtggccgccatcttcggccccagccacagcagcagcgccaatgctgtgcagagcatctgcaatgccctgggcgtgccccacatccagacccgctggaagcaccaggtgtctgacaacaaggacagcttctacgtgtccctgtacccagacttcagcagcctgagccgggccatcctggacctggtgcagttcttcaagtggaagacagtgacagtggtgtatgatgacagcacaggcctcatccggctgcaggagctgatcaaggcccccagccgctacaacctgcggctgaagatccggcagctgcctgctgacaccaaggatgccaagcccctgctgaaggagatgaagaggggcaaggagttccacgtgatctttgactgcagccatgagatggccgccggcatcctgaagcaggccctggccatgggcatgatgacagagtactaccactacatcttcaccaccctggacctgtttgccctggatgtggagccctaccgctacagcggcgtgaacatgacaggcttccgcatcctgaacacagagaacacccaggtgagcagcatcatcgagaagtggagcatggagcggctgcaggccccacccaagccagattctggcctgctggatggcttcatgaccacagatgctgccctgatgtatgatgctgtgcacgtggtgtctgtggccgtgcagcagttcccccagatgacagtgagcagcctgcagtgcaacagacacaagccctggaggtttggcacccgcttcatgagcctcatcaaggaggcccactgggagggcctgaccggccgcatcaccttcaacaagaccaacggcctgaggacagactttgacctggatgtgatcagcctgaaggaggagggcctggagaagattggcacctgggaccctgccagcggcctgaacatgacagagagccagaagggcaagccagccaacatcacagacagcctgagcaacagaagcctcatcgtgaccaccatcctggaggagccctacgtgctcttcaagaagagtgacaagcccctgtatggaaatgacagatttgagggctactgcatcgacctgctgcgggagctgagcaccatcctgggcttcacctatgagatccggctggtggaggatggcaagtacggggcccaggatgatgccaacggccagtggaatggcatggtgcgggagctgattgaccacaaggctgacctggccgtggcccccctggccatcacctacgtgcgggagaaggtgattgacttcagcaagcccttcatgaccctgggcatcagcatcctgtacaggaagcccaacggcaccaaccctggggtcttctccttcctgaaccccctgagcccagacatctggatgtacatcctgctggcctacctgggcgtgtcctgtgtgctgtttgtgattgcccgcttcagcccctatgagtggtacaacccccacccctgcaacccagacagtgatgtggtggagaacaacttcaccctgctgaacagcttctggtttggagtgggcgccctgatgcagcagggcagcgagctgatgcccaaggccctgagcaccagaattgtgggcggcatctggtggttcttcaccctcatcatcatcagcagctacacagccaacctggccgccttcctgactgtggagaggatggagagccccatcgacagcgcagatgacctggccaagcagaccaagattgaatatggagctgtggaggatggagccaccatgaccttcttcaagaagagcaagatcagcacctatgacaagatgtgggccttcatgagcagccggcggcagagcgtgctggtgaagagcaatgaggagggcatccagagggtgctgaccagtgactatgccttcctgatggagagcaccaccatcgagtttgtgacccagaggaactgcaacctgacccagattggaggcctgattgacagcaagggctacggcgtgggcacccccatgggcagcccctacagagacaagatcaccatcgccatcctgcagctgcaggaggagggcaagctgcacatgatgaaggagaagtggtggagaggaaatggctgcccagaggaggagagcaaggaggccagcgccctgggcgtgcagaacatcggcggcatcttcatcgtgctggccgccggcctggtgctgtctgtgtttgtggccgtgggggagttcctgtacaagagcaagaagaatgcccagctggagaagaggagcttctgcagcgccatggtggaggagctgaggatgagcctgaagtgccagaggcggctgaagcacaagccccaggcccctgtgattgtgaagacagaggaggtgatcaacatgcacaccttcaatgaccggcggctgcccgggaaggagaccatggcctag

SEQ ID NO: 280617 - DNA, 2727 bp, Artificial Sequence
  derived and/or modified sequence
atgaagatcatcttccccatcctgagcaaccccgtgttccggcggaccgtgaagctccttttgtgcctcctgtggatcggttattcgcagggtaccacgcacgttttaagatttggaggcatatttgagtatgtggagtccgggccaatgggggccgaggaactggccttccggtttgctgtgaacacaatcaatcggaataggacccttcttccaaacactaccctgacatacgacacccagaagatcaacctttacgactctttcgaggccagcaagaaggcctgcgaccagttaagtttgggagtggctgccatattcggcccgagtcatagtagctccgctaacgctgtccaaagtatctgtaacgcgctgggcgtccctcacattcagactagatggaagcatcaggtgtcggataacaaggacagcttttatgtgtcgctgtaccctgacttttcatccctcagcagagctattctggacctcgttcagttctttaagtggaagaccgttactgtggtgtatgacgactccacaggcctgatccgtctgcaggaactgattaaggctcccagtagatataacttgagactgaaaattcgccagctgcccgcagataccaaggacgccaagccgctgctgaaggaaatgaagcgcggtaaggagtttcacgtcatattcgattgctctcatgagatggctgccggaatcctgaagcaggctctggctatggggatgatgactgagtactaccactacatcttcaccacactggacctattcgcgctggacgtggaaccctatcggtactctggcgtgaacatgactggatttaggatcctgaatacagaaaacactcaggtttcttccattatcgagaagtggtcaatggaaagactgcaggccccccctaagcctgactcaggcctactggacggatttatgacaaccgacgcagctcttatgtacgacgccgtgcatgttgtgtccgtggcggtccagcagtttccccagatgaccgtgagcagtctccagtgcaacagacataagccctggcgtttcgggaccagattcatgtcgctgatcaaagaggcgcactgggaaggtctgaccggaagaataacctttaataaaactaacgggcttagaaccgatttcgatctcgacgtgatttctctcaaggaggagggtctagagaagatcggtacctgggaccccgcatcgggactgaacatgactgagtcccagaaaggaaagcccgctaatatcaccgattcacttagtaataggtctctgatagttacaaccattttagaggaaccatacgtcctgtttaaaaagtctgacaaaccactctacggtaatgacaggttcgagggctattgtattgatctgcttagggaactgtccactatcttggggttcacgtacgaaataaggctggtggaggacggaaagtatggagcccaggacgatgccaacggacagtggaacggcatggtccgggaactgatcgatcataaagccgacctcgcagtggccccgctagctattacatatgtgcgcgaaaaagtgatagatttctccaagcctttcatgactttgggcatttcaatcctttaccgaaaacctaatgggaccaaccccggggtattctctttccttaatcccctgagccctgatatctggatgtatatcctgttggcatatctcggcgtgagttgtgtactcttcgtgatcgcacggttctctccttatgagtggtataatcctcatccgtgtaatccggattccgacgttgtcgagaataatttcactctgctgaatagtttctggtttggcgtcggcgcactgatgcagcaggggagcgaattgatgcccaaggcccttagtaccagaattgtgggcggcatctggtggttttttaccctcatcatcattagctcgtacaccgccaatctggcagccttcctgactgtagagcgtatggaatcccctattgactctgcggacgatctggcgaagcagactaagatcgaatacggcgctgtggaagatggggcaacaatgactttctttaaaaaatctaagatttctacgtatgacaagatgtgggcctttatgagctcacgaaggcagagcgtattggttaaaagcaacgaggagggcatccagcgcgtccttacttccgattatgccttcctcatggaatccaccacaattgaattcgtcacccaacgtaactgtaatctgactcaaatcgggggtctcattgactccaaggggtacggcgttggcaccccaatgggttccccataccgcgataaaatcactattgcaattctgcagctgcaagaagaagggaagctgcatatgatgaaggagaagtggtggcgcggcaacgggtgcccagaagaagagagtaaagaagccagcgccctcggcgtacagaacattggtggtatctttatagttctggcagccggccttgtactgagtgttttcgtggcagtgggggaattcttgtataaaagcaagaagaacgcccagcttgagaagcgctcattttgttcagccatggtagaggagcttagaatgtctctgaagtgccaacgacgacttaagcacaaacctcaggcaccagttatcgtaaaaacggaagaggtgattaatatgcacacctttaacgaccgacggctcccaggcaaggaaactatggcttag

SEQ ID NO: 280618 - DNA, 2727 bp, Artificial Sequence
  derived and/or modified sequence
atgaagatcattttcccaatcctgagtaatccagtgttccgacgaactgtgaagcttctcctgtgcttactttggatcggatactcccaggggacaacacatgtgctgcggtttgggggaatctttgaatacgtcgaatcaggcccaatgggagcggaggaactggcatttagattcgctgtgaacaccatcaatagaaacaggacccttctgcctaacacgacccttacatacgacacgcagaagatcaatctgtacgactcatttgaagcatctaagaaggcctgtgaccagctctctctcggggttgctgctatctttggaccatcgcatagcagctccgctaatgccgtgcaaagtatatgtaatgcactgggcgtgccccatatccaaacccggtggaaacatcaggtgagcgacaataaggattcattctacgtttcgttgtacccagattttagttcgctgtccagggccatcctggatcttgtgcagtttttcaagtggaagaccgtgactgtggtatatgatgattcgacagggctaatcagactgcaagagctgattaaagccccttcgcgctataatcttcgactgaaaattagacagctcccagccgacacaaaggatgctaagcctctgctgaaggagatgaagcgtgggaaagagttccatgtgatcttcgattgtagccacgagatggctgcaggaatactgaaacaagctctggcgatgggaatgatgactgaatattatcattatatcttcacaacgctcgacctgtttgcactcgatgtcgaaccatacaggtactcaggagtgaacatgaccggattccggattctcaatactgaaaacacccaggtgagctccataatagaaaagtggagcatggagagactgcaggctccaccgaagccggacagcgggctcctggacggatttatgacaactgatgccgctttgatgtacgacgccgtgcatgtggtgtctgttgccgtgcagcaattcccccaaatgactgtgtcctctcttcagtgtaatagacataagccttggagattcggaacgaggttcatgagcctgatcaaagaggcgcactgggagggcttaactgggaggattacattcaataaaaccaatgggttgcgaaccgactttgatcttgacgttatcagcctaaaggaggaggggctggagaaaatagggacatgggaccctgccagcggcctgaacatgacagaatcgcagaaaggtaaacctgccaacataactgactcactctctaacagatctctgatagtcaccactatactggaggaaccgtatgtgctgttcaagaaaagtgacaagccgctttacggtaacgacagatttgagggctactgcatcgatcttttgagagagctgtccacgatattagggtttacatatgaaatcaggctggtggaagatggaaagtacggggcacaggatgacgcaaacgggcagtggaacggtatggtccgggaattgattgaccataaagctgatctggccgttgcccctctcgccatcacctatgtgagagaaaaggttattgatttttccaaaccatttatgactctcggcatttcaattctgtaccggaagcctaacggcaccaaccctggcgtttttagctttctgaaccctttgagtcctgacatttggatgtacattttgctcgcttacctaggtgtgagctgtgtattattcgttattgcccgtttctccccatacgaatggtataatccccatccatgtaatcctgacagcgacgtcgtggaaaataacttcacgctcctcaacagtttctggtttggcgtgggtgccctgatgcagcagggctctgagctcatgcctaaagcgctgagtacccgcatcgtaggaggcatttggtggttctttacattgatcattatttccagctacactgccaaccttgccgcttttttgacagtagaaagaatggaatctcctatcgactctgctgatgacctggcaaaacaaacaaagatcgagtatggtgccgtggaagatggcgctaccatgaccttttttaaaaagagtaagatcagtacctacgataaaatgtgggcgttcatgtctagccggcgtcagagcgtgctggtgaagtccaacgaagaagggatacaacgcgttctgacctctgattacgcttttctgatggagtcaactacaatagagttcgtgacccaacggaattgcaacctcacacaaattggcggtctcatcgacagtaaggggtatggcgtgggcacccctatgggatctccctacagggacaaaattaccatcgctatcctccagctgcaggaagagggtaaactacatatgatgaaagaaaagtggtggcgcggaaacggctgccctgaggaagaatccaaggaagcttcagcgttgggagtccagaatataggcggtatcttcatagtgctggcagcagggctagtgctctctgttttcgttgcggtgggcgagtttctctacaaaagcaaaaagaatgcgcagcttgaaaaacgctcattctgttcagccatggttgaggaactcagaatgagcctcaagtgccagaggcggttaaagcataagccccaggcccctgttatcgtgaaaactgaggaagtcattaacatgcacacattcaacgaccggagacttcccggaaaagagactatggcttag

SEQ ID NO: 280619 - DNA, 2727 bp, Artificial Sequence
  derived and/or modified sequence
atgaagatcatcttccccatcctgagcaaccccgtgttcagaagaaccgtgaagctgctgctgtgcctgctgtggatcggctacagccagggcaccacccacgtgctgagattcggcggcatcttcgagtacgtggagagcggccccatgggcgccgaggagctggccttcagattcgccgtgaacaccatcaacagaaacagaaccctgctgcccaacaccaccctgacctacgacacccagaagatcaacctgtacgacagcttcgaggccagcaagaaggcctgcgaccagctgagcctgggcgtggccgccatcttcggccccagccacagcagcagcgccaacgccgtgcagagcatctgcaacgccctgggcgtgccccacatccagaccagatggaagcaccaggtgagcgacaacaaggacagcttctacgtgagcctgtaccccgacttcagcagcctgagcagagccatcctggacctggtgcagttcttcaagtggaagaccgtgaccgtggtgtacgacgacagcaccggcctgatcagactgcaggagctgatcaaggcccccagcagatacaacctgagactgaagatcagacagctgcccgccgacaccaaggacgccaagcccctgctgaaggagatgaagagaggcaaggagttccacgtgatcttcgactgcagccacgagatggccgccggcatcctgaagcaggccctggccatgggcatgatgaccgagtactaccactacatcttcaccaccctggacctgttcgccctggacgtggagccctacagatacagcggcgtgaacatgaccggcttcagaatcctgaacaccgagaacacccaggtgagcagcatcatcgagaagtggagcatggagagactgcaggccccccccaagcccgacagcggcctgctggacggcttcatgaccaccgacgccgccctgatgtacgacgccgtgcacgtggtgagcgtggccgtgcagcagttcccccagatgaccgtgagcagcctgcagtgcaacagacacaagccctggagattcggcaccagattcatgagcctgatcaaggaggcccactgggagggcctgaccggcagaatcaccttcaacaagaccaacggcctgagaaccgacttcgacctggacgtgatcagcctgaaggaggagggcctggagaagatcggcacctgggaccccgccagcggcctgaacatgaccgagagccagaagggcaagcccgccaacatcaccgacagcctgagcaacagaagcctgatcgtgaccaccatcctggaggagccctacgtgctgttcaagaagagcgacaagcccctgtacggcaacgacagattcgagggctactgcatcgacctgctgagagagctgagcaccatcctgggcttcacctacgagatcagactggtggaggacggcaagtacggcgcccaggacgacgccaacggccagtggaacggcatggtgagagagctgatcgaccacaaggccgacctggccgtggcccccctggccatcacctacgtgagagagaaggtgatcgacttcagcaagcccttcatgaccctgggcatcagcatcctgtacagaaagcccaacggcaccaaccccggcgtgttcagcttcctgaaccccctgagccccgacatctggatgtacatcctgctggcctacctgggcgtgagctgcgtgctgttcgtgatcgccagattcagcccctacgagtggtacaacccccacccctgcaaccccgacagcgacgtggtggagaacaacttcaccctgctgaacagcttctggttcggcgtgggcgccctgatgcagcagggcagcgagctgatgcccaaggccctgagcaccagaatcgtgggcggcatctggtggttcttcaccctgatcatcatcagcagctacaccgccaacctggccgccttcctgaccgtggagagaatggagagccccatcgacagcgccgacgacctggccaagcagaccaagatcgagtacggcgccgtggaggacggcgccaccatgaccttcttcaagaagagcaagatcagcacctacgacaagatgtgggccttcatgagcagcagaagacagagcgtgctggtgaagagcaacgaggagggcatccagagagtgctgaccagcgactacgccttcctgatggagagcaccaccatcgagttcgtgacccagagaaactgcaacctgacccagatcggcggcctgatcgacagcaagggctacggcgtgggcacccccatgggcagcccctacagagacaagatcaccatcgccatcctgcagctgcaggaggagggcaagctgcacatgatgaaggagaagtggtggagaggcaacggctgccccgaggaggagagcaaggaggccagcgccctgggcgtgcagaacatcggcggcatcttcatcgtgctggccgccggcctggtgctgagcgtgttcgtggccgtgggcgagttcctgtacaagagcaagaagaacgcccagctggagaagagaagcttctgcagcgccatggtggaggagctgagaatgagcctgaagtgccagagaagactgaagcacaagccccaggcccccgtgatcgtgaagaccgaggaggtgatcaacatgcacaccttcaacgacagaagactgcccggcaaggagaccatggcctag

SEQ ID NO: 280620 - protein, 859 aa, Artificial Sequence
  derived and/or modified sequence
MGAEELAFRFAVNTINRNRTLLPNTTLTYDTQKINLYDSFEASKKACDQLSLGVAAIFGPSHSSSANAVQSICNALGVPHIQTRWKHQVSDNKDSFYVSLYPDFSSLSRAILDLVQFFKWKTVTVVYDDSTGLIRLQELIKAPSRYNLRLKIRQLPADTKDAKPLLKEMKRGKEFHVIFDCSHEMAAGILKQALAMGMMTEYYHYIFTTLDLFALDVEPYRYSGVNMTGFRILNTENTQVSSIIEKWSMERLQAPPKPDSGLLDGFMTTDAALMYDAVHVVSVAVQQFPQMTVSSLQCNRHKPWRFGTRFMSLIKEAHWEGLTGRITFNKTNGLRTDFDLDVISLKEEGLEKIGTWDPASGLNMTESQKGKPANITDSLSNRSLIVTTILEEPYVLFKKSDKPLYGNDRFEGYCIDLLRELSTILGFTYEIRLVEDGKYGAQDDANGQWNGMVRELIDHKADLAVAPLAITYVREKVIDFSKPFMTLGISILYRKPNGTNPGVFSFLNPLSPDIWMYILLAYLGVSCVLFVIARFSPYEWYNPHPCNPDSDVVENNFTLLNSFWFGVGALMQQGSELMPKALSTRIVGGIWWFFTLIIISSYTANLAAFLTVERMESPIDSADDLAKQTKIEYGAVEDGATMTFFKKSKISTYDKMWAFMSSRRQSVLVKSNEEGIQRVLTSDYAFLMESTTIEFVTQRNCNLTQIGGLIDSKGYGVGTPMGSPYRDKITIAILQLQEEGKLHMMKEKWWRGNGCPEEESKEASALGVQNIGGIFIVLAAGLVLSVFVAVGEFLYKSKKNAQLEKRSFCSAMVEELRMSLKCQRRLKHKPQAPVIVKTEEVINMHTFNDRRLPGKETMA

SEQ ID NO: 280621 - DNA, 2580 bp, Artificial Sequence
  derived and/or modified sequence
atgggggccgaagaattggccttcagattcgccgtgaatacaattaaccgcaatcgaacccttctgcccaatacgacactgacatacgacactcaaaagataaatctttatgacagctttgaagctagcaaaaaggcctgtgatcaactttctcttggcgtagcggccattttcggtccaagccactcttcctcagcgaacgcagtccagagcatctgcaatgcactcggcgtgccacatattcagaccagatggaagcaccaggtgtccgataataaagacagcttttacgtctcattatacccggactttagtagcctgagccgggcaattctcgatctagtacaattctttaagtggaaaactgtgaccgttgtttacgacgattcaactggactcatccggttgcaggaacttataaaagccccctcaagatataatctccggctaaaaatcagacagttgcccgccgacactaaagatgccaaacctcttctgaaggaaatgaagcgcggtaaagagttccacgtgatcttcgattgtagccatgaaatggcagctggtatcctgaagcaggcactggccatgggcatgatgaccgagtactatcactacatcttcaccactcttgacttgttcgcactggacgtggagccttatagatattccggagtgaacatgactggctttaggatccttaatacagagaacacgcaagtgagctcgatcatagagaaatggtccatggaaaggctgcaagcgcctcctaagcctgactctggcctgctagacggcttcatgacaacggacgctgcccttatgtacgacgccgtgcacgtggtgtcagtggctgtgcaacagttccctcagatgaccgtaagttctctgcagtgcaacaggcataagccttggagattcggcacccggtttatgagcctgattaaggaggcccactgggagggacttactggcaggatcacatttaacaagacgaacggacttcgtaccgattttgacttagacgtcatttccttgaaggaggagggcctggagaaaattggaacttgggacccagccagcggactgaacatgactgaaagccagaaggggaagccagcaaatatcacagatagcctctccaatagatcactgattgtgacgactatcctggaagaaccttacgtgctgtttaagaagagcgacaaacctctgtacggaaacgaccgttttgagggatattgcatcgatctcctgagagaactgtcaactattctgggtttcacctatgagatacgtctcgtggaagatgggaaatacggggcgcaggatgatgccaatggtcagtggaacggaatggtccgagagttgattgatcacaaggccgacctggcagtagcccccttggctattacttatgtacgcgagaaagttatcgacttctctaaaccctttatgaccttaggcattagtatactataccgcaagcccaatggtacgaatccgggcgttttttccttccttaacccactgtccccggacatctggatgtatatcctgctggcatatctcggcgtcagctgtgtgctgttcgtgatagctagattcagcccttacgagtggtacaacccccatccttgtaatccagattccgatgtggtggaaaacaattttactctgttaaattccttctggttcggagtgggagccctgatgcagcaaggttcagaactgatgcccaaggctttgagcaccaggatcgtcggggggatctggtggtttttcacactgatcatcatatcctcttataccgccaacctggccgcgttcctaacagtggagagaatggagtctcccatcgacagcgccgacgatttagccaaacaaaccaagattgagtacggcgcagtggaagacggcgccactatgacgttttttaaaaagtctaaaatcagtacctatgataagatgtgggcatttatgagcagtcgaaggcagtcggtccttgtgaaatctaatgaggagggcatacagcgggttttaacaagcgactatgccttcttaatggagtccactacgatcgaatttgtgacccagcgaaactgcaatctcacccagatcgggggccttatcgattccaagggctacggggttggcacgccaatgggcagcccttatagagacaaaattaccattgccatcctccagctccaggaggagggaaagctccatatgatgaaagagaagtggtggcgtggcaatggctgtccagaagaagaatcaaaggaggctagcgccctgggggtccagaatattggagggatcttcatcgtgctggcagccgggctcgtcctgtctgtgtttgtggcggtcggcgaattcctctacaaatcgaaaaaaaacgctcaactggaaaaacggagtttctgtagcgccatggtcgaggagctcagaatgtctctcaagtgtcagcgccgactcaagcacaagccgcaggcaccggtgattgtcaagacggaggaggtcatcaacatgcacaccttcaatgaccggcgcctacccggcaaggaaactatggcatag

SEQ ID NO: 280622 - DNA, 2580 bp, Artificial Sequence
  derived and/or modified sequence
atgggcgctgaggagctggccttccgctttgctgtgaacaccatcaacagaaacagaaccctgctgcccaacaccaccctgacctatgacacccagaagatcaacctgtatgacagctttgaggccagcaagaaggcctgtgaccagctgagcctgggcgtggccgccatcttcggccccagccacagcagcagcgccaatgctgtgcagagcatctgcaatgccctgggcgtgccccacatccagacccgctggaagcaccaggtgtctgacaacaaggacagcttctacgtgtccctgtacccagacttcagcagcctgagccgggccatcctggacctggtgcagttcttcaagtggaagacagtgacagtggtgtatgatgacagcacaggcctcatccggctgcaggagctgatcaaggcccccagccgctacaacctgcggctgaagatccggcagctgcctgctgacaccaaggatgccaagcccctgctgaaggagatgaagaggggcaaggagttccacgtgatctttgactgcagccatgagatggctgctggcatcctgaagcaggccctggccatgggcatgatgacagagtactaccactacatcttcaccaccctggacctgtttgccctggatgtggagccctaccgctacagcggcgtgaacatgacaggcttccgcatcctgaacacagagaacacccaggtgagcagcatcatcgagaagtggagcatggagcggctgcaggccccacccaagccagacagcggcctgctggatggcttcatgaccacagatgctgccctgatgtatgatgctgtgcacgtggtgtctgtggccgtgcagcagttcccccagatgacagtgagcagcctgcagtgcaacagacacaagccctggaggtttggcacccgcttcatgagcctcatcaaggaggcccactgggagggcctgaccggccgcatcaccttcaacaagaccaacggcctgaggacagactttgacctggatgtgatcagcctgaaggaggagggcctggagaagattggcacctgggaccctgccagcggcctgaacatgacagagagccagaagggcaagccagccaacatcacagacagcctgagcaacagaagcctgattgtgaccaccatcctggaggagccctacgtgctcttcaagaagagtgacaagcccctgtatggaaatgacagatttgagggctactgcatcgacctgctgcgggagctgagcaccatcctgggcttcacctatgagatccggctggtggaggatggcaagtatggagcccaggatgatgccaacggccagtggaatggcatggtgcgggagctgattgaccacaaggctgacctggccgtggcccccctggccatcacctacgtgcgggagaaggtgattgacttcagcaagcccttcatgaccctgggcatcagcatcctgtacaggaagcccaacggcaccaaccctggggtcttctccttcctgaaccccctgagcccagacatctggatgtacatcctgctggcctacctgggcgtgtcctgtgtgctcttcgtcatcgcccgcttcagcccctatgagtggtacaacccccacccctgcaacccagacagtgatgtggtggagaacaacttcaccctgctgaacagcttctggtttggagtgggcgccctgatgcagcagggcagcgagctgatgcccaaggccctgagcacccgcatcgtgggcggcatctggtggttcttcaccctcatcatcatcagcagctacacagccaacctggccgccttcctgactgtggagaggatggagagccccattgattctgcagatgacctggccaagcagaccaagattgaatatggagctgtggaggatggagccaccatgaccttcttcaagaagagcaagatcagcacctatgacaagatgtgggccttcatgagcagccggcggcagagcgtgctggtgaagagcaatgaggagggcatccagagggtgctgaccagtgactatgccttcctgatggagagcaccaccattgaatttgtgacccagaggaactgcaacctgacccagatcggcggcctgattgacagcaagggctatggagtgggcacccccatgggcagcccctacagagacaagatcaccatcgccatcctgcagctgcaggaggagggcaagctgcacatgatgaaggagaagtggtggagaggaaatggctgcccagaggaggagagcaaggaggccagcgccctgggcgtgcagaacattggaggcatcttcatcgtgctggccgccggcctggtgctgtctgtgtttgtggccgtgggggagttcctgtacaagagcaagaagaatgcccagctggagaagaggagcttctgcagcgccatggtggaggagctgaggatgagcctgaagtgccagaggcggctgaagcacaagccccaggcccctgtgattgtgaagacagaggaggtgatcaacatgcacaccttcaatgaccggcggctgcccgggaaggagaccatggcctag

SEQ ID NO: 280623 - DNA, 2580 bp, Artificial Sequence
  derived and/or modified sequence
atgggcgccgaggagctggccttccggttcgccgtgaacaccatcaatcgcaaccgcactctgctcccgaacactacactcacctatgatacgcagaaaatcaacttgtatgacagctttgaagcgtctaaaaaggcttgcgaccagctgagtttgggcgtagccgcgatctttggaccgtcccattcctcaagcgccaacgctgttcagagtatttgtaacgccctgggagtgcctcacattcagaccagatggaagcaccaggtgagcgacaataaagacagcttctatgtcagcctgtatccagacttctcaagtctgtctagggcaatcctggacttggtgcagttctttaaatggaagactgtgaccgtggtttatgacgatagtacgggtttaatcagactgcaggaactcattaaggctcctagtcgctacaatttgaggctcaaaatacggcagctccccgctgatactaaggacgctaaaccactgctgaaggagatgaaacggggaaaggagttccacgtgattttcgactgttcgcatgaaatggctgccggaatattaaagcaggctttggctatgggaatgatgacagagtattaccactacatttttacaaccctggatttgtttgccctcgatgtggagccttatagatattctggggtcaacatgacagggttcaggattctaaatacagagaatacacaggtgtcgtccattatagaaaaatggtccatggagcggttacaagccccgccaaagcccgactccgggctcctggacgggtttatgacaacagacgccgcgctgatgtacgacgctgtccacgtggtttctgtggcagtacagcagttcccccaaatgacagttagcagcctccagtgtaatcggcataaaccttggcgctttggcacacgttttatgtctctgattaaggaagctcattgggagggtctcactggtagaatcacctttaataagaccaatggtctgcgaacggacttcgatttagatgtgatctctctcaaggaggaaggcttggaaaagatcggaacgtgggacccagcctcaggcctgaacatgaccgaatcgcagaaaggcaaacctgccaatattactgattcattatctaacagaagcctcattgttacaactattttggaagaaccgtacgtgctctttaaaaagtctgacaaaccactgtacgggaatgaccgttttgaaggctattgtatcgatctgctaagggaattgagcaccattctgggctttacctatgaaatccgacttgtggaagacggcaagtatggagcacaggatgatgccaacgggcagtggaatggcatggtgagagagcttatcgaccataaagcggatctcgccgtggctccccttgcgatcacttacgtgagggagaaagttattgattttagtaagccttttatgactttaggcatctcaattctgtaccgaaaacctaacggaaccaatcccggcgtattctctttcctcaaccctctctcacccgatatttggatgtatatcctgttagcataccttggtgtatcttgcgtcttgtttgtgatagcgcggtttagtccatacgagtggtataatccgcatccatgcaatccagactccgatgtggtggaaaataacttcaccctgctgaatagtttctggtttggggtaggagcgctgatgcagcagggctcagagctcatgcccaaagcgctgagcactagaatcgtgggcggaatttggtggttttttaccctgattataatttcgtcctacaccgccaatttggccgctttcttaacagttgaacgcatggaatcccctattgactctgcagatgacctggccaagcaaactaagatcgagtacggagcagttgaggacggcgcaacaatgacgttcttcaaaaaaagcaaaattagcacttatgacaaaatgtgggcgtttatgagttccagacgtcaatcagtgctagtgaaaagcaacgaagaaggtattcagcgtgtactcaccagcgattatgccttcttgatggaatccactactattgaatttgtgacacaacgtaactgtaacctgacccagataggaggtctaattgattctaaaggctatggcgttggaaccccaatgggctcaccctatagagacaaaatcaccatcgcgattctgcagcttcaggaggagggcaagctccacatgatgaaggaaaagtggtggagaggaaacggctgtcccgaagaggaaagtaaggaggcgtctgccctgggcgtgcagaacataggagggatctttattgtcctggcagcagggctggtactgtcggtgttcgtcgccgttggggaattcctgtacaagagcaagaaaaacgcccagttggaaaagaggtccttttgttcagctatggtggaggaactcaggatgtccctgaaatgtcagcggcgcttaaagcacaagccacaggcccctgtaatcgtgaaaacagaagaggtgattaacatgcataccttcaatgatagaagactgcccgggaaagaaaccatggcctag

SEQ ID NO: 280624 - DNA, 2580 bp, Artificial Sequence
  derived and/or modified sequence
atgggagcggaggagttagcatttcggttcgctgtgaatactattaacaggaatagaactctgctgccgaatacgaccctgacatacgacacacagaagatcaacctctacgactctttcgaggccagtaaaaaggcttgcgatcagctctcactgggagtcgctgcaatttttgggccttctcactcttcctccgccaatgccgtgcagagtatctgcaacgcactcggggtaccccacatccagactaggtggaaacaccaggtgtccgataataaggacagtttctatgtttccctctacccagatttcagctccctgagccgtgccattctggaccttgtgcagttctttaaatggaagacagttactgtcgtatatgatgactcaacaggcctgattagacttcaggagctgattaaggcccctagcaggtacaacttgaggctgaaaatcaggcaattaccagctgatacaaaagatgccaagccacttctgaaagagatgaagcgaggcaaagagttccatgtgatctttgattgtagccacgagatggctgctgggattttgaagcaggccctggccatgggcatgatgaccgagtattatcattacatctttacaacacttgatctattcgctcttgatgttgaaccttacaggtactcaggcgtgaacatgacaggcttccgcatcttgaataccgagaatacccaggtatccagtattatagaaaagtggtccatggagcgactgcaggcaccacccaagccagattccggcctgctcgatggcttcatgacgacagacgctgcactcatgtacgatgccgttcacgtcgtgagcgtggcagtgcagcaattcccacagatgaccgtgtccagccttcagtgtaacaggcacaagccttggcgatttggcacccgctttatgagccttatcaaggaggcccattgggagggtctcaccggacgtatcaccttcaacaaaacgaatggactgcggactgacttcgatttagatgtcataagcctaaaagaggagggactggagaagattggcacttgggaccctgcgagtggcttgaacatgaccgaaagccagaagggaaagccagcaaatattactgactccctgagtaaccggagtctgatcgtgactaccatactcgaagaaccctacgttttgtttaagaaatccgacaaaccactctacggaaacgacagattcgagggatactgtatagaccttctgagggagctgagcaccatattgggtttcacgtatgagatcagattggtggaagacggtaagtacggtgcccaagatgacgcaaacgggcagtggaatggcatggttcgggagctgatcgaccacaaagccgatctagccgtagcccctcttgctatcacgtacgtcagagagaaggtcattgacttctctaagccctttatgacgctcggcatctctatcctgtaccgcaagccgaacggcaccaacccaggagttttttcatttctgaatccactgtccccggacatctggatgtatatcctgctcgcttatctcggcgtgagctgtgttctgttcgtgatagcccgatttagcccctacgagtggtacaatccccatccatgtaacccagacagcgacgtcgtggagaataattttacactgctgaacagcttttggtttggcgtaggcgctctgatgcagcaagggagtgaattaatgccgaaagcacttagcacccgcattgtgggagggatttggtggttcttcaccctgattatcattagcagctacactgccaacttggctgctttcctgacagtagaacggatggagtctcccatcgactctgcagacgacctcgccaaacaaaccaaaatcgaatacggggctgtcgaagatggggcaacaatgaccttttttaagaagagcaagatcagcacatatgacaaaatgtgggccttcatgtccagccgtcggcagtcagtgctcgtgaagagcaacgaagagggcatacagagggtgctaaccagtgattacgccttcctgatggagagcaccactatcgagtttgttacacagcgcaattgcaacttgacgcaaatcggaggcctgatcgattctaaagggtatggggtcgggacacccatgggctcaccttatcgcgataagatcaccatcgccattcttcagctgcaggaagaggggaagctgcacatgatgaaggaaaaatggtggaggggaaacggatgccctgaggaagagtcaaaggaggcctccgccttgggagtgcagaatatcggagggatcttcattgttttggccgcaggactggtcctgagtgtatttgtggcggtcggagagttcctttacaagtccaaaaagaacgcccaactggaaaaaagatccttttgttcggcaatggtagaagagctgcgaatgagcctaaagtgtcagcgtaggctaaagcacaagccacaggccccagtgatcgttaaaacagaggaggtgatcaatatgcacacattcaacgaccggaggttacccggtaaagagacaatggcctag

SEQ ID NO: 280625 - DNA, 2580 bp, Artificial Sequence
  derived and/or modified sequence
atgggcgccgaggagctggccttcagattcgccgtgaacaccatcaacagaaacagaaccctgctgcccaacaccaccctgacctacgacacccagaagatcaacctgtacgacagcttcgaggccagcaagaaggcctgcgaccagctgagcctgggcgtggccgccatcttcggccccagccacagcagcagcgccaacgccgtgcagagcatctgcaacgccctgggcgtgccccacatccagaccagatggaagcaccaggtgagcgacaacaaggacagcttctacgtgagcctgtaccccgacttcagcagcctgagcagagccatcctggacctggtgcagttcttcaagtggaagaccgtgaccgtggtgtacgacgacagcaccggcctgatcagactgcaggagctgatcaaggcccccagcagatacaacctgagactgaagatcagacagctgcccgccgacaccaaggacgccaagcccctgctgaaggagatgaagagaggcaaggagttccacgtgatcttcgactgcagccacgagatggccgccggcatcctgaagcaggccctggccatgggcatgatgaccgagtactaccactacatcttcaccaccctggacctgttcgccctggacgtggagccctacagatacagcggcgtgaacatgaccggcttcagaatcctgaacaccgagaacacccaggtgagcagcatcatcgagaagtggagcatggagagactgcaggccccccccaagcccgacagcggcctgctggacggcttcatgaccaccgacgccgccctgatgtacgacgccgtgcacgtggtgagcgtggccgtgcagcagttcccccagatgaccgtgagcagcctgcagtgcaacagacacaagccctggagattcggcaccagattcatgagcctgatcaaggaggcccactgggagggcctgaccggcagaatcaccttcaacaagaccaacggcctgagaaccgacttcgacctggacgtgatcagcctgaaggaggagggcctggagaagatcggcacctgggaccccgccagcggcctgaacatgaccgagagccagaagggcaagcccgccaacatcaccgacagcctgagcaacagaagcctgatcgtgaccaccatcctggaggagccctacgtgctgttcaagaagagcgacaagcccctgtacggcaacgacagattcgagggctactgcatcgacctgctgagagagctgagcaccatcctgggcttcacctacgagatcagactggtggaggacggcaagtacggcgcccaggacgacgccaacggccagtggaacggcatggtgagagagctgatcgaccacaaggccgacctggccgtggcccccctggccatcacctacgtgagagagaaggtgatcgacttcagcaagcccttcatgaccctgggcatcagcatcctgtacagaaagcccaacggcaccaaccccggcgtgttcagcttcctgaaccccctgagccccgacatctggatgtacatcctgctggcctacctgggcgtgagctgcgtgctgttcgtgatcgccagattcagcccctacgagtggtacaacccccacccctgcaaccccgacagcgacgtggtggagaacaacttcaccctgctgaacagcttctggttcggcgtgggcgccctgatgcagcagggcagcgagctgatgcccaaggccctgagcaccagaatcgtgggcggcatctggtggttcttcaccctgatcatcatcagcagctacaccgccaacctggccgccttcctgaccgtggagagaatggagagccccatcgacagcgccgacgacctggccaagcagaccaagatcgagtacggcgccgtggaggacggcgccaccatgaccttcttcaagaagagcaagatcagcacctacgacaagatgtgggccttcatgagcagcagaagacagagcgtgctggtgaagagcaacgaggagggcatccagagagtgctgaccagcgactacgccttcctgatggagagcaccaccatcgagttcgtgacccagagaaactgcaacctgacccagatcggcggcctgatcgacagcaagggctacggcgtgggcacccccatgggcagcccctacagagacaagatcaccatcgccatcctgcagctgcaggaggagggcaagctgcacatgatgaaggagaagtggtggagaggcaacggctgccccgaggaggagagcaaggaggccagcgccctgggcgtgcagaacatcggcggcatcttcatcgtgctggccgccggcctggtgctgagcgtgttcgtggccgtgggcgagttcctgtacaagagcaagaagaacgcccagctggagaagagaagcttctgcagcgccatggtggaggagctgagaatgagcctgaagtgccagagaagactgaagcacaagccccaggcccccgtgatcgtgaagaccgaggaggtgatcaacatgcacaccttcaacgacagaagactgcccggcaaggagaccatggcctag

SEQ ID NO: 280626 - DNA, 747 bp, Artificial Sequence
  derived and/or modified sequence
atgggcggacctctgagcctgggcactgactgcgcccacacagggtacaggcgagagctcacattatgtagccatcgcctgagacctaaggtgccttccaatcaaggctccgctgggagaggaggggcggagagaagggttctctgtcttcttttcgctgtccctgcggccgcagccttcggaatggaagaaatctacgcgaaatttgtgtcacagaaaatctcaaagaccagatggcgcccgctgccaccgggtagccttcagaccgccgaaacattcgctactggaagttgggataacgaagagaactacatatctctgtggtcgataggtgactttggcaaccttgactctgacgggggatttgagggggaccaccagctcctgtgtgacattcgacatcatggcgatgtcatggatctgcagttctttgatcaggagcggattgtggcagcttcttccacgggctgtgtaaccgtgttccttcaccaccccaacaaccagactcttagcgtgaaccagcagtggactacggctcactaccacacgggcccgggcagtccttcgtactcttcagcaccatgcacaggcgtggtttgcaataatcccgagattgtgactgtgggcgaggatgggaggatcaacttgttccgggcagatcataaggaggccgtcaggaccatcggcttggtgaccgagtgtcactctaccgtattaattgatatccccacgaacagtatgctgtag

SEQ ID NO: 280627 - DNA, 747 bp, Artificial Sequence
  derived and/or modified sequence
atgggcggccccctgagcctgggcacagactgtgcccacacaggctacagaagagagctgaccctgtgcagccaccggctgcggcccaaggtgcccagcaaccagggcagcgctggccggggcggcgctgagaggagagtgctgtgcctgctgtttgctgtgcctgctgctgctgccttcggcatggaggagatctatgccaagtttgtgtcccagaagatcagcaagacccgctggaggcccctgcccccaggcagcctgcagacagctgagacctttgccaccggctcctgggacaatgaggagaactacatcagcctgtggagcatcggggactttggaaacctggacagtgatggcggctttgaaggagaccaccagctgctgtgtgacatccgccaccacggagatgtgatggacctgcagttctttgaccaggagagaattgtggccgccagcagcacaggctgtgtgacagtgttcctgcaccaccccaacaaccagaccctgtctgtgaaccagcagtggaccacagcccactaccacactggacctggcagccccagctacagcagcgccccctgcaccggggtggtgtgcaacaaccctgagatcgtgacagtgggggaggatggccgcatcaacctcttccgggctgaccacaaggaggccgtgaggaccatcggcctggtgacagagtgccacagcacagtgctgattgacatccccaccaacagcatgctgtag

SEQ ID NO: 280628 - DNA, 747 bp, Artificial Sequence
  derived and/or modified sequence
atgggcggccccctgagcctgggcaccgactgcgcccacaccggctatagacgggagttgaccctgtgtagccacaggctgagaccaaaagttccatctaatcaggggtctgcagggaggggtggggcagagcgacgggtcctctgcttgctcttcgccgtacccgccgccgcagctttcggtatggaggaaatctacgctaaatttgtgtcgcaaaaaatctctaagaccagatggagacctctccctcctggttctctacagacagccgagacttttgcaactgggtcttgggataacgaagaaaactatatcagcttgtggtcaatcggagacttcggaaacctggacagcgacggggggtttgagggagaccaccaactgctctgcgacatcaggcatcacggcgatgtcatggatctgcaatttttcgaccaggagagaattgtcgccgctagctcaacgggttgtgttacagtttttttgcaccatcccaacaaccagactctctcagtaaaccagcagtggaccacagctcattaccataccggccctggatcccctagctatagtagcgccccatgcactggcgtagtctgcaataaccctgagattgtgacggtaggtgaagatgggaggattaatctctttagagccgatcataaggaggccgtgagaacgatagggctggtgaccgagtgccattctactgtactgatcgatatccccactaactctatgttgtag

SEQ ID NO: 280629 - DNA, 3836 bp, Artificial Sequence
  derived and/or modified sequence
atgggtgggcctctcagtctaggtactgactgtgcccacactggctatcgacgagaattgactctctgcagccaccgtctccgtcctaaagtcccatccaatcagggttccgcgggaagaggcggtgctgagaggcgcgtactgtgcttgctttttgcagtacctgctgcggccgctttcggcatggaggaaatttatgcgaagtttgtgtcccagaaaatcagcaaaacccgctggcgaccgctgcctccgggaagtttacagaccgcggagacgttcgctacaggatcttgggacaatgaggaaaattatatttcactgtggtctattggagattttggaaacttggactctgatggagggtttgaaggagaccatcagttattgtgtgatatcagacaccatggtgatgtaatggatttacagttttttgaccaggaaagaattgtcgctgcttcatcaacaggatgtgtaacagttttccttcaccatccaaataaccagactctgtcagtcaaccagcagtggactacagctcactaccacacaggccctggcagtccttcctatagcagtgcaccatgtacaggtgttgtgtgcaacaacccagaaatcgttacagttggagaggatggtcgaataaatctcttcagagctgatcacaaggaagctgtaagaaccataggactggtgaccgagtgccactccactgtgttgatagacatcccaaccaacagcatgttgtagctactggtggccaagatggaatgttgagtatttgggatgttagacaaggtactatgcctgtatctctgctgaaggctcatgaagctgaaatgtgggaagttcactttcacccatccaacccagaacatctttttacctgctctgaagatggatccctctggcactgggatgcttccacagatgtacctgaaaagtcgtcactctttcaccaaggaggaagaagcagtacttttttgtctcatagcattagtaaccaagctaatgttcaccagtctgtcattagctcctggctcagcactgatcctgcaaaagaccgaattgaaatcacaagcttacttcccagtaggtctctgtctgtgaacactttggatgttttaggtccttgtcttgtttgtggaaccgatgcagaagcaatttatgttactagacatcttttttcgtagaagtactataattataagatttcagatagaacatgcaattagccttttgaaatccaacttctgtgcaaaattttagtatcagaaaatacgagatttgcaggggaaacatcagtaaactaccattaatgtcaatgcccagttttgacttttgttagcctgacactcccaaacagttgtagaatccgatagatgactgatggcaaaagattgtgaacatgtggaagaaaatcagtgggattctggtgctgatgaataggttgccttcagagtattattgacagacagcttgtggaactaattctttatttttgatgttgtgggaattaacacatcaatggtggttatgggaactaccaatgggttcctacaatttttatcagtagtatgtggcatatacaccttcctagtggcagttgccaatgttaatgattattctttttattgcaagtatttcctatgatccttccacactttatttccttaataataataaactttttcagaaagaattgagtagagcaaaaatgacaaagatgtgtagctgtgttcaatttttttttttttttttttttgaggcagagtcttgctctgctggagtgcggtggtgcaatctcggctcactgcaacctccacctcccaggttcaagcaattctcctgcctcagtctcctgagtagctggaactacaggtgtgcgccaccacgcccagctaatttttgtaattttagtagagacagagtttcaccatgttggccaggatggtctcgatctcttgacctcatgatccacccgcctcgacctcccaaagtgctgtgattacaggtgtgagccactgcacccggcctgaaatttttttaaggtgaaaatgttttgacaagttcctttttcagaataggtttttgagcagaactctttcagcttgttagacccaactttgcttttgtttagcttcacagcatagctgaaagttgccaaactggacattgtgcaataaagtagaattctatattgataagcaaactatttccaaactaaaaatgtgatagataaaagtgtgattaatcaaatgatatgatcagagtaaagaattttgccattttgatccttttactttgttttagccacctatagtgttaccaaccatctttatccttgtctgcagggataataatgaactaatgtagtgttttaagataatttaatgatactatctttccaaactttgttagattttaaatgtattattgacctgagaccttaatgacaaatcactgctattagacaattgaagtgttcatttactttgtaattccaataatcatagttatggaattatggtaaggttttgcttttctgtcctaataaatatatatattttttgagatggagttttgctcttgttgctgaggctggagtgaaatggcatgatctcagctcactgcaacctccgtctcttaggttcaagcaattctcctgcctcagcctcccgagtagctgggattacaggtgctcaccaccacacccagctaatttttgtatttttagtagagatggggtttcactgtgttggccaggctggtcttgaactgacctcatgatccacctgcctcagcctcccaaaatgctgggattacaggcttgagccactgctcccggctgatttttgtattagtagagacgacagggtttcaccatgttggccagggctggtctcgaactcctgaccacaggtaatcagcccgcctcggcctcccaaagtgctgggattacaggcgtgagccacttagtatttgtaaccataagagaaagtatattttaacagcattacatttcatgccaattgacaagttttgccaattttaataagaaactaagctttatgtaatgtaacaccgtaatttatgaatttgttcattgtcactgcctttattcatgaaactgtcaaatagagtgtctttcaagggttgcaggatcttagagatagaaagtaccttggtgatcatctccagcctaaatttcatcatcccttctatggtattcccaacaaattatcatccaacctatacttaaaaacatatggtggccaggcatggtggctcacgcctgtaatgctagcactttgggaggccgaggtgggtgaagcacctgaggtcaagagttcgagatcagcctggccaacatggcgaaaccccgtctccactaaaaatgcaaaaaaaaaattaaccgggcgtggtggcaggcatctataatcccagctacttgggaggctgaggcaggagaattgctcaaacccgggaggcagaggttgcagtgacccaagatcgtgccacttcactccagcctgggcaaaagagcaaaacgccatctcaaaaaatatacatatataaggagataaagtttcccattttccaatacagtttcacatttgaacagccctaattgatacaactttatggcagggttttagtgtgtgagtgggatccaaaacactcaatcctgtaaaagggtacagtcctattgtatgttaacacactgatgatgtgagcctgtgagatgagccaatcaccagttgttatgttcgaatctgctttgtgttgggacgctttaatgtcagggtttcactaaataaatgaattttcatatactg

SEQ ID NO: 280630 - DNA, 747 bp, Artificial Sequence
  derived and/or modified sequence
atgggtggcccactatctctgggcacagattgcgcccatacgggctaccgaagagaattgacattgtgttcacaccggctgcgccctaaagtgccgagcaatcagggttctgccggacgtggtggcgcagagagaagggtgctgtgtttgctttttgccgtgcccgcagccgcagcctttggaatggaagagatttatgcgaagtttgtgagtcaaaagatctcgaagacgcggtggcggccactccctcccggttcgttgcagaccgcagaaactttcgcaactggatcctgggacaacgaggagaactatatcagcctctggagtatcggcgacttcgggaatttagatagcgacggcggattcgaaggcgatcaccagttattgtgtgacatcaggcaccacggcgatgtcatggacctccagttcttcgaccaggaaagaatagtggctgcctcttccactgggtgcgtgacagtttttttacatcatccgaacaaccaaacactgagtgtgaatcagcagtggaccaccgctcactatcacaccggtccagggagcccaagctactctagcgccccatgtaccggagtggtgtgcaacaacccggaaattgtcaccgtgggcgaggatggccgaataaatctctttcgcgcagatcacaaggaagctgttaggacgattgggctcgtgaccgaatgccacagcacagtcctgattgacatcccgaccaacagtatgctgtag

SEQ ID NO: 280631 - DNA, 747 bp, Artificial Sequence
  derived and/or modified sequence
atgggcggccccctgagcctgggcaccgactgcgcccacaccggctacagaagagagctgaccctgtgcagccacagactgagacccaaggtgcccagcaaccagggcagcgccggcagaggcggcgccgagagaagagtgctgtgcctgctgttcgccgtgcccgccgccgccgccttcggcatggaggagatctacgccaagttcgtgagccagaagatcagcaagaccagatggagacccctgccccccggcagcctgcagaccgccgagaccttcgccaccggcagctgggacaacgaggagaactacatcagcctgtggagcatcggcgacttcggcaacctggacagcgacggcggcttcgagggcgaccaccagctgctgtgcgacatcagacaccacggcgacgtgatggacctgcagttcttcgaccaggagagaatcgtggccgccagcagcaccggctgcgtgaccgtgttcctgcaccaccccaacaaccagaccctgagcgtgaaccagcagtggaccaccgcccactaccacaccggccccggcagccccagctacagcagcgccccctgcaccggcgtggtgtgcaacaaccccgagatcgtgaccgtgggcgaggacggcagaatcaacctgttcagagccgaccacaaggaggccgtgagaaccatcggcctggtgaccgagtgccacagcaccgtgctgatcgacatccccaccaacagcatgctgtag

SEQ ID NO: 280632 - DNA, 1962 bp, Artificial Sequence
  derived and/or modified sequence
atgcctgtaggtggcctcctacccctgttctcctcacccgcggggggcgtcttgggcgggggcctgggggggggcggtggacggaaaggcagtggccctgcagccctccggctgacagaaaagtttgtgcttcttctggtattttcggcatttatcactctgtgtttcggcgcaatcttcttcctccctgacagctcgaaactcctgagcggagttttgttccattcaagtcccgccttacaacccgctgccgatcataagcctggccctggggcccgggccgaagacgccgctgaaggaagggcgcgacggagggaggagggggccccgggagacccggaggcagctttagaggacaatctggcgcgtatcagggaaaaccatgaaagagcattacgcgaggccaaggaaaccttgcaaaaactgccagaggaaattcagcgcgatatcttgcttgagaagaaaaaggttgcccaggaccaactccgggacaaggcaccctttagaggactgcctcctgttgactttgtgccgccaataggggttgaatccagagaaccggctgatgctgccatacgggaaaagcgcgctaagatcaaggagatgatgaaacacgcctggaataattataaggggtatgcctggggactgaatgaactcaagcctatatccaaaggaggccatagttcttcgctgttcggtaatatcaaaggcgccacgatcgtcgatgcgctggatacactattcatcatggaaatgaaacacgagtttgaagaggccaagtcgtgggtggaagagaatctggattttaatgtgaacgccgaaatcagtgtgttcgaagttaacatccgctttgtaggcggcctcctgtctgcatattatctgtctggggaggaaatctttaggaagaaggccgttgagctcggtgtcaagttattgccggcgttccataccccctcagggattccctgggccctattgaacatgaagtcaggaatagggcgcaactggccttgggctagcggaggaagtagcattcttgcggagttcggcactcttcacctggaatttatgcatctctcacacctgagcggaaatcccattttcgcagagaaagttatgaacatcaggaccgtcttaaacaaactcgaaaaaccccaaggactctaccccaactaccttaatccttcttcagggcagtggggccagcatcacgtgtcagtgggtggcctcggagatagtttctatgagtacctcctgaaggcatggctgatgagcgacaagaccgacttggaagcaaaaaaaatgtattttgacgcagttcaagccattgagactcaccttatccgcaagtcgagcagtggactcacgtacatcgccgagtggaaaggaggactcttagaacacaaaatggggcaccttacatgtttcgccggtgggatgttcgcactgggtgcggacgctgctccagaaggtatggcccaacattacttggagttgggcgctgagatagcccggacatgtcatgaaagttacaacaggacattcatgaagctcggcccagaagctttcaggttcgacggtggcgtagaagcgatcgctactcgccaaaacgaaaaatactatatcttaagacctgaagtgatggaaacgtacatgtatatgtggcgattgacacatgatccaaagtaccgcaagtgggcatgggaagctgtggaagcactggagaatcactgtcgcgtcaacgggggatactccggccttcgggacgtataccttttgcacgaaagttatgacgacgttcagcagtcatttttcttagcagagactctgaaatatttgtacttgatcttcagcgacgacgatttgctccccctcgagcattggatatttaattcagaagcacacctgctgcccatactgccgaaagacaagaaggaggtagaaattagagaggagtag

SEQ ID NO: 280633 - DNA, 1962 bp, Artificial Sequence
  derived and/or modified sequence
atgcctgtgggcggcctgctgcccctcttcagcagccctgctgggggcgtgctgggcggcggcctgggcggcggcggcggcaggaaaggaagtggccctgctgccctgcggctgacagagaagtttgtgctgctgctggtgttttctgccttcatcaccctgtgcttcggggccatcttcttcctgcctgacagcagcaagctgctgagcggcgtgctcttccacagcagccctgccctgcagcctgctgctgaccacaagccaggccctggggcccgggcagaagatgctgctgagggccgggcccggcggcgggaggagggcgcccctggggaccctgaggccgccctggaggacaacctggcccgcatccgggagaaccacgagcgggccctgcgggaggccaaggagaccctgcagaagctgcctgaggagatccagagggacatcctgctggagaagaagaaggtggcccaggaccagctgcgggacaaggcccccttccggggcctgccccctgtggactttgtgccccccatcggcgtggagagccgggagccagcagatgctgccatccgggagaagagggccaagatcaaggagatgatgaagcacgcctggaacaactacaagggctacgcctggggcctgaatgagctgaagcccatcagcaaaggaggccacagcagcagcctgtttggaaacatcaagggggccaccatcgtggatgccctggacaccctcttcatcatggagatgaagcatgaatttgaggaggccaagtcctgggtggaggagaacctggacttcaacgtgaatgctgagatctctgtgtttgaggtgaacatccgctttgtgggcggcctgctgagcgcctactacctgagcggggaggagatcttcaggaagaaggctgtggagctgggcgtgaagctgctgcctgccttccacacccccagcggcatcccctgggccctgctgaacatgaagtctggaattggaagaaactggccctgggccagcggcggcagcagcatcctggccgagtttggcaccctgcacctggagttcatgcacctgagccacctgagcggcaaccccatctttgctgagaaggtgatgaacatcagaacagtgctgaacaagctggagaagccccagggcctgtaccccaactacctgaaccccagcagcggccagtggggccagcaccacgtgtctgtgggcggcctgggggacagcttctatgagtacctgctgaaggcctggctgatgtctgacaagacagacctggaggccaagaagatgtactttgatgctgtgcaggccatcgagacccacctgatcaggaagagcagcagcggcctgacctacatcgccgagtggaagggcggcctgctggagcacaagatgggccacctgacctgctttgctgggggcatgtttgccctgggcgcagatgctgcccctgagggcatggcccagcactacctggagctgggcgctgagatcgcccggacctgccacgagagctacaacagaaccttcatgaagctgggccctgaggccttccgctttgatggaggagtggaggccatcgccacccggcagaatgagaagtactacatcctgcggcctgaggtgatggagacctacatgtacatgtggaggctgacccatgaccccaagtacaggaagtgggcctgggaggccgtggaggccctggagaaccactgccgggtgaatggaggctacagcggcctgagagatgtgtacctgctgcacgagagctatgatgatgtgcagcagagcttcttcctggccgagaccctgaagtacctgtacctgatcttcagtgatgatgacctgctgcccctggagcactggatcttcaacagcgaggcccacctgctgcccatcctgcccaaggacaagaaggaggtggagatccgggaggagtag

SEQ ID NO: 280634 - DNA, 5014 bp, Artificial Sequence
  derived and/or modified sequence
agtgctcgcggggccgcggcggagtgtaccgtgctgctctactcgctgccattcgcccgcaggtcggcgcgctcgcccacctgagccgcgccggggctgcgggaccgtgggacagcgcgctcagcccagcctaggaaagaggcagcagtctcagcgcggagatggggagcgggcgaagttgacgagtctcccgcccacgctgcgcccctcctgcccagaggggctgcagccagcggtctgtcgcgcgtgcctgtgtgcccgaggagccgccccggggagaagacccggcgcggagttgttcccccagggaggatccgcagcccagccgagggggtcgggcggcctggctacgcaggacccagccccgcagccgcggactcccagcggcggcgaagtttggctgctgagcggcgcggcgccggaccactggacagcgggagcgatgcccgtggggggcctgttgccgctcttcagcagccccgcgggcggcgtcctgggcggggggctcggcggcggcggtggcaggaaggggtcgggccccgccgccctccgcctgacggagaagttcgtgctgctgctggtattcagcgccttcatcacgctctgcttcggggcgatcttcttcctgccagactcctccaagctgctcagcggggtcctgttccactccagccccgccttgcagccggccgccgaccacaagcccgggcccggggcgcgcgccgaggacgcggccgaggggcgagcccggcgccgcgaggagggggcacccggggacccggaggccgccctggaggacaacttggccaggatccgcgaaaaccacgagcgggctctcagggaagccaaggagaccctgcagaagctgcccgaggagatccaaagagacatcctactggagaagaagaaggtggcccaggaccagctgcgtgacaaggcgccgttcagaggcctgcccccggtggacttcgtgcccccaatcggggtggagagccgggagcccgccgacgccgccatccgcgagaaaagggcaaagatcaaagagatgatgaaacatgcttggaataattataaaggttatgcctggggattaaatgaactcaaacctatatcaaaaggaggccattcaagcagtttgtttggtaacatcaaaggagcaactatagtagatgccctggatacactttttattatggaaatgaaacatgaatttgaagaagcaaaatcatgggttgaagaaaatttagattttaatgtgaatgctgaaatttctgtctttgaagtaaatatacgctttgttggtggactactctcagcctactatctgtctggagaagagatttttcgaaagaaagcagtggaacttggggtaaaattgctacctgcatttcatactccctctggaataccttgggcattgctgaatatgaaaagtggtattggaaggaactggccctgggcctctggaggcagcagtattctggcagaatttggaaccctgcatttggagtttatgcacttgagccacttatcaggaaaccccatctttgctgaaaaggtaatgaatattcgaacagtactgaacaaactggaaaaaccacaaggcctttatcctaactatctgaatcccagtagtggacagtggggtcaacatcatgtatcagttggaggacttggagacagcttctatgagtatttgctgaaggcctggttaatgtctgacaagacagatctggaagctaagaagatgtattttgatgctgttcaggctatcgagactcatttgatccgcaagtctagcagcggactaacttatatcgcagagtggaaagggggcctcctggagcacaagatgggccacctgacctgcttcgcggggggcatgttcgcactcggggctgatgcagctcccgaaggcatggcccaacactaccttgaactcggggctgaaattgcccgtacttgtcatgaatcatataatcgaacatttatgaaactgggaccagaagctttcagatttgatggtggtgttgaagccatcgctacaagacaaaatgaaaaatactacatcttacggccagaagttatggagacttacatgtatatgtggagactgactcatgatccaaagtacaggaaatgggcctgggaagccgtagaggccttggaaaaccattgcagagtgaatggaggctattcaggcctaagggatgtttaccttcttcatgagagttatgatgatgtgcagcagagtttcttcctggcagagacattgaaatatttgtacctaatattttctgacgacgatcttcttccactggagcattggatcttcaatagcgaggcacatcttctccctatcctccctaaagataaaaaggaagttgaaatcagagaggaataaaaagacattttatattttattctgctccattcccttcactgtataccttaataattccttttctggtaatcaggcacatgatgaactttgattagtaggtctgtgattaagttcttaaattgttttgcagtcttttatgtttattatcataggtataggtggacctaaattccttatcatatcctttattaattcagccagtgtatccaccagttttttgtttatgtttttaagtaacctattatctctggatttcatgaaggtgtaatatcgtttttgttaaactgaatagaattgtatagcgatgacctcttaattataatttgatttgactgcaaaactttttcctcctctaagaggagatgatgtctgctttaagctgtaatgttttgccatgttgcaaaaagccataataataagtataaaaaagctttttcctttacaatttcatgttaatctggtttgtctgtccaccagagacagatcttctgtgacagcctccttatgcaggtctatcattatttgatagaatgtcttctaaaatacttcactcacattgtaattcaaattagaaagtcattccaaaaggatcatgtcatgttgacctcatttcatcggaactgcagtatatttttgttggttaattatattagtgttttctattttgtaaatgtgtcctttaattttactttaaatgccctgtgtcatttctggattatatactagttaatttcttccattccccactacacagagaggtgagctttcaaattttgcagagctctgctatcactgaattacatttatctgaagaaaatagtacaacttaatggattagcttttgggtttaactgaatatatgaagaaattgggtctgtctaaagagagggtatttcatatggcttttagttcacttgtttgtatttcatcttgatttttttctttggaaaataaagcattctatttggttcagatttctcagatttgaaaaaggctctatctcagatgtagtaaattatttcctttcagtttgtgaaagcaggatttgactctgaaagaagctttgccaattttacttattcgtgatcaatcaaggaaaatctaataaattttaggccaaataagaatatagcatatttagtatggttatagtcaacacagagatcacaacttagaagaaatataaagaaatggccactccccatcccccacagtcctggagtaaatcaaaatcaatatatgattcttttaaacattaagtttgaaataggaatggttttctcaagaatagatttggtgtgataccttgtgtttgcttacattggcccactatatatacatatatatttatgtagatatacttccatgaaagggctaatacgatgcatatactgaagggcaaggactttgaccatgtcaattttcagccgagaatggtcagaaagatcagtacaaccccatggattaggctgaaacatatgaaattgctgcatttgtagtttaaaaactgtcagcagtttcatatggttccacctaatattattgaagacaattattttcttagctatcaataggcttaatagttttagttattttagcttttgaaagtgttttaaaagatttcctttatcggacaggaccatctttatgacctgctttctgtttttcaatatcatacattggtgtatgtcaaagaataaattagtaaaattagtaaatgaaaaagactcttccgtacatcattatttccatgctaatgtgtgtctgtgatccagaataacttctcccactcatatcttcagttcacctaatgaaatgaatggatagcaagagccctttgttcccaggactttaaggcaaaatattaaaaattattgccaaaattaagaatataatgtttgtataaatgtccttgaatttgccatttaaattaactcattttcttttcactttgatttgaaagctgataagtatttctgcagcagatagaatattaaaatcaggttgtgtgtacacactgcactatgaggtaccttggtgtcctggtgtgaatagacaagaagctgtactatatgttgctctctcagtggcaacaatgaagtttttgcaattctagaacttggatttttttttaacaaaagtcccaaaacaccaaaaatgtaaacaagataagagattaatattgtagtgatgtaatttaattaaagttatattttgggttaattttaacaactgaagtcttattgttgaaacttattttcaacaaaactgtgcagttaaatttgtatacgtattcacatactgaaagatgaaccgttaaaatagcacttaattttgtgtttcttcaatatgtcttgatatactttgtgcaattaatattacacatgtaagttgtatggcagtttacagaactcaatgacttgtcatgaggttttcatatgagctacacattgtgtacattgattgttttttatttttacataaatccattctgtcattttcaactttatatataaatctccaatgttatgggaaacaatagattgacacataatttttaaaaattatatttgtaaaatttctctattgtgaataaagtcttttaatata

SEQ ID NO: 280635 - DNA, 1962 bp, Artificial Sequence
  derived and/or modified sequence
atgcccgtgggcggcctgctgcccctgttcagcagccccgccggcggcgtattaggtgggggactgggaggaggaggagggcgaaaaggctctggcccagctgctctgaggctgaccgaaaaattcgtgctactgctggtgttcagcgcgtttattacactgtgcttcggtgcgatcttctttttgcctgattcctccaagctgttaagcggcgtgctgttccattccagcccggctctgcagccagcggccgaccataaacctggaccaggcgctagggccgaagatgcagctgaagggcgcgcgaggcgccgcgaggaaggggctccaggggaccccgaggctgcgctagaggacaatctggcccggatccgcgaaaatcacgagagggctctgagagaagccaaggaaacattacagaagctgcccgaagagattcaacgcgacatcttgctggagaaaaaaaaagtcgcacaggaccagctcagggataaggcccccttccggggtctcccacctgtggacttcgtccctccgatcggcgttgagagcagggagcccgctgatgccgccatcagggagaaaagagcaaaaataaaagaaatgatgaagcacgcgtggaataattacaaaggctatgcctggggtttgaacgaactgaagccgatcagcaagggaggacacagttctagtctgtttgggaacatcaaaggagccacaattgtggatgccctggacaccctgtttattatggaaatgaaacacgaattcgaagaggccaaaagttgggtcgaggagaaccttgactttaatgtaaatgcagagataagtgttttcgaagtgaatatcaggttcgttggtggactgctttccgcatactacctgtcgggtgaagagatatttagaaagaaggcggttgaactcggggtaaagttgctgccagccttccatacaccctccggtatcccatgggccctgctaaatatgaaatctgggattggaagaaactggccatgggcatccgggggctctagcattctcgctgaattcgggactctccacttggagtttatgcacttgtcacacctgtcgggcaaccccatctttgcggaaaaggtgatgaacatccgtacagtgcttaacaagttggagaagccccagggattgtatccaaactatcttaacccctcttctgggcagtggggacaacaccatgtctcagtgggcggcctcggggacagcttttatgagtatctactcaaagcatggctcatgtctgataagacggatctcgaggctaaaaaaatgtattttgacgcagttcaggccatcgagactcatttgattagaaagagctcgtcgggcttaacttatattgccgagtggaagggaggacttctcgaacataaaatgggacacctcacttgcttcgcaggtggcatgttcgccctaggagcagatgccgcccccgagggcatggcccaacattatttggagctaggagctgaaatcgcccgcacatgccacgagtcatacaaccgaacattcatgaaactgggacctgaagcctttcgtttcgatggcggcgtggaggcgatcgccaccagacagaatgaaaagtactatattctgcgccctgaagtgatggaaacctacatgtacatgtggcgactgactcatgaccccaaatatcggaaatgggcctgggaggctgtggaagctttagagaaccattgtcgggtgaacggcgggtattccgggctccgagatgtgtacctgctgcatgaaagctatgacgacgtgcagcagtcttttttcctggcagagactctgaagtatctgtatttgatcttctctgatgatgatttactgcctctggagcattggatcttcaacagcgaagcacatcttctgccgattctgccaaaagacaagaaagaagttgagatccgagaagaatag

SEQ ID NO: 280636 - DNA, 1962 bp, Artificial Sequence
  derived and/or modified sequence
atgccagtaggcggactgctgcccttattcagttctcctgcaggcggagtactgggcggagggctggggggtgggggagggcgaaagggctccggacctgctgcactgcgtctgacagaaaagtttgtgctgttgctggttttctcagcttttatcactctgtgcttcggcgcaatattttttctgcctgactccagtaaactgctttccggcgttttattccattcctccccagcgctgcagccagccgcagaccacaagccaggccctggagcacgcgcagaagatgctgcggaaggacgagcacgacgcagggaggaaggcgcaccgggagacccagaggctgccctcgaggataatctcgctaggattagggaaaatcatgagcgcgcactccgggaagccaaagagactctgcagaagttgcctgaggaaatccagcgtgacatcttactggagaagaagaaagtggctcaagaccagcttcgggacaaggctccattccgcggactgccgccagtcgactttgtgcccccaatcggagtcgaaagcagagagcccgctgatgcagcaattagggaaaagagggctaaaataaaagagatgatgaagcacgcttggaacaactataagggttatgcctggggcttaaacgagctcaagccaatttccaaaggaggtcatagttctagcctttttggaaacattaaaggggcaacaatcgtggatgcactggatacgctgtttattatggagatgaagcacgagttcgaggaagccaaaagctgggtggaagagaacctggatttcaacgtcaatgccgagatatcggttttcgaggtaaatataaggttcgtgggaggtctcttgagcgcctactatctgtctggtgaagagatctttcgcaagaaagctgtcgaactgggcgtaaaactgctccctgcctttcataccccaagtggtatcccctgggccttgctgaatatgaaatccggaattggcagaaactggccatgggcctctggtgggtcctcaatcttagccgagttcggcacattacacctggagttcatgcacctgagccacctgagtggcaacccaattttcgctgagaaagtgatgaatattcggaccgtgctcaataagctggaaaagccacagggcctttatcctaattacctgaaccctagttctggtcagtggggtcaacatcacgtctcagttggaggactgggagactccttttacgaatacctcttgaaagcctggcttatgtccgacaaaacagacctcgaagctaaaaaaatgtatttcgacgccgtacaggctatcgaaactcacctgattagaaaatcctcgtctggcctgacatacattgcggagtggaaaggcggactcctcgagcacaaaatgggacacctgacttgctttgcaggcggtatgttcgctttaggcgctgatgcagcccctgaaggaatggctcagcactacctagaacttggtgccgaaatcgccaggacctgtcacgaatcgtacaatagaacctttatgaagctagggcctgaagcattccgtttcgacggcggtgtggaagcaattgctactcggcagaacgaaaaatattatattctccgcccagaggtgatggagacatacatgtacatgtggagacttacccatgacccaaagtaccggaagtgggcatgggaagctgttgaagcgcttgaaaatcattgccgcgttaacgggggatatagcgggctaagggatgtctacctgttgcacgagtcttatgatgacgtgcagcagtcctttttcctcgccgaaacactgaaatacctttacctgatcttttccgatgacgatctcctgcccctggagcactggatcttcaactccgaggcccatctgttgccgatcctgcctaaagacaaaaaagaagtcgaaatccgcgaggagtag

SEQ ID NO: 280637 - DNA, 1962 bp, Artificial Sequence
  derived and/or modified sequence
atgcccgtgggcggcctgctgcccctgttcagcagccccgccggcggcgtgctgggcggcggcctgggcggcggcggcggcagaaagggcagcggccccgccgccctgagactgaccgagaagttcgtgctgctgctggtgttcagcgccttcatcaccctgtgcttcggcgccatcttcttcctgcccgacagcagcaagctgctgagcggcgtgctgttccacagcagccccgccctgcagcccgccgccgaccacaagcccggccccggcgccagagccgaggacgccgccgagggcagagccagaagaagagaggagggcgcccccggcgaccccgaggccgccctggaggacaacctggccagaatcagagagaaccacgagagagccctgagagaggccaaggagaccctgcagaagctgcccgaggagatccagagagacatcctgctggagaagaagaaggtggcccaggaccagctgagagacaaggcccccttcagaggcctgccccccgtggacttcgtgccccccatcggcgtggagagcagagagcccgccgacgccgccatcagagagaagagagccaagatcaaggagatgatgaagcacgcctggaacaactacaagggctacgcctggggcctgaacgagctgaagcccatcagcaagggcggccacagcagcagcctgttcggcaacatcaagggcgccaccatcgtggacgccctggacaccctgttcatcatggagatgaagcacgagttcgaggaggccaagagctgggtggaggagaacctggacttcaacgtgaacgccgagatcagcgtgttcgaggtgaacatcagattcgtgggcggcctgctgagcgcctactacctgagcggcgaggagatcttcagaaagaaggccgtggagctgggcgtgaagctgctgcccgccttccacacccccagcggcatcccctgggccctgctgaacatgaagagcggcatcggcagaaactggccctgggccagcggcggcagcagcatcctggccgagttcggcaccctgcacctggagttcatgcacctgagccacctgagcggcaaccccatcttcgccgagaaggtgatgaacatcagaaccgtgctgaacaagctggagaagccccagggcctgtaccccaactacctgaaccccagcagcggccagtggggccagcaccacgtgagcgtgggcggcctgggcgacagcttctacgagtacctgctgaaggcctggctgatgagcgacaagaccgacctggaggccaagaagatgtacttcgacgccgtgcaggccatcgagacccacctgatcagaaagagcagcagcggcctgacctacatcgccgagtggaagggcggcctgctggagcacaagatgggccacctgacctgcttcgccggcggcatgttcgccctgggcgccgacgccgcccccgagggcatggcccagcactacctggagctgggcgccgagatcgccagaacctgccacgagagctacaacagaaccttcatgaagctgggccccgaggccttcagattcgacggcggcgtggaggccatcgccaccagacagaacgagaagtactacatcctgagacccgaggtgatggagacctacatgtacatgtggagactgacccacgaccccaagtacagaaagtgggcctgggaggccgtggaggccctggagaaccactgcagagtgaacggcggctacagcggcctgagagacgtgtacctgctgcacgagagctacgacgacgtgcagcagagcttcttcctggccgagaccctgaagtacctgtacctgatcttcagcgacgacgacctgctgcccctggagcactggatcttcaacagcgaggcccacctgctgcccatcctgcccaaggacaagaaggaggtggagatcagagaggagtag

SEQ ID NO: 280638 - DNA, 324 bp, Artificial Sequence
  derived and/or modified sequence
atggaagagcctcccccgccaccacccccaccacctcccccaccggagccagagactgaaagtgaacctgagtgctgcctggctgccagacaggaagggacactgggggacagtgcctgtaagtcacctgagagcgacttagaggatttctccgacgagacgaacaccgagaacctttacggtacctcaccaccgtccactccaagacagatgaaaagaatgtcgacgaagcaccaaagaaataacgtgggtcgacccgccagtcgtagtaatttgaaaggtgtccggcagatttctcatgctgtttcttcttctctcaattag

SEQ ID NO: 280639 - DNA, 324 bp, Artificial Sequence
  derived and/or modified sequence
atggaggagcccccacctcctcctcctcctcctcctcctcctcctgagcctgagacagaaagtgagcctgagtgctgcctggccgcccggcaggagggcaccctgggggacagcgcctgcaagagccctgagagtgacctggaggacttcagtgatgagaccaacacagagaacctgtatggcaccagcccccccagcaccccccggcagatgaagaggatgagcaccaagcaccagaggaacaacgtgggccggcctgccagccgcagcaacctgaagggcgtgcggcagatcagccatgctgtgagcagcagcctgaactag

SEQ ID NO: 280640 - DNA, 461 bp, Artificial Sequence
  derived and/or modified sequence
acttcggggctccggtgccccgcgccaggctgcagcttactgcccgccgcggccatgcggggctccgtgcacggatgagagaagccgctgccgcgctggtccctcctcccgcctttgccgtcacgcctgccgccgccatggaggagccgccgccaccgccgccgccgccaccaccgccaccggaacccgagaccgagtcagaacccgagtgctgcttggcggcgaggcaagagggcacattgggagattcagcttgcaagagtcctgaatctgatctagaagacttctccgatgaaacaaatacagagaatctttatggtacctctccccccagcacacctcgacagatgaaacgcatgtcaaccaaacatcagaggaataatgtggggaggccagccagtcggtctaatttgaaaggtgtccgtcagatctcccatgctgtttcttcctccttaaattga

SEQ ID NO: 280641 - DNA, 324 bp, Artificial Sequence
  derived and/or modified sequence
atggaggagccccccccccccccccccccccccccccccccccccgaacccgaaaccgagagcgaaccagaatgttgtctagcggcaagacaagaagggacgctgggcgactcagcctgcaaaagccccgaatctgacctagaggacttttcagatgagactaacacggaaaacctatacggtaccagccccccaagcacccccagacaaatgaaaagaatgtccaccaaacaccagcgcaacaacgtgggtcggcctgcctccaggagtaatttgaagggagtgcgacagatttcccacgctgtgagcagctctctcaactag

SEQ ID NO: 280642 - DNA, 324 bp, Artificial Sequence
  derived and/or modified sequence
atggaggagccaccacccccacctcccccacctccaccccctcccgagcccgagactgaatccgagcccgaatgctgcctggcagccaggcaagaaggcaccttaggcgatagcgcatgcaagagcccagaatctgaccttgaagacttttccgacgaaaccaatacagagaatttatacggtactagtcccccaagtacgcctcggcagatgaagcgaatgtctactaaacaccagagaaataatgtgggcaggcctgctagtcggtctaacttaaaaggggtcaggcagatcagccatgcagtatcttcctccttgaactag

SEQ ID NO: 280643 - DNA, 324 bp, Artificial Sequence
  derived and/or modified sequence
atggaggagccccccccccccccccccccccccccccccccccccgagcccgagaccgagagcgagcccgagtgctgcctggccgccagacaggagggcaccctgggcgacagcgcctgcaagagccccgagagcgacctggaggacttcagcgacgagaccaacaccgagaacctgtacggcaccagcccccccagcacccccagacagatgaagagaatgagcaccaagcaccagagaaacaacgtgggcagacccgccagcagaagcaacctgaagggcgtgagacagatcagccacgccgtgagcagcagcctgaactag

SEQ ID NO: 280644 - protein, 1661 aa, Artificial Sequence
  derived and/or modified sequence
MSAGGRDEERRKLADIIHHWNANRLDLFEISQPTEDLEFHGVMRFYFQDKAAGNFATKCIRVSSTATTQDVIETLAEKFRPDMRMLSSPKYSLYEVHVSGERRLDIDEKPLVVQLNWNKDDREGRFVLKNENDAIPPKKAQSNGPEKQEKEGVIQNFKRTLSKKEKKEKKKREKEALRQASDKDDRPFQGEDVENSRLAAEVYKDMPETSFTRTISNPEVVMKRRRQQKLEKRMQEFRSSDGRPDSGGTLRIYADSLKPNIPYKTILLSTTDPADFAVAEALEKYGLEKENPKDYCIARVMLPPGAQHSDEKGAKEIILDDDECPLQIFREWPSDKGILVFQLKRRPPDHIPKKTKKHLEGKTPKGKERADGSGYGSTLPPEKLPYLVELSPGRRNHFAYYNYHTYEDGSDSRDKPKLYRLQLSVTEVGTEKLDDNSIQLFGPGIQPHHCDLTNMDGVVTVTPRSMDAETYVEGQRISETTMLQSGMKVQFGASHVFKFVDPSQDHALAKRSVDGGLMVKGPRHKPGIVQETTFDLGGDIHSGTALPTSKSTTRLDSDRVSSASSTAERGMVKPMIRVEQQPDYRRQESRTQDASGPELILPASIEFRESSEDSFLSAIINYTNSSTVHFKLSPTYVLYMACRYVLSNQYRPDISPTERTHKVIAVVNKMVSMMEGVIQKQKNIAGALAFWMANASELLNFIKQDRDLSRITLDAQDVLAHLVQMAFKYLVHCLQSELNNYMPAFLDDPEENSLQRPKIDDVLHTLTGAMSLLRRCRVNAALTIQLFSQLFHFINMWLFNRLVTDPDSGLCSHYWGAIIRQQLGHIEAWAEKQGLELAADCHLSRIVQATTLLTMDKYAPDDIPNINSTCFKLNSLQLQALLQNYHCAPDEPFIPTDLIENVVTVAENTADELARSDGREVQLEEDPDLQLPFLLPEDGYSCDVVRNIPNGLQEFLDPLCQRGFCRLIPHTRSPGTWTIYFEGADYESHLLRENTELAIPLRKEPEIITVTLKKQNGMGLSIVAAKGAGQDKLGIYVKSVVKGGAADVDGRLAAGDQLLSVDGRSLVGLSQERAAELMTRTSSVVTLEVAKQGAIYHGLATLLNQPSPMMQRISDRRGSGKPRPKSEGFELYNNSTQNGSPESPQLPWAEYSEPKKLPGDDRLMKNRADHRSSPNVANQPPSPGGKSAYASGTTAKITSVSTGNLCTEEQTPPPRPEAYPIPTQTYTREYFTFPASKSQDRMAPPQNQWPNYEEKPHMHTDSNHSSIAIQRVTRSQEELREDKAYQLERHRIEAAMDRKSDSDMWINQSSSLDSSTSSQEHLNHSSKSVTPASTLTKSGPGRWKTPAAIPATPVAVSQPIRTDLPPPPPPPPVHYAGDFDGMSMDLPLPPPPSANQIGLPSAQVAAAERRKREEHQRWYEKEKARLEEERERKRREQERKLGQMRTQSLNPAPFSPLTAQQMKPEKPSTLQRPQETVIRELQPQQQPRTIERRDLQYITVSKEELSSGDSLSPDPWKRDAKEKLEKQQQMHIVDMLSKEIQELQSKPDRSAEESDRLRKLMLEWQFQKRLQESKQKDEDDEEEEDDDVDTMLIMQRLEAERRARQTAMPAISVLDLLQDEERRRQQQLEEMRKREAEDRARQEEERRRQEEERTKRDAEEK

SEQ ID NO: 280645 - protein, 1665 aa, Artificial Sequence
  derived and/or modified sequence
MSAGGRDEERRKLADIIHHWNANRLDLFEISQPTEDLEFHGVMRFYFQDKAAGNFATKCIRVSSTATTQDVIETLAEKFRPDMRMLSSPKYSLYEVHVSGERRLDIDEKPLVVQLNWNKDDREGRFVLKNENDAIPPKKAQSNGPEKQEKEGVIQNFKRTLSKKEKKEKKKREKEALRQASDKDDRPFQGEDVENSRLAAEVYKDMPETSFTRTISNPEVVMKRRRQQKLEKRMQEFRSSDGRPDSGGTLRIYADSLKPNIPYKTILLSTTDPADFAVAEALEKYGLEKENPKDYCIARVMLPPGAQHSDEKGAKEIILDDDECPLQIFREWPSDKGILVFQLKRRPPDHIPKKTKKHLEGKTPKGKERADGSGYGSTLPPEKLPYLVELSPGRRNHFAYYNYHTYEDGSDSRDKPKLYRLQLSVTEVGTEKLDDNSIQLFGPGIQPHHCDLTNMDGVVTVTPRSMDAETYVEGQRISETTMLQSGMKVQFGASHVFKFVDPSQDHALAKRSVDGGLMVKGPRHKPGIVQETTFDLGGDIHSGTALPTSKSTTRLDSDRVSSASSTAERGMVKPMIRVEQQPDYRRQESRTQDASGPELILPASIEFRESSEDSFLSAIINYTNSSTVHFKLSPTYVLYMACRYVLSNQYRPDISPTERTHKVIAVVNKMVSMMEGVIQKQKNIAGALAFWMANASELLNFIKQDRDLSRITLDAQDVLAHLVQMAFKYLVHCLQSELNNYMPAFLDDPEENSLQRPKIDDVLHTLTGAMSLLRRCRVNAALTIQLFSQLFHFINMWLFNRLVTDPDSGLCSHYWGAIIRQQLGHIEAWAEKQGLELAADCHLSRIVQATTLLTMDKYAPDDIPNINSTCFKLNSLQLQALLQNYHCAPDEPFIPTDLIENVVTVAENTADELARSDGREVQLEEDPDLQLPFLLPEDGYSCDVVRNIPNGLQEFLDPLCQRGFCRLIPHTRSPGTWTIYFEGADYESHLLRENTELAQPLRKEPEIITVTLKKQNGMGLSIVAAKGAGQDKLGIYVKSVVKGGAADVDGRLAAGDQLLSVDGRSLVGLSQERAAELMTRTSSVVTLEVAKQGAIYHGLATLLNQPSPMMQRISDRRGSGKPRPKSEGFELYNNSTQNGSPESPQLPWAEYSEPKKLPGDDRLMKNRADHRSSPNVANQPPSPGGKSAYASGTTAKITSVSTGNLCTEEQTPPPRPEAYPIPTQTYTREYFTFPASKSQDRMAPPQNQWPNYEEKPHMHTDSNHSSIAIQRVTRSQEELREDKAYQLERHRIEAAMDRKSDSDMWINQSSSLDSSTSSQEHLNHSSKSVTPASTLTKSGPGRWKTPAAIPATPVAVSQPIRTDLPPPPPPPPVHYAGDFDGMSMDLPLPPPPSANQIGLPSAQVAAAERRKREEHQRWYEKEKARLEEERERKRREQERKLGQMRTQSLNPAPFSPLTAQQMKPEKPSTLQRPQETVIRELQPQQQPRTIERRDLQYITVSKEELSSGDSLSPDPWKRDAKEKLEKQQQMHIVDMLSKEIQELQSKPDRSAEESDRLRKLMLEWQFQKRLQESKQKDEDDEEEEDDDVDTMLIMQRLEAERRARQTAMPAISVLDLLQDEERRRQQQLEEMRKREAEDRARQEEERRRQEEERTKRDAEEKVMVL

SEQ ID NO: 280646 - protein, 1824 aa, Artificial Sequence
  derived and/or modified sequence
MSAGGRDEERRKLADIIHHWNANRLDLFEISQPTEDLEFHGVMRFYFQDKAAGNFATKCIRVSSTATTQDVIETLAEKFRPDMRMLSSPKYSLYEVHVSGERRLDIDEKPLVVQLNWNKDDREGRFVLKNENDAIPPKKAQSNGPEKQEKEGVIQNFKRTLSKKEKKEKKKREKEALRQASDKDDRPFQGEDVENSRLAAEVYKDMPETSFTRTISNPEVVMKRRRQQKLEKRMQEFRSSDGRPDSGGTLRIYADSLKPNIPYKTILLSTTDPADFAVAEALEKYGLEKENPKDYCIARVMLPPGAQHSDEKGAKEIILDDDECPLQIFREWPSDKGILVFQLKRRPPDHIPKKTKKHLEGKTPKGKERADGSGYGSTLPPEKLPYLVELSPGRRNHFAYYNYHTYEDGSDSRDKPKLYRLQLSVTEVGTEKLDDNSIQLFGPGIQPHHCDLTNMDGVVTVTPRSMDAETYVEGQRISETTMLQSGMKVQFGASHVFKFVDPSQDHALAKRSVDGGLMVKGPRHKPGIVQETTFDLGGDIHSGTALPTSKSTTRLDSDRVSSASSTAERGMVKPMIRVEQQPDYRRQESRTQDASGPELILPASIEFRESSEDSFLSAIINYTNSSTVHFKLSPTYVLYMACRYVLSNQYRPDISPTERTHKVIAVVNKMVSMMEGVIQKQKNIAGALAFWMANASELLNFIKQDRDLSRITLDAQDVLAHLVQMAFKYLVHCLQSELNNYMPAFLDDPEENSLQRPKIDDVLHTLTGAMSLLRRCRVNAALTIQLFSQLFHFINMWLFNRLVTDPDSGLCSHYWGAIIRQQLGHIEAWAEKQGLELAADCHLSRIVQATTLLTMDKYAPDDIPNINSTCFKLNSLQLQALLQNYHCAPDEPFIPTDLIENVVTVAENTADELARSDGREVQLEEDPDLQLPFLLPEDGYSCDVVRNIPNGLQEFLDPLCQRGFCRLIPHTRSPGTWTIYFEGADYESHLLRENTELAIPLRKEPEIITVTLKKQNGMGLSIVAAKGAGQDKLGIYVKSVVKGGAADVDGRLAAGDQLLSVDGRSLVGLSQERAAELMTRTSSVVTLEVAKQGAIYHGLATLLNQPSPMMQRISDRRGSGKPRPKSEGFELYNNSTQNGSPESPQLPWAEYSEPKKLPGDDRLMKNRADHRSSPNVANQPPSPGGKSAYASGTTAKITSVSTGNLCTEEQTPPPRPEAYPIPTQTYTREYFTFPASKSQDRMAPPQNQWPNYEEKPHMHTDSNHSSIAIQRVTRSQEELREDKAYQLERHRIEAAMDRKSDSDMWINQSSSLDSSTSSQEHLNHSSKSVTPASTLTKSGPGRWKTPAAIPATPVAVSQPIRTDLPPPPPPPPVHYAGDFDGMSMDLPLPPPPSANQIGLPSAQVAAAERRKREEHQRWYEKEKARLEEERERKRREQERKLGQMRTQSLNPAPFSPLTAQQMKPEKPSTLQRPQETVIRELQPQQQPRTIERRDLQYITVSKEELSSGDSLSPDPWKRDAKEKLEKQQQMHIVDMLSKEIQELQSKPDRSAEESDRLRKLMLEWQFQKRLQESKQKDEDDEEEEDDDVDTMLIMQRLEAERRARLQDEERRRQQQLEEMRKREAEDRARQEEERRRQEEERTKRDAEEKRRQEEGYYSRLEAERRRQHDEAARRLLEPEAPGLCRPPLPRDYEPPSPSPAPGAPPPPPQRNASYLKTQVLSPDSLFTAKFVAYNEEEEEEDCSLAGPNSYPGSTGAAVGAHDACRDAKEKRSKSQDADSPGSSGAPENLTFKERQRLFSQGQDVSNKVKASRKLTELENELNTK

SEQ ID NO: 280647 - protein, 1824 aa, Artificial Sequence
  derived and/or modified sequence
MSAGGRDEERRKLADIIHHWNANRLDLFEISQPTEDLEFHGVMRFYFQDKAAGNFATKCIRVSSTATTQDVIETLAEKFRPDMRMLSSPKYSLYEVHVSGERRLDIDEKPLVVQLNWNKDDREGRFVLKNENDAIPPKKAQSNGPEKQEKEGVIQNFKRTLSKKEKKEKKKREKEALRQASDKDDRPFQGEDVENSRLAAEVYKDMPETSFTRTISNPEVVMKRRRQQKLEKRMQEFRSSDGRPDSGGTLRIYADSLKPNIPYKTILLSTTDPADFAVAEALEKYGLEKENPKDYCIARVMLPPGAQHSDEKGAKEIILDDDECPLQIFREWPSDKGILVFQLKRRPPDHIPKKTKKHLEGKTPKGKERADGSGYGSTLPPEKLPYLVELSPGRRNHFAYYNYHTYEDGSDSRDKPKLYRLQLSVTEVGTEKLDDNSIQLFGPGIQPHHCDLTNMDGVVTVTPRSMDAETYVEGQRISETTMLQSGMKVQFGASHVFKFVDPSQDHALAKRSVDGGLMVKGPRHKPGIVQETTFDLGGDIHSGTALPTSKSTTRLDSDRVSSASSTAERGMVKPMIRVEQQPDYRRQESRTQDASGPELILPASIEFRESSEDSFLSAIINYTNSSTVHFKLSPTYVLYMACRYVLSNQYRPDISPTERTHKVIAVVNKMVSMMEGVIQKQKNIAGALAFWMANASELLNFIKQDRDLSRITLDAQDVLAHLVQMAFKYLVHCLQSELNNYMPAFLDDPEENSLQRPKIDDVLHTLTGAMSLLRRCRVNAALTIQLFSQLFHFINMWLFNRLVTDPDSGLCSHYWGAIIRQQLGHIEAWAEKQGLELAADCHLSRIVQATTLLTMDKYAPDDIPNINSTCFKLNSLQLQALLQNYHCAPDEPFIPTDLIENVVTVAENTADELARSDGREVQLEEDPDLQLPFLLPEDGYSCDVVRNIPNGLQEFLDPLCQRGFCRLIPHTRSPGTWTIYFEGADYESHLLRENTELAQPLRKEPEIITVTLKKQNGMGLSIVAAKGAGQDKLGIYVKSVVKGGAADVDGRLAAGDQLLSVDGRSLVGLSQERAAELMTRTSSVVTLEVAKQGAIYHGLATLLNQPSPMMQRISDRRGSGKPRPKSEGFELYNNSTQNGSPESPQLPWAEYSEPKKLPGDDRLMKNRADHRSSPNVANQPPSPGGKSAYASGTTAKITSVSTGNLCTEEQTPPPRPEAYPIPTQTYTREYFTFPASKSQDRMAPPQNQWPNYEEKPHMHTDSNHSSIAIQRVTRSQEELREDKAYQLERHRIEAAMDRKSDSDMWINQSSSLDSSTSSQEHLNHSSKSVTPASTLTKSGPGRWKTPAAIPATPVAVSQPIRTDLPPPPPPPPVHYAGDFDGMSMDLPLPPPPSANQIGLPSAQVAAAERRKREEHQRWYEKEKARLEEERERKRREQERKLGQMRTQSLNPAPFSPLTAQQMKPEKPSTLQRPQETVIRELQPQQQPRTIERRDLQYITVSKEELSSGDSLSPDPWKRDAKEKLEKQQQMHIVDMLSKEIQELQSKPDRSAEESDRLRKLMLEWQFQKRLQESKQKDEDDEEEEDDDVDTMLIMQRLEAERRARLQDEERRRQQQLEEMRKREAEDRARQEEERRRQEEERTKRDAEEKRRQEEGYYSRLEAERRRQHDEAARRLLEPEAPGLCRPPLPRDYEPPSPSPAPGAPPPPPQRNASYLKTQVLSPDSLFTAKFVAYNEEEEEEDCSLAGPNSYPGSTGAAVGAHDACRDAKEKRSKSQDADSPGSSGAPENLTFKERQRLFSQGQDVSNKVKASRKLTELENELNTK
